United States Patent Application Publication US 2026/0058010 A1 - sequence listing, part 58

SEQ ID NO: 673 - DNA, 1116237 bp, Homo sapiens
  source 1..1116237: mol_type = genomic DNA
cttgcattctttgggacctaggcctgagaaatcacggtcagtagatttccctataacatggggctggggagcaagtgccaaacagggaatgttctgaaaactccttaggcacaagctgaagatatgtttgaggttttggatacagaacatttataggatatcttttggtggtccaagaggacttgagtgtaccttgtaaatacaggattttgtttttaattagattgattcacagagaaccaaacctaaggaatcacatcattcattcatttgttcatttaataaatttgtaggttgaagcatttaccaagtgctggcaatagaaagaagtcccgggtgtgctttgtcagtttagtcgggactacacaaatgagtcaataactgtagtggagtgatgcgatctcaactgccaggaatcccccggctctcctctcttcctgtgcctcttcaggtaattagctatcctttctttcttttattttccttccttccttccttccttccttccttccttccttccttccttccttccttccttcctccctccctccctccctccctccctttctttccagattctggacctattccagacttactaaaggaaattctctaaaggtgaggcagttttttaaagacagcagctctctctgtcgtccatgctggagtgcagtggcccgatcatagctcactgcagcctcgacttcttgggctcaagtgatcctcccccttcagcctcaatgagtagctgggactaccgatgtgcactaccacgcccggcaaactaaaaaaataattatttttggtaaagacaggggtcttgcgatgttgcccaggctgttctcaaactcctggcctcaagtgatcctcctgcctcagcctcctaatgtgtttggattacaggcatgagccactgagcccggcctagctaccctgtctgagttgtgcccactacacaaaggtgtcagctacatgtgatgtctgtgcatttctggcctggaccgcacattaagtgctccgtaaacatcagtctctattatcaacagtctctattatcaatcagtctctattatcatcagtctctattatcatgagtctctattaaacaacagtctctattatcacagtctctattatgtgttttggctgaaagaaagttctctaaaaccaggaaatcaggaatcagcagttttaagttctccaggttatattttaacattgtgttcatatgcaaaacaaaggttgtgaatcagcacgaatgctggcaagccctggaaggtttgtgatcacggactttcacgagaccccaaggcaaggagagacagaagcccaggacaacagcatgggcgccgctttttagtcgggcgccgctttttggtcaggcgccacctggactacatttcccatatccaattgccgggctcctgcaggattggccagaacaacgcggaagtgattacgggtcgcccagcaacgggcggagtcctggcccgaaactggatgcgcacgccccttccctgcggcggggaggctgacaaggctccgctctatctctagcgcctcggagcgctctccggctttgctgtctagcccggcggcagcgcgatctcttaggcactttcaccgccttcctctccaggccctgcccctttgacgccggccgtcgcgatattgcggagactggatttcagcttcgtggtcggcggagcggcccctggagggcgcagtgcgcaggcgtgagcggtcgggccccgacgcgcgcgggtctcgtttggagcgggagtgagttcctgagcgagtggacccggcagcgggcgataggggggccaggtgcctccacagtcagccatggcagcgctgcgctacgcggggctggacgacacggacagtgaggacgagctgcctccgggctgggaggagagaaccaccaaggacggctgggtttactacgccaagtaagggggccgcagtggggccgcggacgcacctgggaccctgcacagcccacggacgccacctgcgcggggaggacgcgcactccagcgcagcgcgtgcggtgcaaagtgaaagtaactgttaaggagcttcagggaaaagggtccagggttcccagtaggggccggcccccttggtgggcctcgggtccagcgggggtcacctggtggcttcccggcgcgccctctgctgttcaggatgcagcactgcgcggcgcggcgagggcaaagcggcctcatccccgccaaaaaataaagatgttttaaaaagcgcacatgctcagctccctcctgcaggctctgggttgcagggataggagttttgttgtgttttgttttgttttgtccagaccggtattgctcagtcatccaggctggagtgcaggggtgccatcatagcccactgtagcctctacctactgggttcagacaatcctctcatctcagcctcttgagtggctgggactacaagcgtgcactactatgcccgactaattttttaagtatttgtagagactagggtcgcaccatgttgcccaggctggtctcgaactactgggctcaagcaggccacctgcctcagcctccagaattgagattacaggcgtgagccactgcgcctagccaggagtattttttagtagcagtcctagatagcttcactatcatttcctgggaaagttttggaaaccccagcagagccttcatctttaactgtgtgaccttgggccattgaaataacgtttaatcttggttttttcacctgtaaaatgggttgatacgagggtcagttcaggcactgtgcgtaaagcacatagcaccgtgtctagtaggtactctctgttccttaactgtcgttccttgattgctcttaagatacgacagtgcctcttatatcggcaccttagaatcacctaggaaatgtcctaaatacacgttttgggtctccatagagaacctactgtagccgactctcaactttgggagtctctttttttaagctttccaggtgaggtggaatatcacctggttttgagaaacatggatgtaaatctgattttcagcatctgggaaactttttttgtaagagcctttttctgggccccacttccagagggtttttcttttttttttttcttttgagacggagtcttgctctgtcgcccaggctggagtgcagcggcgcgatctcggctcactgcagcctccgcctcccgggttcacgccattctcctgcctcagcctcccgagtagctgggactacaggcgcccgccaccacgcccggctaagtttttgtgtttttagtagagacggggtttcaccgtgttagccaggatggtctcgatctcctgacctcgtgatcctcccgcctcggcctctcaaagtgctgggattacaggcgtgagctaccgctcccggcctttttttttttttttttaaagacagggtctcgctccgtcgcccaaactggagtgccgtggtgcgatctcggttcactgcaacctctgcatgccgagttcaagcgattctcgtgtctcagcctcccgaatagctgggattacaggcgcccgccaccaggcctggctaatttcgcgctgttggcccggctggtctccaactcctggcctcaagtgatccgcccacctcggccccccaaagtgttggcattacagacaggagccactgcgtcagcccagaatttctgatttaattggtttggcccctcccctctcccttggtaggttgtaaaatcttccctcccaggtgattctaatctatgcaaggatgtgaaccactgctgcctttggtggcaaggtagaggaaaaacaaccaagttctgatgagttcattcaagacacacacaggtattatgtgacaggcctttggctggcactggttataccgaggcaaataagagccagttgtcatccttaggacccaatcttattagggcacagtgacatgtgtaggagcgtccccacgcagtgtgtataccaggaagtagtgtgtctggcatgaggtgtgtgtaggtagttgggggggtcgtgagggaatatggtggcaccctcacagtaaccttcacttcctgggctcaagcgatcctcccgcatcagcctgttgagtacccgggaccacaggtgtgtgcctccacacccagctaattattacatgttttgtagaaatggggtctcaccatgttgcccaggctggtttgaactcctgaactcaagccagcctccctcccgaagcactggaatcacaggcctgaggcactgtgccaagcccagagcggtgttttgagctcaagtagaggtgggtggggcaggagggcagtctaggtagagggaacagtgagaggagagaccccctgcatggcctgtccaggggcctgtgatctttgtgagggtccaggaatgtgaaggttaaggcagggaagggaggacccatttcaaggatttctgtgccttgccgagaagcttgggctctgttggcagagccagagagtggcattcattcagcttgtgaattctggaagaatttctggctctggagaattaaagggacatttccagcagcagagctccagtagcctttgcagggacggaggcaagctcctgagcgggcacttgctgttcctctcacctgtacatctgttggggaaaggctccttctcatccttcagagctgagcttacatgtcactgcccaagagaccttcttaactgtgggtgtcccctcgaccttgtactagtcaccttgtttctctgcttcttcgtgcttagccttggctgtgtactcctccttgttggccctgtctcccttgcccaggttgcagatgtcatggggcagcttgttcatctgagtgtccccagtgcttggcacccagaagccataagatgagcccctgtgggatgagtaaatgaatcaccttgggagggtcagccgcaggcttctgtgggtgggtgggtggtgcactgggccccagagtacaaagatgcacatgacccgcttccggcttcctaagcccacctctgcctctggctctgtggggcgtctcctcctttgccactcagccccagaggtgcttctgcttccctgcaggcttgccctggagcctggcgctagggccctggggctcccttgctcctgcgtgccccctgcgcctgccttcctgctgcctggcctttctcccatctgctttcttcctgagtggcccctggccaggggactcgggtgcatacatggtttccaaacgcctttcctccagccctcccgactagtgtcttaaatctcaagctggcctctctggctccgctgttttttttttttttttttttttaatttaatttaactttaaattccgggatacatgtgcaggatgtgcaggtttgttacataagtaaacctgtgccatggtgacttgctgcacttgtcaacccatcacctagttgttcagccccccgtgcattagctatttattgtatacaccagctgagatgccagggcttggctggctctcagctggagggctcactctctggaccttgtgtccgtccctgctggccctcagttctctggatcagggttgaaaggctgaaattctttgggtgttagcttaggatgcctctgatccatcctaacccgacattcccttgatctctcctgatctgtgagcatcctggcccttcttttcttttcagttttaatttttgcgctggctccaaccccttttcattcctgactctggaagtgacacttgtttttctcttggggtttgggaaactttgtggttgttctttctaggaggctgctctttgagtcatttcttttccatattgtttctcctactgtagcagggccatggccagggatagaggctgtagctcccactgagacctcggggtctggtggaacccggtcttgtgtgggtgctgtcggcctctcctgctttcccacctgcctcacggttcacttgtgtgcctcaaaggcacacatgtcctagcactccaaagcccaccagggtgggctcccaggggtgaggtcgaggtagaccgggaacccaagagagctggtgggcctttcttctacccctctcccctcacagtctcagagcagccccttcatgggagatgggaagtgagggacaaggtctcagtgtcagagccgtccttgtttgcccttccccgtgcctcttatgaagctcaggccttttggcagtcagaggcctcaatggtgcctgtgtccacagggctggctgtcctcaccgtgaagtctagatctccctgctaacttacactgtgctcaaaacacacacacacacacacacacacacacacacacacacactggctgtcctcactgtcaactctagatctccctgctaacttacactgtgctcaaaaaacacacgcacgcacgcacgcatgcacgcacatacacacacacacacacacccataggctggccatggtgggaggccaaggtgggaggatcgcctgagcccaggagctcgaggctgcagtgggctatgattgcatcactgtactctagcctgggccacagaatgagaccttgtctaaaaaaaaattaacagaaaacaccccatacgtggaagtgtggtattcacataatatgatgttcacttaaatttgaatcctttggtttaagtttagattactcttaattatctttttaaatgacaagctcgttgaaagaataaaaaatcaaagacggcttctatttaaaggagaataggagaatgcttaggggacatgtgttctaattttctcttcattaaaaagtcatttaaggttataattaaaaagaacatcttttaattaatttttatatttattaaaaaaaagtcttctattgaaaggtacagttcttagttcttcccgtgttaactcactcggttctctataaccccaagaagtaagtgctgttattgtccccatctaaactgttgaggaaactgaggcatgggattaaatgacttcttcaagggcagagtggctggcaaatgggagacccagaaaaccttggcagttgggcttcagaatcttcacgaccaaattactctctctgcttcagctggttccggattcttccccagggatggttgtgtcctgcaggggacggctggcaatgtctggagatgctttctgttgccacagctatgggactggggtattggcatctgatgggcagaggccagtggtgcccaaggcagccccgcaacaaagaatgatgcaggccgggtgcagtggttcacgcctgtaatcccagcactttgggaggccgaggcaggtggatcagttgaggtcaggagttcgagacctgcctggccaacatggtgaaaccccatctctactaaaaatacaaaaattatcccggcatggtggcaggtgcctgtaatcctagctactcaggctgaggcgggagaattgcttgaacctgggaggcagaggttgcagtgagctgagattgcaccactgtactgcagcctgggtgacagagtgagactctgtctcaaaaaaaaaaaaaagaatgatccagccccaagtgccaccagcagtgagaataagaaaccctgattcaggcatgttctgtgaaagtcaagaacgtaggttgacagagtttgttttgttttttaaatgtctttctgaataaataaaaactgttctgagtgagttttgtagttcctttggaaagtattcattctgtttgtttacatttgtgcgcctgctgtgggccaggcatgaggctacatgtctgagggcccagcttcaccttctaagggctgggaggctctttctatgccagcctgcctgccaacaaggctcagcttccactgttaagggtcattttgtggatttttttattttttatttttaggttgagtcttgctttttcgcccaggctggactgcagtggcgtgattttggctcactgcaacctccacctcccaggttcaggaaattctcatgcctcagccactcaagtagctgggattacaggcatgtgccaccatgtctgtctaatttttgtatttttagtagagatggggttttgccatgttgcctaggctggtctcgatctcctgggctctagcgatcctcccgcctcggcctcccaaagtgctgggattacaggcgtgagccaccgtaccccgccactccatggattcttgagggcagagttttttggagccaggcttcaagcacatttgatgtgtgcctatgagataaagactgcttttaatggcaggcaaggaaaatgcaagtccatctcttaactttcttgaagaagcttgagacacagctctgcaaggggctggaaggtttcatgttattgccaatgcttggtttatctgattgctgttgccattcattttgaaggagaagcaggagttggtataccaatattcccactgtgccagcagagagcgggttatccttactagagagccagagagtcagaacggtttttttttgttttttttttttttttttgagatggagtttcacaattgttgcccaggctggagtgcacgatctcagctcaccgcagcctctgcctgccgggttgaagcaattctcctgcctcagcttcccgagtagctgggattacaggcatgtgccaccacgccaggctaattttgtatttttagtagagacagggtttctccatgttgttcaggctggtcgcgaactcctgacctcaggtaatccgcctgccttgccctcctgaagtactgggattacagacatgagccaccgcgcccggccacagagctgcttttttttgcaagtgatattggatggtggttgatgtacaaagtaggagtttgtccttgctactgataccgtagctggtacaaggttttaatcgttctccaagcactgtcacaggtgtcatgtgtctcgccttttcagcagctctgtgaggtggcagtagccctgaggagactggctggactcagctagcatgggctgctcaggtcttcagcgtgctgagtgaggcattcctgcactatgacagagacccagctgccaagactttgtcaaacagaccagaagccagcagttcatgaaaagaccttgcttgcaagttgtagaattttttagaaaattcgtgctctctgtatttattttctgtaaaataattgatagggaaagaatgttcacatcttatcatctagatgttgctgattaaataatataactttctgggttggcatgagtaggtgaacttttaggaaacgcagcctacccttcgaatacctcttgtagcacctggctgtttcccttttgaaataattgtatgttttcctggataccttattacctggtgacacgtgtttctagttattgacctatgtttttaattataactttgggtggtggtctgaaatgaaatgttaagtttgacgcaaaaataggactagtttgtgtaactgatttgttcagaataacagcttacatttctcagagctttttgtatgccaagtgctatgcgaaaccctggatgtacaatattcttatagtagcccctgagaccagtgctaggattatttccattttgcagatgaggggatggagattaaggagtggggtcacttgaccaaaggtgcacagcgcacagctagatgccctatgggaaggtcttactgcatctcttaactacctcttgggaccagttaggaaccagtgcttaatgaaacactttgaagttacatctgtggaaagaataaacattttagctgggcaaggtggcacgggcttctagtcccagccactcaagaggctgaaataggagggttacttgagtccaggagttccagtccagcctgggcaacatagtgagaccctgattctttaaaaagaaacacaaataaataaacattttaagagattatataaattagatattatgaattttgtccctacatcgtggaataaaaccaaaacaaatacacagcaaaatgcctctagatttatttatttatttatttatttttgagacagagtcttgctctgtcgccaggctggagtgcagcggcgtgatctcggctcactgcaacttctgcttccctggctcaagcgattctcctgcctcagcctcccgagtagctgggactacaggcacgtgccactgtccccagctaattttgtatttttggtagagacagggtttcaccatgttggccaggatggtctccatctcctgaccttgtgatctgctcccctagggctcccaaagtgctgggattacaggtgtgagccaccgctcccgacggcctctagatattttgagtgattcagcaaacctcctaaagttgaccccgtagctggggtcacagtcctctttctccttcttccccctacttccttcttatatctggctatctgggagagaaaaaatttaatacaattgattactttttagaagagttaatttttacttattactgtggattttttgttttttaacagtcacaccgaggagaagactcagtgggaacatccaaaaactggaaaaagaaaacgagtggcaggaggtttgtatgttgttgtctaaggatcttggatggaagcattaagtagatgaggaaatgtcactggcagagaggtgacaggttattgtgtgtttagggagggctctctggtagagaaccagactcccactctgaggagcttatgggatttggcagaagaagatgatgagatcatagggtggagtgaggatgatttcttactggtcttaaagtaccaaaatggccagatgtggtggctcatgcctgtaatcccagcacttcgggaggccgaggcggatggatcacctgaggtcaggagtttgagactagcctggccaacatgttgaaagcgcatctcttctaaaaatacaaaaattagctgggcatggttgcatgcgcctgtaattccagctactttggaggctgaggcacgagaagtgctcaaacccaggagctggaggttgcagtgagccaagatcacaccactgcgctccagcctcggtgacagagtgagatgctgtctgaaaaatagcgacaacaacaacaacaaaaaccagaaaataattgaggcctttgattcacagtttatgatgttttcctatcgttgcagtgtttataaaattgttcttggctatactatggaattaaatatataagtatttggaaatttcgtaaagattaccatgacttctaggtgattctgagataatgtatgatccacggaatagaagtataagaaagggacaggcacggtggcttgtgcttgtgatcccagccctttgggaggcagaggtgggaggatcacttgtgcctgggaattcgaggtgagcctaggcaacatagtgagaccccatctcaaaaaaaaatatgagaaggttcctgcccttaagaggtttaggatccagctgaagaatcaacatgtgcacatgaaaaaaaatggccgtgccctctaatgtcatatgaggtcagcgtatgaatgacgttgggtgcctgccctgcatatacatatgttctttgagctcattcaagggagaattcccatggattggcacaaccagtatggtttatagagcgatcaggaataaaataggttttcttcaaaacaagaggcaaaaatgtggagcccagggtgggatcaggggccttctgcagctgtcgcagttggaacatgtgacgaaagccagttgatgtgacaactgctgggtgggagggacaggcttgggggcggggctgggagggctccttcccttcctgacccagggatggtctttacttctccctggcacctgtagacctgtctttcttgtgtttcagatttgccatacggatgggaacaagaaactgatgagaacggacaagtgttttttgttgagtaagtgtctgcaaagaaaccactctcagctgttttgctttttaataggaatttttaattataaaagtaatacatagtaactgtagaaaaatacaaagtataacagtgtgtatctgtaatcttagcagaagtgactacttttaacatcgctggaacttttaacatcgctagatttattcttctattttccccgcacacgcatccttaaaaaaaaaaagtagggaggccaggcatggtggctcatgcctgtaatcccagcactttgggaggtcgaagtgggtggatcctgaggtcaagagatcgagaccattctggccaacatggtgaaactccgtctctactaaaaatataaaaatgagctgggtgtggtggcacgtgcctgtggtccctgctactcgggagggtaaggcgggagaatcacttgaacccaggaggcggaagttgcagtgagctgagatcgcgccactgcactccagcctgggtgacagaatgagactccttctcaaaaaaaaaaaaaaaaaaaaaagagggaatgcactgtgtggactgtttagtaacctgctttttccatgtaatatattatgagcattttcttgtatccatatctatttttcaaaaagatgctatttagcagctctagagttattattttgtacagatatactataatttatcaaattgcctattggacattaatgctaaattcctgttatagagaacctataattataaataatgtattgagcatccttatctgtaagactttttcacctctctgattctgtctttaggataaattccggtatcacgcagcaatagtaaccacctgtccaacatatagcatgagccaggcctgattctaatcatcttgtatctgtagcattaggtcattggatccccacagtgccctgagaggtagtattgttattatccctagcttactgccagtgacacagacttgagggggtaagtgacttgttaaggatcccacagcaaagaagtagcacagccaggctttgagcccagcacctgctccagggactgtactcttgaccaccgtagttaagaggagaattaatgtttcacaactgtcaacatttaaattagaagcttgaatagtctttgacaggattaggattggttggttaatagaagttgatttgagcaggaattttttttttttttaaagttatgaatgtaacataaacgtttcagtatttgattcaagtacaccaacatttaggggtcgggccagccctcctctgagtgtgagtccacttgcatggatccagtgtggtcttccttcccctaagcatgcctgtaacataacatctacaatttctactttcattttatgtgggcgaaagagtacctaggtgccgaggcaagagactgaaggcacaaactgtttcagtataataaagaaagtagttagaataagaatagtcataatacaggttagatatggagatgatcatggacaattatcaatcattactataaacactattaatcattagcttttaatattactctttgtggcattactaacataacctaggaataactggcatgtataggctcaggtgctaaagggacattgtgagaagtgacctagaaggcaagaggtgagccttctgtcacacccgcataagggctgcttgagggctccttggtcaagcggtaacgccagtgtctgggaagacacccgttacttagcagaccgcgaaagggagtctcctttccttggaggagtcagggaacactctgctccaccagcttcttgtggaaggctgggtattatccaggcctgcccacagtcatccggaggcctaaacccctccctgtggtgctgtgtttcaatggtcacgtacgttgtccgctttcatgctcctcccgtactcctggttcctctttgaagtacgtagtagatagtggtagaagaaatggtgaaagttttaaagtctttgatctttcttttaagggcagaaaagaaaatgctgacgtatgctgccttctctctctgcttcggctacctaaaagggaagggccctctatcctgtaatcacgtgacttgcttcaccttgtcaatcacttagaagattcaccctccttaccctgcccccttgtcttgtatgcgataaatatcagcgtgcccagccgttcggggccactaccggtctccacatcttggtggtagtggcccccaccctgggcccagctgttttctccttatctctttgtcttgtgtctttatttattacaatccctcgtctctgcacacggggagaacacccgctaagcccagtagggctggaccctacaactttaaggttgagcaaacacagtattttcaaagaatctgattgctacatcatttgggagttttatggtatttttctagcattttcactgtagttgattgaaccaaaactttttttttagctgcttgtctttgaggctctccaaagcattcgaccacattttcatagataccactgacactatttttcacctcccatgttatcagtttgtgtaatagtagcttgctggtaatgtagttacagtaacaagttcaaatgacatgtgtgttttttgagcaaacctggtgaacttttggtgcaaaactgatattgagagcaaataggccaaagcttgcttgagagaagtctcccaggccaccataggcagccccaggaagacggggctgtctagcagttggataggtgggagtgcctattatttgttaaaaggctttttgcctaacttgtgaaagttttttttcctcaactaattaagggtatcaacgcattggttgtatgttgaaaatgttgaaaatgttttttttttttttccaagttttctttctttttttttttttatactgggtcttgctcttcttatccagggctgaggtgcagtgacacagtcacagctcgctgcagcctcaacctcctggactcaagtgatcctcctgcctcagccttctgaggagctgggactacaggctcatgctgccatgcccagctaatttttaaagactttttttttgtagagactgaggctcagtatgttgcccaggctggtcttgaacttctggccttcagcgatcctcctgccttgacttcccaaagcattcatattacaggcatgagcgaccacacctgactgaatttcttaaattttttatgtagtcaaatcaattttctcctgtgcagtctttgcctttgcattcacgcttggaaagttactccctgaaatgggtattaatcaaccaagagcagcagttctcaggcatggttcctggaccagcagcattaatatcacctgggaattcaataaaaatgtacattcccaggcccccaccccagacctactgaatcagcactggggtggggcttgcaatctgcgctctaatagtcatccaggggatcctgatgttccctagcttgagagcctcccgtctagagcaggggctgtctcctttgcctgtaaagggctagataatatgttttaggatttgcagggcatatggtttctgttgcaatgattcaactctgcctttgtagtgctaaagcagctatacacaatatacaagtgatgggcgttgttgtgttccaataaaactttatttacagaaacaggcagtgggccagatttggccagctcctggtctaatctagaggagtaagcaagggctttggggggaacctggaaattggctcccctggctagttctcacttttctgagcctgttgcagtggggtgctggtaaatgtttagcaccaggtcttcagggggaaaaaagccactgtttgtttccacagtataaatactttggccatagctgatttcatgctgccaaggtgaagtgaggaattgggaagagatagtcacgtttggctcttgtaagccagtttgagccagtctagcatagaactgctctgttgtgtgtgtataatattggggtcacaaattaaggttgttataaatagaatgaggatgaggatggtaataattagaataaaggttggattattactcttgagtcttggtacttatagggagatgagtatatattttaaactaattttacacacacatacttttaaaatatgaaatttcatctatatttagaggcttcttaatagtttttaagatattctgaggtctttatctcatatcccaagaatacatttaagatataaaaagtaaattctattataaggagtactcttttcatccatatgtgccttttttttttttttttttttaatggttacccagggtcttggtctgtcacccaggctagagtgcagtggcacaatcatggctcactgcagctttgatctcttaggctcacgtgatcatcctcctacctcagcctcccaagtagctgcgactacaggcgtgtgctatcacacttgaaattttgtttagtgtttgtagagatgaggtctaactatgttgcccaggctggtcttgaactcctgggctcaagtggtcctcttgccttggcctcccaaattgccgagattacaggcgtgagccactgtgcccagcctccagtatattttaataccatttctacaagatttagatcaattccaaatcaaaatgagtgctcgtaggaggtatgagtgcagagtcttaaaatgaaaatcgttagaattttggtagttggcaggtttcttatttacaactaagactttatcattttgagttttctacttctctacgtctttaggcccttgcacagggctaagagatttaattgaaatctactgaaaagagtggctgacagatcttatagctacatttacatgaattacataaaagcccaaaaccttctcaagaagccttttttgagatctaaggatacatggcaatagttattgtatgttacagcgtatgttataggcagttctgaaggaaaggattcgatgactatctttttttggcacaaatgtgatccttctggaggccagaagatagattcagtgggccccagttctttcaggtttaaggaataagcattttggtctatgaaaaatggggttttcctaaagtataagattgtcttatatttataaatgcctgtgttcattgctgtgggttcactgctttctcttttgggcagccatataaataaaagaaccacctacttggacccaagactggcgtttactgtggatgataatccgaccaagccaaccacccggcaaagatacgacggcagcaccactgccatggaaattctccagggccgggatttcactggcaaagtggttgtggtcactggagctaattcaggaataggtaggctcttcacttagttatttatctttgggactgctataatgagatccacttagatctagctataatggaattttgtttagtggttctctgatttaaacatgacttttatccttttcagatatcgtttcattaacatcactacctctttttaaatcctaatgttgtcatggaagcctgtgtaggggctgaccttgaagtctctgaaagctgaacactcagcaaaagactgtggctattttggtattcagggatgagagacaacaggctccgtctaagagtttttgacctggtctgcatggtgtatgggcatattccaattacctgggttattcaaaccaaaattgattggtaatagaatacggggaacaacaaggtattatgtctttggaacaaaggatactacaggtttcgactggtcactgagcatatcattttcttttgggcacaggatcttatttctctataaaattggagaatgagttcctgtcttcacctcttaattgccaatgtttacccacagggactatcatgggtagatggctcaagagggtatccttgcttcaatatgatgggccattaaggagacaggagcaaggcgggagcaaaccataactcttcataggattttattctgattttgctttgatctatttacataagtatctgaatcagtgagaaccacctgctttgagtttagatatgcatcttcagatttgtcgacatatgaaacgttgcatttggctgtcttctgtcaagttctctctgtccttttggtcccccgcagccctcacacggcccccttgatgccctcctctactcatttgtttctctttcctaattttgtttttatttttattttttgtgggtatataaaggtgtctatatttatggggttcatgagatgttttgatacagggatgcaatgtgaaatagtcacatcatggagaatggggtatccatcccctcaagaatttatcctttgagtgataaacaattcagttatacccttttagatattttacaatgtgcaattaagttattattaactataatcaacttgttgtgctatcaaatagtaggtcttattctttctttctatcttttttgtacccattaaccatctgcacttctttcttaattttgaacaattccttgaagctgcagaaatattttctagcatgattagggaggcacaggaggtaaaaatacattgttcaagggtcaattattgtgttgtacaaggtgtgaaatctaccaggttgccatccgagtggagaatttttttactgtacttgcctatgaaggtaaagaagcaaatggaaatttttttttaagaattgaaaggattttatttcaaatcaactctcatacctcatcctgggctccaaatatgttcaatccacttgtctgaacttctgcattggagtaaattttatataattgtcattgaagtcaaaactgatggcgtaatatttaaaacaatggctggatccccaatctaagaagaatacattttgttgatcatattaagtactgttacagtgaatgcatggacccatacaattgtggaataattaagaaaaaaggacttaagggcttaaaaatgtctttttaacaatttaacaagttagccagaaactttaaagatcttattctcttaatcttctagctagactctttttctgtaatgagtaagatatgtgactactgattgttttttgtgttaagtgttcgaactgctccatgtgacattagatagcagactcttgaatagagctaatgctctttcaaagatttgcaacagcagacctgcgacattgtaatccaggactgatagagttggttcagaatattaaaagggtgatatctagttagatacataagtcttgatggagaggaggagattctgaagcattgagaataaatttgtggttgctgagaatggccctcacatgttggagtaaagccagaaactctttgtgcctcttcacagctcccacttccccctaagactcttccttcctgatacctataattcattttgtggacactgcaggaggtgtctgcggtccagttggaggttgtggcaaattgtaacgctcaggatggcacagatgtcgcacaaggtcttagggagaccagcctttcctattcaagtgcccacagctctttccccagctgtcaccttccgcaggaatggcctttaacactgtcacctcaccccattcccctccactcttgggaagcatacgtctaggtgagtggtgaagatttttattctgaatttttgaaataatatcgtactgcaagttccaggcaatcaaaaactcacaaatcacttgcactctgcagcagtggtatcaggtctgaagaaaggaagaggctgcagataggcacatggctttgctaagttagcttttatatcctgcgtggctgccttagaaagtgtccttgcccaagtaggctgtggcttctagataaagtccttctactaagctatgaaacatgccaatttataaattgctatcactactttagttccgctcatttaaaatgaaatagctgaatgccgagtgagtgaattgggcatctttacttccaagacttctggggcattcaggagtcatattctatctaagctttaatggtgttggtgttccctttcctttggccactcaagggagcctgttttctttggataaaccgtgaaatctttaaccctgtgaatgtccgttttctctaaggcggggtgggctgaaacataacataacaggatttattttgaaagtggtgactccacaataaaaacatagatatctaatttgccttacaaaggccgatttgcaaatctagtatttccagtggttctttctttctttctttctttcttttttttttttaatgccccatatgacgctgctttgttggaattgccattggtgaggatctcactgataaagaaggggacatccctcccttgatagactttagggttgcactagagccatgccccctttgaagtggcctctaagcaaactctgtcttgtcatcattttcctctctgcagctgtaagtgatacggagctgtattttgagtttttgatactgatattactaaggcaattggagggattcttaattcatctaaaaaaaatcagggattctgacagataaaaggatttggaggaaatgtcagaataaagcattgtgggttcatgaagtcctaggttttataattaaggtttataggcaggtattaccgctgctgactggattcaactgtctggattggagatgaacaaactgccatctctgggctaactctgacccactgcctgattttgtaagtagaattttttttggaacacagccatgcccatttattcccattcctataatgttgaactactgtttgtgtatattcagttatcccaaaataatatggccctttgcttgttaccagaagagtcgcccagttgtggcagagatcatctagctcgcaaaactgtaaatatttactctttggcctttcccagaaaaaagtgccgactgctatgttagatactccagttcattgaaagtgatatcaccctaacattctctaaattagccacagcttagatgaaatttaggcaaatggaatgccccaggccccaggaagactgtggcagcacattgtatgtaactgttggggatgttgcctgaaacccccgccttttttttaggcagctgcaaggattagaatgttgcctcctcagaaactaacactcttctctccttgacctttgtttaaccagctttctgaacctgaagaactttgtagattgaaagctgtagcttgtggacctctctctgtggagatcagcatctcagtatccagggggaagccatctcttcacccaaagcttccgctaggagatcaagaggcccggaaccccgcagtcctgaatgctaaccagtagagacaagggaggaattcatttctgtttgtgttcaacatagactgagcaggaagggccaggtgttttacgactctttggagttagcagcttgttggctctgatttggtaaaagcaacggaaatgccttcagcacggtgaacattacatgcaaatgttgggaagtgttaggaaagggaatttttttaggcgagggaatttcgcattgaggaaggtccctgcttcgtttttagacacagcctatcagtcagctaatttggctatgcatataaatactttagtataaaatgctgccccctgctacctgcaggctgacatgttgctcatcaaaggcaggatccttctaatgagggattagttggatgcctaaatgtgggaccacctactctgttcattgtcttaattagctagatgtttgttggagcgcatgcaaattattttctgtaagcagacagatttattatcatatttacggagtgacatccagggtttgtgagacatccattaaatttttttttttttttaatgtttgagatggggtctcactgtgttgctcaggtgttggtctcaaactcctgggttcaagtgatcctcccaccttagcctcccaaagtactgagattactggtgtgagccactgtgcccagatgctattagcaagtatgaacaaattagatattttcagtctactcttctgtggtaatgatgataaaacttcttaactttcagtcctaaaccagcagtggctaaaacttgatttttaaaatttttttcagagtttggtccagatgaagtttctttcaccttgcgaacctttagaacgctgggctgcatcatgtgtgttgtaactttaaagttagaatagcctagcttcgttacagtttttgagccaaaggacccattaacagaaacaaaactttttttcctgcaaacaaatacaagctggccacactggtaaataccagtgaaatatattttgggactgacacttgcattttctattggtacttatgtcacaaaatcacctctctaacgtgtattacatggacctatatatatgcatacttacatatcaaaatgtatatattttgaggtataaaaagtacgtgctcaaggtattggtcactcctcaatttgttttccttgaaacaaaatgaaggtataaatatttcagccgggcgcggtggctcacgcctgtaatcccagcactttgagaggccgaggcgggtggatcatgaggtcaggagatcgagaccatcctggctaacaaggtgaaaccccgtctctactaaaaatacaaaaaattagccaggcgcagtggcgggcgcctgtagtcccagctactcgggaggctgaggcaggagaatggcgtgaacccgggaagtggagcttgcagtgagctgagattgcgccactgcagtccgcagtccggcctgggcgacagagcgagactccgtctcaaaaaaaaaaaaaaaaaatttcatgcagggaatcccaaaatgtaattatagtgtgatgttgaaattgattgtcttagcttagagagcctactttttaaaacttagggtcttgtttctaaatcatgtgttgaaattacagtgtgaactgtagttgccatactctttgatcctacaaattgtcaccacgatgaattcatatcttgtgcaaattttaccagttctacgtgaatagaagaaaattactttttcttcatgtagagaagggtattcattcctaagattttaaatccacacttcccaattatggactacgccagcttcctttacacctttgcttctttgttttcttttccatacctaaatgttactaaattttgcctttgagcctaaagcatgtcattgatggtttttttttttctagttattccaaaaggtcccataaatctggggccatagctaacttacatttagtcattttcatgggtaaaacacactcatatgagatcattgcacttgggatcttgaaatgcctgattagtttcctttctgattgttgaccagacttaaactagtgggatcttggcatttatctttttaaaaacctggtgctcattaaggaaaggaaaatattctgaaataatcgaaataaccttttgggcattggaactccattttaaattaaaaacatttgtgcctactattatcttatgctaaattatacccaggtattgtaagtaaaattattttgaagttactttgttctaagaaactatggagattcttgacagtgttagacaaagtccttaaatgacattatataaaaattgagaattagtaccttatgacttaaccattttacactgagatattattggacattgagtgtacatggaaatcacgtgatcaaagtatttgagaagtaaatatctaaaggaagagaccaatttaaaacattctaatgagcatcatctcataatttggtaatctcatgtaaaatgcttataataggggtgtgtgtatgttatatatatttttaaaataaatttgtaatcatgtatacagtagtccccccttatccgtggtgtttcagtttttttttttttgagtcagagtattactctgttgcgcaggctggagtacagtggcgtgatctcagctcactgcaacctttgtctcccagggcctggtgattctcatgtctcagcctcctgagtagctgggattacaggtgcacaccaccactccctactaattttatgtttttagtagagacaaggttttgccatgttgtccatacaggtcttgaactcctgacattaggcaatctgcttgcctcaacctccccaaatgctgggattacaggtgtgaaccgctgtgcctggcccgtgtttcactttttgaggtttcagttacctgaggtcaacaggcatctgaaaatactaattttgagagagagagagtgtgagagaccacatttacataacttttatacagtacattgttatagttctattttattattattgttgatctcttactgtgcctaatttataaattaaaatttatcctaggtatgtatgtataggtgaaagcatagaatacatagggtttggtactatccagttttcaggcatcactgtgggtcttggaacgcatctcccgaggataagggggggctactgtcagtgtgaacctgattagatctcaactgaaacttttttgtcacatgaggccatcagttgaatttcatgcctgcatgtaggtttagattttaattacttttttatggtgtcagcataacaaatgagagtcatacaaactattgtttaatgacaaagtgggtcaaacccataattaaaaaaattaataatagatttttgttctacttgaggttttgtagcattacgtaaagcttgaaaacttggaaattgttttacttaaaacccaattaaaataatttgatcttttgcttttacatcatagagtggcacaataaaaattgtaatggaagatgttattttacattttttttctttttttttttttgagacggtgccttgctctgtcacccaggctgtagtgcagtggcgtgatctcagctcactgcaacctccgcctcccgggttgaagtgattctcctgcctcagcctcctgaatagctgggattacaggcgtgagccactatgtccggctaatttttgtatttttcgtagagacagggattcaccatgttggccaagctggtcttgaactcctgaactcaagtgatccgcccaccttggcctcccaaagtgctaggattacagacactagccaccatgcccgggggtgttgtacatatttcctttaatctaaaagcagaaccatctttatatatttttatttttttccactagagggctctgttgccctttgatataattaaacaaaagaggcagcattgcaatatagttctgttcctctcagtccatcttgctttcattttggttaaataatgtcttttacttttctaacatatcttttaggtcttctaattctctgtgatgaagttcaaactgaagactgttactagtgtcgtgtttgtttctttttctctctcttttgttttgtttgtataaaatgccagggatgaagggatccacttaataaaaaggcccattgtgttcagggagcagcctgttctgccaaatcacacaagggcatgtgttttcatgacattattgcttttgagtgtgctggcctagcaataatatgatttttttttcctaagtggaaattgtaatatttaagtattaatacctctgtttaaggttcattttgaacgccttggtgaccctatgtttttttctttgttttttgttttgttttttttttttttgttttttttttttgtttttttgagatgaagtcttcctctgttgcccaggctggagtgcagtggcgcattcttggctcactgcaaccttcgcctcccaggttgaagcaattcttctgcctcagcctctcgagtagctgggagtccaggcacctgccaacacgtctggctaatttttgtatttttagtagagatggggtttcaccatcttggccaggctggtcttgaactcctgacctcatgatccacccgtttcggcctcccaaaatgctgcgattacaggcgtgagctactgcacccgcaaccctatgtttttttctaagaatatagtgtcccttgccccctgctacaagccttacccagtgttacataatttattgtaattaaattgtttattaatgatacattcttgctgtagaagaaaacgtgtccttttgggctcagtacagtatatgtttcttaagtaagagggatcatattaaaccagctacttaatgtgaagcagatagccagtgttctccatgtacaatcttagggagggtaatttttgttttggctgtgtaattatggtttgaggcagcccattaatcgcatatttcagctgtcaaatagaaatttggcccagaaaggaatacactttggctttacaaaactgcttattttcaaatttttaaatggggacaaaaacgaatatgctatattatatacttttatttatataatttttttttcagcaactttttctcttttgaaaatgcaagagcctgaaaaacattgtgaatatacttgtaacattgcaaagctatttcaccagagtaaagatattttggttgttcatatacgagtgtgttcgttgtttatctaataaattgttaaaactagatggcgattctgggaattattatagacttcataataaataagatgctgacagttgaaacccccttgaccgttgcctgtttggtatgacacagaccttcttggacttttgtagcctatacatgagtagatatgaatcctcagccttctccaaaataaggttggggtcactaggaggccttcttggaaagatgtcttaaattaaggcaccagtagatggatcaaaaagcaggttccaatagctcgcttttagtttcttgcctaaatttgtgatctccctttggcttcataaataacggtacatttcatgaagagctggtctcagtctacacaagcctaactgaatggggtgcataggaagggttgcattgtgtgacaaggtttaaatctaattgttttaagtctttgagttatttgctcaccaggctgtgcttgatggttttactttttgtgatttttggagccttcatgttagaagccatagtcatatggtgctctctgaaagcaagacaaggtttcttcactagactctaagaggagatctgagacagagagatgggggcggggaggaaacctatttcagtgtctctactatttctacctaggtggaggataactagccagatgaacggagctaagccttttgtatgaagtttatttcatataaagaggaacaaaatcagaatcaaatttcttctgtagttgcacagaaactgaagttaaagctaatacaatgtttttcatttttacccttacctctacaatgtacttaattgttacagattcgtatttattgattatcatgttgtattacattgatagccgtttaaaatttatgaagattccgtacttgtcatatttaattctcagcaccgtgcttacagctgtcttgtgataatgtcgaaaggaaagagaagggaggtgaggtaacgtgcttgagatcatacaggtcttgggcggcgggtgcctgcaggatagatcaaagggtaattgagtctgtgcctggggccccttccactgtacatgccaccatcctgttgggaggaataacagcacactcctgaatgagctctttctaagcagctcattcattttgttaatcctgagtttggaatcaaccaatttatttaaacccgtgaagcctcgctctgtgcccggtcaagtgctgggagtggcatctgcggggagggccaaggcagatgtcatttccagactgcattggatcctggattcagaagctgaagcttaggagtgggcatggtggttcacgcctgtaaacccagccctttgggaggctgaggcaggaggattgcttgagctcaggggttcgagagcagcctgggcaacatagcaagaccccatctctaccaaatcaaattttttttaaaagctgaagctttctttaccaaaaccactttggtattatgattgtaaaacaaacattaaggaataagtctgggggaatgggaagtagcattcatcaagcgcctgtatatgccaggtgttaggctagattagcttgatgtgccttctcatttaatataagtaattattttaaaggttattgtgattaacatgtattccttatggaaaatttagaaagcgaagaaaaataaaaataagaataaaagatttaaaaaaaccccaattcttaccagttagaagtatactattaatatttagcatgtatgattgtaagcatgttttcccttctttcgtgatttttctatttaaattgtgattatctttctgtgttgttaaatactccacatcttaaatggctgcatagtattccattatgtggttccagctcttctcccagtgtggtacattcgggtggtttccagctttttaatagctgtggaatggagaagcacattttgtaattaaatgtttgtacccatccgtgactcttctatagttttattttgtggaagtggaattgctgaatgaagtgatttgctccccaaccttaatatcttgatttgttttgtcaaactgccctggaagattgtaccaatttgaatgctcctttgcccagcatccttgccaaacttgagaattagaatttttaaaaaatatcacttaaatttgcctatctctgatgattagcaagattgataggcttttcttatgtcgggccatttgttttttaacgaattgccctttcatcttatatgcatgactattggatatgtatcgattactaattgattgcttgcctcatgtgctatcatttaattttcaaaatgtcccttagaagttaatttataaagtgtctattactttaagtacctgttcaatcctgtgatcaagaggaaattcacagagaaagaaattggcctaactcctcagtttgcttcactaaaatcttttaagcacacatcttgtctattatgccagctgcaactcaaatcaaaggcactgttgctttggtacccgcatttaaggagggaataccccaaaaaacttaaacttgtctggctttgcaatggtggtggagtcccaagatgacacagtaggcaagatttgattactttggttatgcaaatttcccctagatcttctattaatgacagtaacagcgcttcagagcttttctatgcattctctcatttgatgagcctgctttcaggtggagaaattgtaccattgctgaaaatagcttcgctgacagttagggcaagcttcattggtagcaagtttctatctggaaagatgtaggagaggaacactgactctggaagcagacgtgacctagttttgaaacctgggataaccacttcctatctgtatgacccgagcaagttactttccttctcagaactcctgttccacctctgtgcaatatggacagtactcctactttgcaaagttgttaaagatgggaactccagagtgcccagggaattgtctactcatcattgcaggcgtttaataacgtgtagccatttctggaatgggaggcaagaggatcgagttaccagtgaaattagtttggtattttcctagcttcctggttcccagatcctcaagaggctgccataatctctgtgaatttgtcctaaaatgacctgtataaataactgctttagacactggcttgtctttggtatgaaggaaaacattttagaatttttttggctggaggtcagtagctttcatccagaaaagaataatcaacggaaaaaaaaaaaaaccaccgagacgaggttatttttgttacagtcaaggaacaaaaagggatatattaaacttgggggaaaaagagaaggaaaactattattctttaaaaccgttataccatgcatcatggtaacatcttttttactgagagttctgcattagcacacttgttcacccaagtttgtgatagtttataggactgcctggtgtattaagtagaaatgctcaactttgctgtcctatttttttgatcatatccaaaaagtgtcagtgtttgaatatagttttattgccacttaaaaaggtaggacagttttattggcgtctactggacatggtaggaagagagctgtaatttgacacagattgtccttaacttgggtgacttaaggcaagtcacttaaccatctgagccttaatttcctcgtttgtaaattcaagagaataataacttctctgtcacatactgttttgtacagatcaagtaaaacaatgtgtgaaatgctgtaatgaagaagtccaatagtgtatgaatataaggttgctggcgtttggggaaaaatcatagttatagaagaaagactcctaaagggaagattagggttggaagaagatggaggaagagagtaatttaattccttaatggaaagaataaaataagagctcttgactttttttttttgttgttgttaggatatggggagaggtttctgcaaatatcttcttcagggtttacgaagtgaaccggatgtccggtaacagggttgcatgtcatgcaattgactgggtggtgatgactaaaattttaatgatgcgatctcatttaaagttgacaggctctgactctagccagatattcaggagcagaaacttgattcaataagaagggaacctgcagaggcagaaacttctgtgggttgcagttgtgttgagattacacaggtggaaatgttgcgagttcttgggtgatgcgatttcttcctgcttgccttaagtttcacctgcccaggtccttacttctgctcacagtgcagcacgaatttagatactgattggggattcagacacaaacgggatgctccttgcttatataacatcaacagaattgctggccacatcttgattatagaaactctttttcctggtgatcacacaaagcaaaagaatgaaaataatcaatctctttcaaatggagagactccgctgtgtcagccaccattggctataaggatgaactctcaaaactttttgtatcttgcaatataatgtcttccaactgcctttgattttactgtgtggctgtgtgatacagcaaggcagctgtggcttctaaattcagcagctaggtttgagaagcttctatcagctgagagatcatcagtacattccaaatggcattaaaaatgctgttacagctttatctattagcaaaggaagtttcaattctaagttcacgtacagttactagattgagtgtttgacaaggtagagagctctgtagtagatccatatggggaacatctcagtcagggtgtggagtcagatttttggcaagggataccatcctttcagcctgaaaagctgacttgggagctgtcagcctgtgtgcacgaggacctttttcctcccagggttagcgtcgccacttgcccagtgtttcttttttatttcctgctggcctgatccgggagggatttgggaaagctagtcttgttggtgtgtcatcatcgcgacgctgttagtgattgacttacccgagtgtacacatgtttgcatctcacttgtatgttccttacatgtttacttaattattgggaaggtgtattaatgtcctgttgctactataatggaccaccacaaactcggtgcttctatgctgcaaacctaagattataggcagtcataacacagtgttaagtatttgtgtatctaaacatagaaatggttcagtaaaaatacagtgttgtaatcttatgggactgccgttgtgtgtgcagtccattgtcatgtgatagtgattaagggaggtggacatttttgtgtttgcttatttccataagctcaagggtaaagcttcccaatcagcctttaggacagaggtaagaactggttggtggcctggagcctggatctggcctccagatgttttttgtatggaccacacaaaaatggtctatagtgggattttttttctttttttttttgtcagactacttgccagcatactaaaatcaggatattttacttaaatgtagatttatgacagttttgaaaaatcagaatgagtattgtagactaaatgtttatgtcttccccaaaaattcctatgttgaaaccctaatcttaaggtcatggtatttggacatggttgtgtccccactgaaatctcatcttgaactatagttcccatgatccccatgtcttgtgggagggacccggtgggagataattgaatcatgctgttctcacgataatgagtgagttctcatgagatctgatggttttataaggggctttcttcccttttgcttggcacttctcttactgctgtcatgtgaagaaggacgtgtttgcttcctctcctgccatgattgtaagtttcctgaggtctccccagccacgtggaactgtgagtcaattaaacctctttcctttataaatttcccagtcttcgatatgtccttatagcagcatgaaaacagactaatacaggggcctctgggaggtgattagatcatgagggtggagccctcataagtaagatttgtgccctgatgagaagaggatagaaaggtagctaactttccttaagctatgtgaatgtgagaacacagtgggaaggcagccatctgtaactagtaggagggccctccccaagaacgtgaccatgctgccaccttgaccttggactttaagcctccagaactgtgttaaagaaatgtctgctatttaagccactcggtccatgatattttgttgctgcagcttcagctgactatggcttatgtctatcaaggaacatagttgcactgaggttgaacagagctgttcctataggctgaccccctgtaggcaggcacaggctattttccatggtcagtttacctgcctgcttcctgtagaggcttgagcttggtttagagtctgcaatgaaaactgtgtgatgatattggactcactggctcatagccactgccacgcccttattcagtcttttgtgcaattaacaaacatttattgactactgagtaccaggtgctaagacttcagtgtagaaacaggcagggtccctgcccttgtggaggatacaaaacacaccaaaatgcagtcagcttcactgaatgacagagatatgatctgagaagtgtgtcaggcagtgtcatcgttgtgcaaccctcataggatgtacttacaaatcctacgtggtataacccattatacacagaggctgtatgggatagcctgttgcttccaggctgcaaacttgtatagcatggtaccgaactgaatactataggcagtcataacacaatggtaagtatttgtgtatctaaacacagaagtggtacagtaaaaatacagtgttgtaatcttatgggaccgccgttgtatctgcactccattgttgaccaatgtgttgttatgcagtgtgtgactgtaccagcagcttgatctttgtgcttctagagaacatttaaattgattcgcttttgtgagacagggtcttgctctgttacccaggcttcagtgcatcagcgtgatcatagctcactgtagcctctccctcctgggccaagtgatcctctcacctcagcctcctgagtagcttggactacaggcatgcaccaccattcctggctaatttcttttgtatttttaatagagatgaggtcttgctatgttgcccatgctggtcttgaactcgtgggctcaagcagtacacttgcctcagcctcccaaagtactgggattacaggtgtgagccaccacatctggcgaaactctgggtagtttctaattatttctgtatttctatttgtatttaaaagtacaggatactaaaatgttttttttttcttttttgagatggagtctcactctgtcgcccaggatggagtgcaatggcccgatcttggctcactgcaacctccacgtcccaggttcaagcgattctcctgcctcagcctcctgagtagctgggattacaggtgtgtgtgccaccacgcccagctattttttttgtatttttagtagagatggggtttcaccatgttggccaggacggtgttgaactcctgacctcgtgatcctcctacgtcggcctcccaaagtgctgggattacaggcgtgagccaccgcgcctggcaaggattttttttttttcatacttgaggaaacatctaacagcaaatatgttcttataagttaaaaagaacttttgctattttgaatgacactctcattaagtcttactactagtctctgatttttcttttttctttttctttttctttttttttttttttgagacagagtctcactctgtcgcccaggctggagtgcagtggtgctatcttggctcactgcaagctccacctcccgggttcacgccattctcctgcctcagcctcccgagtagctgggactacaggtgcccgccaccacgcccggctaatttttttgtattttttagtagagacggggtttcaccgtgttagcaaggatggtcttgatctcctgacctcgtgatctgcccacctcagcctcccaaagtgctgggattacaggcgtgagccaccacgcccggccttgatttttcttaacctttatttccaattatgcatcttctgagtaactataaagaaaagcaaaatctacagtaggtatggagtgagtgcagagtcaccatcagcttgaacaaatgtgtgtatctgtggtcaagtttaattgcttcttctgtaatttatattaatcacgcttccattgcttgccttttgttaatacgtatgcggccatgtgatgattttttaaaaggtcatccagtatcttgatgtccagtccatgcttataacctgagcagtttatgtactcttgagatggtatgtgctaaaaatgagtagctagtctgagtggcagccttacccattttattttgtgggcagatttcttttacagttctggctgggtttcttttagttggcttctttgctttgctcctgttacgacttagccctgtagctctgggctcttcgattctcacgtgctgatggtgtagctgagctctgctaatgctggttattaatctgacaatctataccagggaggttttataattgccataattcttatttgctccattccatttcccagcttctcaaatggggtggcagctgcaaagcacagtatttgaacatgaagtagagaatcgtcacttcagcttatgattttacattctgtcaaggctgcagggaaagcggtcatgtttctggatggtatttggatctacaaattccaagcaaactttttacttcttattatgtaaaatggaagggttagccaaattaagatctcaccatcaaccttgagggagtgacttctacatgccgtgtattactggttataaagctagtcttgtttggattgaagaatttaatcatatttaacttttcaaaggatgctttttaaaaaaccttatccgcgtgttatgtttaaactgagaagtacctgaaagtgaaaattttatttatttttactttttttgaaagatggagtcttgcactgtcacccaggcttgagtgcagtggctcaatctcggctcagtgcaaggtccacctcctgggtaaaggagattctcctgcttcagcttcccaactagctgggacaacaggtgtgtgccaccacgtccagctaatttttgtatttttattagagacggggtttcaccatgttggccaggctggtcttgaactcctaacctcaagtgatctgcccgccttggcctcccaaagtgctgggattacaggctcacgccaccatgcctagctgatttttgtatttttagtagagatggggtttcaccatgttggccaggctggtctggaactcctgacctcaggtgatccacccgcctcggcctcccaaagtagtggaatcacagacatgagccaccatgcctggcctgaaataatttcaaattaacccctgaggaacaaatgctcatgactttcaatgaatagaaaaatcagactgctagaacctccagactgcatgtcatgcgtagaagtagaatcctggggaagctagctcacaaaagcaagggagatacctgcaaggctgagctgagcttgcaagggaagaaaaatattagagagttgtcacatttagaaataagtgattccaaatttacagtcaatggactgtagatgccttccatcttcttaagagattttgtgcctcttgcacaggtattatccctaagatgtgttttcttcaatgtacctagactgtttccttaaagaattgcttttgtatggtacggctctatgtgtctgtgtttctcatgttggttaggagaactaacccttgtgacgaataagaaatggcaaacattgttaatgttgactttactagttgctcaaatattagcattggattttagagtcaacatgctagcaggatggctttattttaaaaccatgtgatagaaagctatctgctattattgatagcatttctggatggctgtcagaagtctttctttagaaatttaaccatatttttaatggtgggcattgcagtcaacaatagtacagactttgcaaagactatttttttttttgggtgcagtgaatacttcgcaatgcctgctgaattttacctattctgtaagtctttttgggaaccgttgagcccctcttctcttagttgcctttagcctttgtttttattatgacaattggtatgaaatttttccttttcattacttcttttattcagagcacacctctggcttatctcttcattctctgtttagtttcatattttactttaatttctgtacatcaatatctgccattatagtatttaagctcttggaaacatcaggcatttgttaacttgttgagaaaataaagcactccactgttgttatgagctgcttatggcaagtgaaaaactcacaatatttggccaaacttgggatcatttaggtgttgtttgcaattaatggcaggagatattttccttgttgttaagagtataacgttggttttagaaagcttgatctatgtttttctccatgttagatgtgaaaagaaccaggagagtgtgaggatattggtaatattgtcatatggtgatcccactgtggatagatacgcaagagagaaaatccagaagaaagcatttcactgaagcctggggacatttctggtgacaaatggtgctgatggcacagtgagaacgggagagggcagaagcaatgcacagatagaaagggtgtcacctgcgcattgaaaaatcccagtgccataacaatgcagtccctgcaatacagacaaacctgactcccaccattcctgtaaatgaagatggggccttgctgagaaatagaggatgcagattccaccctcaggcttcccgtcttgggatgcagagaaaactcacccacgtgcaacaactcaagagtcgttatttacctagcaaagtgttcacatgacagtgtttgaaatgtaccacgtgccttttcatgtttagtttagagcttgacactagagctctactgtggtttaccaagtgtgagggactatttctttctgagaaggaggggaagctttagtttccttgaatgtctaatagagtctgagtttccttttagaagcataaaagacgtacagtaggcagaatctggatttttaactatacagttgctgaagttatcttcaattcaaatcttctaaattcaattttgttaatgttgtttagatattattatagaagccagctttactgacttctgcacatttaatcataggagattcttccattctgtgaacttagatttcttttttctatccatgacatttatctaaatcaggctttcttttctttctactaaatttttcaattaccaataggctatgagaataattagactgacagtattactgaaaaaaaaacaaaacaacaacaacaaacaacaaaaaaaacaccttccactaaaactgactcaaaaagataatagcagggaaaatgacatgtcgatctgtgattccttttttacttgtcagtccttttgggagttgaacatataagcacatgtacctctatgtgacttttgagacgtctagaatagagaattcacctttgtagctggaatttattcagcatgcaaatgtgggtgggtgattgttttatagatgcctggtgttgaatgatgggcagttgtgataactatatataaaattatattaaagtccaagaggtgcttttatgaggcaggctggaaatggcatccgattttcttatggctttttcatgtccattttgatgaatctatttattacttctataatgagtagtacacatggttggttagccaagttattgaactttatcaaccttggctgaaattcacaatgcgtgccaaacttgttgtaacatgtaagaaattacatctgggctaaaaggttcaataatgattactcttataatggaatcttctacaaagcaagggatttcatgatatccctatgcttttaaaaaattattgtgatacagtgaaacaaggaagaacgtgtagctggaaaaatagtatttgcttgtaatatacattcagattcataacaggcttatttgattcccaggacagggtgagcaaaggatgctgtttcctgggtgtctgctttggtgttcattgagtcatgtctctctctttagaccttactggatctagtcttcatcatggggcctgtgagctctttcaaatctagaggacaaaacctaataaagtgctgtcatatcacatctgtttatgagtttcaaactgaaatgaaatgtgtagccgtgttattcttaaattacagagacttgaggaacgtagagctttttactctcactagagaaatctaagcacaggttggttcgttaacctgtaaagagatgtttgggttttaagaggtctatcaaataacacagtttccctttcccaagttactacctaactgagcagtaagaccacccattaggcaaatggaagaccaaaacatcacctgagtcattcatgaagctgatactggagaatatgtatagctgtgtgagctggtgggctttctaatcctgaccaccacaattagacagggtaatgggtcagtgctaggtcaggccagaccttcgcagagggcagaccccattcatgcagcatgttcaagacagtgcaggagagcagggtgtgtgctctctgtaagaggagaggagaggcagagctgcgtgtgcccggttctcaatcctggaattaccattcacataccattcacaacataagttggatcagctcccttgagcaggaataagtgagtggcagagggggtcagggatgttaacgcaaatggagatcccttcacccagaaagacacatctgaaatggagaagatgcctttttcctcctgcaaccaataagagagtgatgaaaattatgacgccttgggaaataagactgcaacgtaaatgtgtgtccaccccctagttttcttttggattgtgaatcctcaccctccgataactagacgtgctgttttgacgtctatgctttccagcttgccaattctggggcctggcacagtatctttcaccccggagtctcagtttcctcatctgtaaaatgggaaccatgacgtcagcatcacagagttgtgagaattcgacaaggtggaatgaaagcaactagtgtggtgtctgaccgcttgtgttagtccatgaggaatttccttacgtattgttttgtgtctaggaccaagttcttattttcttcttatggatgacttcatatatatgccgccacagagggaattaccgtttttctttgtaggtaaaaaggagctgggttaagatgcaccgtcatatgaaacagggaaaaagggtttgcttgggttttagattcctgaaacagtctgctgagggattctaaagttgttgtggtctctgttccactttgggagtttgataaaaattggcctgttttatttgacagctcttaggtagtgtgcaaaattgtcaacagataataaaagttttttgcaaagctatggctctatgtgctgtacttgagcagtatccatactcttaatagaattgatatatgaaagcaggtctttttccttatccgtttagacctaaatcttatccatagtgtgtggatatcacaaacagcacaagaggaagtgaaaggaacagagtgggtgagcaaaccattgttcaaaggaaacagaacctcgctcaaggaaaatgagaattcttctgatcagcttctataatggatgcaatgaggaaagttgtctagcagactgttcttggccaactgtctaaatggctcgctgcatcctcttcacgagagctgatggtaggactgtagaagagtcacaaaacatcacatgacaacgccagtccctctgataatcctgcaagagccagcccagttttgctgacagcacagtctgctgtttaattattgtgtgttcaatgacttacctctttttagtttaattaaaattatttctcagattaagagccatgctatgatgcttgccaacggatatttaaaacatgtaactgatttgttttttataatgcttcaggagaactcagttgagcagtaaagatgtgctcgtgatgtggttagctcagaataaggatgtgaaaaccaaaagggaaaggaggacaggagtgaatctggcacttatctttcagtggggcctgagtgcaaattcttcctaccttccatatgagagaatagggaaaattaaagaataaatgtctctgggtttaatgcaactttactaaggaatgaaagtccgataagaatccatatcttttgaaagaagattttttaaattccttatttttcctttctgcatggtcataaaacacactggggacagcccaccctgagaagtcaccaggcatctgcctgccttcagtagcaatcacccaactgctgtagaccgtaatcaagctttcaagaaccacgtgcagcacgctgcgggagagtcccagcgaagtgcttaatgcgccactccacggatgtgagtggggagcaagtgctcaaaatggggcttctgaattgcaatcatcatttggcatctctattacctacagctgctcaaagatgttccccccatgcaactgtttcttgcaactcctaacatttgcaacgaggcctctgatgcagacaacccgtttatacctctgggtggttgaaaccttcatggtttgttgtaaagaaaggtacacagtcccaccaatcagaccgtatctagaatattacgttcatttaggggtggcgcatagacaggctaaaggatggcaaagtcattgggtcatgtcctaggagcaacccttaaaggaagagtgaatggctggttagttggtagaagaaaagatttatgtaaattagttctctcagtagctatctaggagagagataatcctagctttcttcaagggacagaaccaggaccaatggacaaaatctgcaaggaggcagcatttaactgattagaattgtcgggggtggggttggcgagagggtgttgcttttctaatgattcacattgtataaaaagcagacagtaggtctggcactgttggctcatgcctgtaatcccagtactttgggaggccaaggcaggtgaatcatgaggtcaagggttcaagaccagcctggccaacatggtgaaaccccttctctactaaaaatacaaaaaattagttgggcgtactggcaggcgcctataatcccagctactcgggaggctgaggcaggagaattgcttgaacccaggaggcggaggttgcagcgagctgagattgcgccactgcactccagcccaggcgatagagtgagactctgtctctaaatacataaataaataaaagtagagagtaagttttctgtattgaaaatgttttaagagttctttgtcttaccttaggttcctccaaaaacagaaccagagaaaaagacatatttatgcataatttgggatgtgattacaaagagagggatggggaattcaggaaggaaggagaggcaatataaaaatgtgttttttagttagtcattactagaggcaactagtgctcaactccaggcactttaggaaatgcatctcatagctgtctgcctgcggaataaagggcatttatccaccggcttctgaccccgttggacaagggcgtcccataagttttgatgtcccagaattttgggtttgcacatgtgcaagtgccaagcaggttcttgtaggcatcccatgctgcagagtcagagaatctctaggatggaaatggggggatccatattgtagccccaggtgaggccatctggttgcatttgtgtcaagttggttgaaaactgcatggtgagcgtaaaaatggtttgagtaaaatggagctgtgagaatttgaaggggtgcatgagaggtgcccgatacagtccaccccctgcaccatgctcaggtctcttaagagtaagcagaatctaccacagtgtatccttaaagttaaaaggctctctgatgggactataaatgagtcccagtttgatgaattctggggctttagccttttctgctgtggtattagttttctggggctgctgtagcaaagtaccataaactgggtggcttgggacaacagaaatttattgtttccaagttctagaggctagaagtctgaaatcaaggtgttggtagggccatactccctttaaaatgtgtagggaaggacccttccttgcctctttcagcttctggtagccctagatgttcattggcctgtggcagggtaattccagtctctgcctccatctgcacaagccattctccctgtatcttttcacatcatcttccctctattactgtttgtctctgttttctgatctcctcttcttctaagggtgacagttttactgggtgagagcccaccttaatgccctcagtttaactcgatgacctctgcaaaggccctgtttccaagtaaggtgacattctgaggtactgggcttaggacttcaacatatctttttggggggacacaattagaccaatagcaactgtgctataaaagagatgttgctttttatcattgatgctatccagatgcatagcaatcattcaacaagtcattcgaaagaaataggtatttcctgagggtctagtatgtaactcagctctgctctaggacctggtgattacagcagtgaacaaagtgctcctgcctacgtgcagcttactttcttatggagcatgattttcagaagtaattgttcttttgcctcgttatcatcagacattaggaaccaaggggggattgcctgcttttggatcacagagcaagctgccttgagcaagtgagttcgaattgcaaaggtgtttaagcatagcttggtggctgcttagtgaggatgttgcagaggcaatttaaatgccgagcagggctttgggtttgtgatggttaaagtccatttccactgcggagatggtatgattgtacaaatggacaggttctgggcctctgtctgttttgtcaagtatacaacacttctgtttatctttaaagggaacaaatagtgttttcacaggtctctgcttaaataaaaagattctagaccactggatgtcaaccccaccatcccccttctttttttttttttttttttgcatcctgtactcctttgagaatatagtggaacctctggcccattctacaagggaaaaataaatgtattcctagccaggcatttgtgtacaattttgtaggggaggaaaggattgttcatagacactgaattaagaaatccctacactttatgggaattgtaatcattagtagcagttacgtagacatacttccattaaatacacatacttgctttagagagtgtgtttattcataaaaattcattgaataggattaggaataaaaatatgcatagaaatatttgttactttttcattgtaatggttttttttggatagaaatttatcagtgtgtaattaataaagtagtattgatttcagaattatacggtgctaaacaatggaaatttcctaaataactggcaggtaatggaaaaaaaattcagttactgacagcctgtcatagttgaatctaagagctaggggcaaaatacatatattctatgtagtttccatttctagaccctggatttctaaattcttccttataaaattttaaatttctttttttttttttttaaagatggtgctccctaactgatttccttcattttattatctcataacagatttgattttcacaatgaaggtaattattaaaatgcttcctttggtagtcaataaatataattagtttaagaaaactagaaatatttgttattagaattaggtgaacatctaagagtcttatttatggaagcaacatggtcaatatttatggaattgagttgaggctttgcaacactttcaacagctttttaaaaagcaaaatagttactgcctctgtggaaatagaaattacccacctattatgtaatgaaaaactaatgttggtttacttaaaacaaaactgtgtagcagtgtgttatagccacaggaactcctcagccaaatgttaagttaatgcaatgaaaacatttgtaaaaacattatcaagctgcaaaagaactagaaatgctagatactccctagtagctgggtgttcaaaaacacttgtcattctcacagttatatttgtggtatcttagtggtcattcaccttggatgtgattcctcaagtatgccagaaaagcatcgtcttgtgcaagtgttgtatttaggaagaactttgtgtgaaatcatgattgtgggtgaataactttaaataaataaatcgttttccttgatatacaatattgtgctactttccacagaaagatggaatcaatgctcttgactgtaatggaggtttacagtttttctaatttcttatttaggctgatctgagcaaagatgttcaaatttccacttatttaaacaagatagagtttttgctatgttgaaggaatatttttagcttagtaatttacttagaaactgccttattcaatattcgatgttaaatttgaactaaaacacatagcatcatatgacatggagtcttacattcacattttgttggactggaaacagaatcaacatattagtcatcttaattcatttaagttggctttctccagaattctagaatccaaaaacaacacatttgtcagttttacacacaaaaggagaggcaggatgtagtttatagttaaacatccagctttgcaatgaaaagccaatgtagctatagcacactgaatgaaattctgggtgaaacaaactgtgtaataagattttgatgcatattgaatacttagaaaatttgttttatatttgttttaatgagattctctttatatctgctttcatagaaacttgtaaattgtctaaaattaaattttctgtggttgtcatccacatgggttctgaacttgctgttataattattcacattttcttgcagtgaaaatctacagatcaaggtcatcttcacgtctttagttcttgttttgcttcaggtcagtttagaaccgaatgttaaaaggatattgtctattcgaagggtcagattgtggcacgtggaccaaatccagccccccgaggcccacttttgtaaatcaggttttattggaacacgggtgctcatcgtttacatatcgcccatggctgctttcacatcataacagcagaattgagtagctgtgagaccctatggccagcaaagcccaagatatttactgcatttatttactgtatttatgtttattctcttgccctttacagaaaaagtttggcaacccctggtttattctgttaacatgtttcctatataaggattcctctaataagttttcagaattattaagaaaacaaagctcattcctctaaaagaattggtatgtttttttttttttttttttggtggtggttgtttaatgaggaggacattataaagtattatatttcgtttccttaccttggttgccaggaagctcagaactttaaacattaaaatgtttaagtaaccagctcacttcacgtttcggatcagctttctttttcttaacacggggatacattttcactttaaaaaaaaatcaactttttgaagcataatttacatgttgtaaaacccatacatttaaatcatacacatgaaggtcttgacaagtgtgtacacacacataaaccaccaccccagtcaagataatagaatattcacatctgtaagaaattttccacctgccccttggctcaggcaatttgtcagtcttactactgattattgcgttattttaaaaccctgggttgtatgcaattgtctattacaagctgttttaaatagttttcggtagtggctggggcactaatgattaatagttgaatagcacagctggagaagttaagattcatttattctatttagtcttcagtacaaatttttaggtttccatgggagaatctgagatacagctcacatggagagccttttagctaatgtagcaataattaataagctggatagcctgatagcctgatgttttattagggtggtgcaaacgtggtttttgccattactatatatatatatatatacacatatatatatatacacacatatatatatatatatatacacacacacacacatatatatatatatatatatatatttttttttttttttggagatggagttttactctgtcgcccaggctggagtacagtggcgcgatctgagctcactgcaacctctgcctcccaggttcaagcaattctcctgcctcagcctcccaatagctgggattacaggtgcacgctaccatgcccggctgatttttgtatttttagtagaggtggggttttgctgtattggccaggccagtctcaaactcctgacctcaagaaatccgcccaccttggcctaccaaagtgctgggattacaggcgtgagccaccgtgcctggcctgccgttacttttaatggcaaagataattcttttaataattaaaatttgaaataattcttttaataagaatttgctgcttgccaagagctctgcagttattttattcaattttcctaacagctcttaagagtacatcttattattcccctttcacagatgaggaaattgaggttcacagaagttaagtctattagtttgctagagctgctgtaacaaagcaccacaaattgggtagcttaaacaacaaaatttattgtctcatagttctgtaggccagaaggttgaagtcaaggtgttggcagggttggttccttctgaggactgggaggagatacctgttacaggcctctctccttggcttgtagatgagtgtattagggttctctagaggggcagaataggataggtgcattaatatttatgaaggggagtttattaaggagtattgactcccacaatcacaagctgagggacaaggaagccagtttgagtcctcaaacctcaaaaatagagaagccgatagtgtagccttcaggctgtggtcaaaggccccaagagcccctggcaaaccactggtgtaagtccaagagtccaaaagctgaagaacttggagtccgatgttccagggcaggaaggatccagcatgggagaaagataaaggccggaagactcagcaagtgtgttgttccatcttctcctgcctgcttttctcttggctcgctggcagctgattagatggtaccaacccaaattgagggtgggtctgtctctcttcatccgctgacttaaatgttaacctcctttggaaacacccgcacagacacacccaggaacagcaccttgcatccttcaatccaatcacattgacactcaatattaaccatctcagtaggcttcttcgtgttcacatagtctcctcaccgtgtgctgtgtccagatttccccttttcataaggacaccagtcctattggattagggctcccccattatgacctcatttatccttaattatgaccataaaggccccatctccagatgcagtcatgttgggggttagggcttcagtgtatgagtttgggatggcaggggagcagttcagctcgtgagaatcgtaagattcctgatctgtttctcttccaagaaattgtttggtttcatgttgattttatctccttttccctatctgtctcaaagcactgaagaaaatcaagtcccccttgccctgataaggactttaaaatggtgtttgctaaaatggtgtgtgcttaggggcagctttgagccagataacaattctagttgcgcatgcttccataagctgtttactctaggaaggagaatctctgttgggatcttttggggagtacttgcctcccaagtgcttaggctcccgctgctgacaagaccctctgcctggcaagccgtgcaggttggaatcctctgttagggttccaaagccttcaccaactcagagctctttctctctctgtttctcttttttgaatttaaattgatcctagtcacaatgttcacattacctatgttggggatcctaccaagaccctctttttggcccagaagcagcagcggggtgaggggaatgaaacaaaaatttatagctgtcgagtctccagaagtcatgtaaaatcagcctcagctggaagctcctccgtgcatccctcacattcacacaagcaggtgcctgatcacagctgatggttagattacacgtttcctgagaggtatagatttcaaaattggtgtatttcacccgtccctcatcatggtatccccaaacaaaatgttatcaaatgaagaactccttcccagctctcccttctgagtgtctgattttattcaagctcagatggcttctcagatagcgtaaaaagtgatggagaatttcttttaccaattgtatgccctgtgggaacctgggtgctgtaatcactgaatatgttataaccaaaaaggtcaaactcgcaatgattcggtgtgttttgttccgtgcatcctggcatgtgaaagaagtgaggtaaagagtataatttacttccttgttttaaagctagcattgcccgtgccttccacgcgggactgttgtggatatttgaccactgcaagaaaactcacagaagcagaaacttagggcttgctttaaatgttatcagtgtgaattgagatggtgtcagcattatttttttaaagaccaaaacaacaatagtaacaaacacacacaagccactgttagattttacaaaactttaaaaagtaattatcttaaagatatctaagatagtgatctggttacatagattatcagagatacttttttttttgattatcagagatacttttaaaaaagcaactacaaggtaaggattatcctttaatttagtgtttttctattaaactcaatttgctttaaagttttttacattttgcctcttttttgtatgtttgagtaccacttcctaaccaatcacaataaatgtccggtttggagttggaggagtcattgattttaggcaaggtgatggtgagcccacagagcacagagttaatggaactctggccgttgatgtagcttcgaagcctgaatttaagtcatatttttgaaaagttgcgtcttaaaaagttactagcgatggagaatgaaaagtcaatttggacactttaaaagtgagcctcaaaaaactgctgaattttcccaacattgtgttttgagcacttccacgtgactttggtagcataaagactttagtcttttcaagaggcaaagtaatataccacttttcgcttttttaatggtgagagccaaggtcaatctgaatttttctttttctttcttcctttttttttttttttttttttaaaaaaaaaaaaggtgcttgaattagaaaggtagcacattgtccacatggacagtgcaggatggggctggctttttcatttctgagagctggcaatggaatgaaggtctttttttttttttcttaatttttcttttttaaacaattccctcctaagcatttcttaattgacaggggtggaaactatgttgccaagagggatcacagcccttttggtcattaagaaagtcaaggaacggggtctctttggatgagtgtgtgcgtgtagaatcctggtggctggcctgcttgctctaaatcataaagaaccctgtctcgagcagacgagaaagagtaacggaggcctcaatggtgaaaggaaatcctgtaccagctgtgaaaacaatgagacacgttcagtaatagaatatagtgtgcttacaaattcagagttgggttcccttcttctcttgaagtggctataaattaattcatcaaaataaaaaaggccaaacttcaggataaatctttctacttctaaacaaccagaaacactttggttgtcttagtagataggagtgtgagtacagaattatacgaagtgagaccatgggtgtgtgtgtgcacgtgtgtgcgcatgcctgtgtgtgtcattggttagttaacaaaaggattgccctctgaagaacatgaacttgggccagacagcacgtgtagggggtggaattatggagcaattgttactttcttgtattaagaagaaagggagcaaaagagctgtgtcttcttgagaacctttaaaagacacagaggtctctgcctctaaaaagctccattacatttttttttttaacaggaggcctaaattttttatgttttattttgtgctgttttatttttcttcctaaggttctcagacaagtttataaaagtgccatgttggctgggcagagtggctcacgcctgtaatcccagcactttgggagaccagggtgggtagatcacgaggtcaggagatcgagaccatcctggctaacacggtgaaaccccgtctctactaaaaataacacaaaattagctgggcatggtggcgggcgcctgtagtcccagctactcgggaggctgaggcaggagaatggcgtgaacctgggaggcggagcttgcagtgagccgagattgcgccactgcactccagcctgggcgacagagcaagactccgtctcaaaaaaaaaaaaaaaaaaaaaaaaaaaagtgccatgtatattttgattacaaaaaatttcatgcggtgttactttctttttattggtagagggtctttatgttttatttttttgagacagaatctgctccatcactcaggctggagggcagtggcaggatcgtagctcactgtaacctcgaattcctaagctcaagtgatcctcctgccttggcctcctaaagtgctgggattatactttgagccactgtgcctggctggcctttgtgttggacgttaatacagttggttctttaaagtttgacagtgaagacttttggaaattaaagaaaaaaaattgagtataacttgtaacggtcatggtgtaaagatcattttttactggttggaagtatagaagtggggttaaattaagtctataattgtaaactattgatgttggaagaacatagagagaaacttattcctgtggactggtgatcccatctcacagcccttacagataaatgtttgtaaaagcaaaggacagtgttaattctgagccccaagatgaaatatcaagtaaaagagaagaacatttgccaatgcatcactgtctgggaatggattccatacagcaggtaggtttatgtaatacagtagctgaagagacctcaattctgtgccttgatgggattacaccgaagggagcactggtaggctgttgatgaaacaggtggtatttggaccacttctccctctttccggacagctgcttagtaggtttagcttaaattatacacatgccaagcatgtacacatatgagaagcctatatctcgtaatatccacagagaatagatggcaaatcccatgatttgtatttgactgacagtcaagaccctgtggggtgtgagcctggtgggggcattccaggctggtttctcctgcctccaggagctgcttctagtgtgtgctcttaaccctaaaggaaggaaacactgtgtcttcctcttctctcatacagagcccttcccatgacaaatgtgtggagtgttccctccttttacgtaattctccaattttctggaccccagcttggtgtcctacaattcagttttgacactaacgacccagagtcagcacagaccccatggttgagggctcagtcctacaggatcatcccctacttcaaatgccagtagcaagttcaagattgtcaagtgcacttctgactcactggctacaaattggggttcccacgaccatctcctcaggcttgataatttgctataatggctcataaaactcagggaaatatttacttatgtttacctgtttatgataaaggatattacaaagagtacagatgaagcggtacatagggccaggcatgcggaggggatgtggagcttccataccccctcccggcatgcccctctccaggcaccacatgctcagcaatctggaagctctccaaaccctatcgtttaggtttttgttgttgttgttttgagatagggtctcgctctgttgcccaggctgcagtgcagtggtgcaattatgcaatcatggctcattacagccaggacctcccaggctaaagccatcctcctgcctcagcttcctgagtagctgggactacagttgcacaccaccatgcctggctaagtttttttgttttgtttattagagacgaggtctcaatatgtcacccaggctggtcttgaactcctcagctcaagcaatcctcctgcctcggcctcccaaagtgctgagattacaggtgtgagccactgtgcctctccatttaggattcttagagaggttttgttaccctaggcatgattacttaaatcattggccattggtgattaagtcaatctccagcccctcctcttcccccaaggcggggaatgtgggggttatcaattattcacaactctctaattgtgaataataaaagactctcccctcacccacattgctcagaaaatttcaaaggtttttgtttttttagacagggtctcgctctgtcacccacccaggctggagtgtagtggtgcagtcatagctcactgcagcctccaacttctgggctcaagtgatcctcccacctcagcctcttgagtaactgggactgcaggtgcatggcactgtgctccacaattttttttttttttttagagatgggatctcactgtgttgtccaggctggtctcaaacccttgggtttaagtgatcctcttgcctcagcttcccaatgtgctaggattacaggcatgagaccccatgcctggccaatttcaaggattttaggagctctgtgccaggaacctggatgaagacccagtatgtatttcttattatatcacaatatcacaaatccacagtcacatggtgattgtggtagtgtggggggcctgatggtggggtacacctgcttgaagtcaggctaccatgcccattggggtcctcccccttttttgccctctgatcttgtgagttccttaacattggggatcagtggtttttctcttacatgaaatgacaatgacactttatagggtttctgtagagaataccttagaattagttaatgtgtttcataaagcacatggcgtggtacccagccaagagtaacactctgaagtgctcctccttacctggacattacagcatcctttgtataaatcaggatgctcaggaaataccttgtttggaataggaataggctcctccctttttttctcacttgccttgattgctctgtattaaaattcataaaggcccatgaattatcaattagatagcatttggtttgttatttttagtttcttcctatagcaggcatgtatgcatgtgttaaaaatggaagtagcgtcgacattatgaaatgcacaagaagttttcctgcccccaaccggtaactctctcctgcagtaatcaatgttggcacctgtttaaccacttttgtgtcttacgtgcacgctgttcggtactttgactttttttcttaatattataacatggaggccaggcgcggtggctcacgcctgtaatcccagcactttgggaggccgaggcgggcagatcacgaggtcaggagatggagaccgtcctggctaacacggtgaaaccccgtctctactaaaaatacaaaaaattagccgggtgtggtggcgggcgcctgtagtcccagctactcgggaggctgaggcaggagagtggcgtgaacccgggaggcggagcttgaagtgagccgagatcgcgccactgcactccagcctgggcgacagagcgagactccgtctcaagagaaaaaaaaaaaaaattataacatggaaatgtttccttgcatctccgtatcatttctcctcattctttttaggtgtaacacagtattttgtcctattcatgcaatataatttatataacctaattgataaaacattttggttgattgcagtctgtcgtagataatgccgtactgaatattcctcccacatatttgcaagtctatttgtaggataaatttctggttgtggctgggtcaaagagcatgtccacttcaaatttgatagctatgtcccaactgcccccaaatatgttaagccatttcctatcccccatccctcattaatctatgaagttgcctggttgccccacatctttaccgacaggactgccgctcaatgtagttacccttgtagaatctgtctgcatgtgcctgtctaggaccatgttaattgtaatctttgggcatttttctcactcattcctaaccaggactgtcactggcaggttaaatgagaacttattcacccagcacagtggcagcactagtagccagcctggggtcagtcttgcctctcgagagatctcatgcagtcaactgggatttattgtacagctttacaaaacattacggcctcagccttgtactgcccaaagcatgcagatgccgcctggtgtattttaaagatattccacatgaactgacccgtttcccacttcttgagttggtatgttttttgattaatatatttgagatgtatttatgttattagggctatttaggaagctctgtagggatttgttgcttgctgtatataacacatacttttaaaaagcagggctggctatgacttatttttctctagagagacctgtgtagttttgtaagttcttaagatttggcagctgtggatcgtgtttagtaagcacgatctctaactctttggaactcagaactatgtaattgaaatggcctgggaggcaaatgtgatcattcaggtaatcaaagtaactacagaaacagaggtatggattagctagtcattgcagatgtggcattgagcatataggcgtggtgtacttcttagaacttcatctggaaatgcctgtgggggagttggatttcaagatcatcgtcaatgtcatgtcactgtaatttcatttacattaatcagattagtttggaaagtatggtcttcctacttttaggaggatataggagaaactcatccttaaagatagtagtctgttaatacaaaaacagtccccacatttgcattgtccccaaatctaacccaagctgaaagacattaggcctatcttcttgctttatgcataatggcagatctccagggagggagaggatgtgtgctggaagattctacaacttgttgattggttcctaaagatcgttttagtgctatgtttgtggggcggggctggagggggctggaaatcaccatctctgtggccttttaattgtgcccagttacaagtaacatttgtccccagtgtttcacaattataaattaataataaccacccattagaaattacgggtattgtaagccccaactcctttgggcgtcttaataaaaatgataattaaaaccataatttacagtaaatggggacactgcccaagtacatccacaatatggagaaaattaaaaaacttaaaccagaaggaaccttcctggcatcggggaaagaagctgcctttttcttagctcctacctctgtgggagctttgtcagtatttgaggggacagggttcccaccttcatgttttttgtgcctgaggattctgtgggcgactgtccccacctgtccaacctaccagtgagtctcatggtgtgcggctgcctgctccgatgctctccaccaccatgcccaagccatttctccctttgtgttccctgtctgggtaaacaacttgccaagctcaccagtggcccacagggcaccttggacacctagacttaggcagtccctggctttgtagattttttttgcttcctacatgattttctaatttataccttgagctgctcgggataagagggcacctcgtccatttctggctggtcacaaggccacagtatcttgagcgagtccattgtgaccactggaggtactgtaaatggataaaataataatatgaataataactcatagtgtttactccctgcctaaatccacaggctcccgctgcctacagaggagtcccacagttttcgcttgcttcatggagcttcatctctgttgtattcatgtgatttatttacacagagttgctccccaatccttgatctttttttttttttttttttttttttgccaagcaccctgcctttttgcttgtctgtttcgtctttatctctccttccagtaaagttcttggcccagaggttctgctgccactcagtgacatttgtgaaatgcaagggagcttgcaccatgggttcaagctcctgcagatccctgagcctgctacccttgtgcttctctgtccacgcaaagccaagtgctactgcggggttttccaaggcatagctagcatcctaatagtctcacacttgacatagtagggtttgacatggtttaaataaaatctcaaccagatcagtgggagatgttctttgagattcggtgattgagttgtgaacgtatggactgagggtgttttgtggtaaggcttgagtcatgtctgtagcaaggatgtttcctgaataatgtgcactgagcatcaagtgcctgcagtggcctggcgggtaatgccagcagcacgggtgatgatcatggtcaacatgaccaactagaaagcccaaaccccacctctagctgacagtggcttctcagctaacctgtcaccacgtgggattgggcccccagtggtgtaagctttttcagagaagctacacatctagcttttggacctgtgatctccccaatgttttaatgctggcaactaattcaaattaggaaggaaggaaggaagagaggttggaagggagagagagaaagaaggagcaaaggagaaaagaaaggagagaaggaggaagggagggaggaaggaaggaaagaaaaggaaggaagggaaagggaaggaaggaagggaagggaagaaagtatgggccacacaaaacaggtctgtgggcttgacttgtcctctgatcatcagtttgtgacctctgttctaaagagtgaaaactatgtaagatagtataagataagtaggtatttaaattactttgcaccttttccatttcatagaacttgaatgtttgtgttcaaagcttaaaacccaagacagtgagctattaagcctccatggccacgtcatttttctgattgcatctgatgtaacaagtgctagaaaaactgatgctgttcattgctttaaaacgtctttctttattttcttggtattattaggtttacatattcttccgaacacactcttgccatctccatgcagttaagctagttcaatttaaacattgtcataaagttaattttttataagatgaatcaggttattaaatttagtaaaccattgccttcattattttgcacaaactttggcactgtgcagaataggcttagcactactacatttagctaattaaactggccgtcagctgcagtattacaagagtgagggatgttattctcttgggttttatccaggactttaacagtaggtagcattattaagctttttttatataaaactccacactctagagatatggtttactataaaagtgttattgtccttcctgttaaactatcatcttttgaaatagccacgctttgtttctgttccaaaggcaattgtaaagggtaagaaaatggagttgtctattgcagcttttaaaagtagactagcaacgggtaatgcattgcttagataaaggaagatgtaagaaccagagtgtaatttcacaagacacagagacagatggcttacccgtaactacagtcaggaattctctaaaggagagagggtggaagcttgagcctgtagcctgttgctgctgtcttgtcagatgtgccctttctggtaataaaaagtcctttgccgtgggttattttgtcaagtgagatagcaggacttaacaggtttgtttgggaaaataaaatttgatagaaaaacggcgtgcttttcccccacagatttcttggtagcatcattcaaaactacagtgagcagtatctttgcaggattttaatatttattcattattataaaggaaggaagagggccatcgtgttgcagtttgaaacagcctggattgttttaaaatagtccagagctgcagcctattagcagtctgcaagaaccatttgtttcttcagcagatatttattgaatcctactgggtgctagtctggcgaaatacggagattggagggtgtaaggctcaaggagcttacctgagaaactggataaataaagctctgtactgggtgtggtggctcacgcctgtaatcccagcactttgggaggtcgaggtgggtgggtcatttgaggttaggagttcgagagcagcctggccaacatggtgaaatcccgtctctactaaaaatacaaaaattagctgggtgtggtggcacgcgcctgtaatcccagttgctggggagactgagacacgagaatcgcttgaatccctgcggtggaggttctagtgagcagaggttgcagattgcaccgctgcactccagcccgggtgacagagtgagactctgtctcagtcagtcaatcagtcaatcaatcaagttctggaacctgcctggccttgtgttatatcgatgctttctcaatctgttaaaaacgtagctgctattgaatgactaagaattgtttactctcatttccactctcttacatcttttttttttcttttaataccctgtgatgaaactgtgaagaaagatattcctgatcattgctttgacctggaaatttcaaagggacccacagtccaccattccgtccaagatcttctgggtgtgtgaagtcccgggctcccaaatgcagttgtgtttggtcactgtgttgcttgcatatggctgttggcatctcattagcctgattgatggggcagatcagtcagcaagactttgttcggtgcctgcccccagccagctgggctacaaaacctggcattttacttctctcattttccccaaatgatctaggtgtcttttgctcactggtgataaggggtgacattggtatcacaggtaaaaatgagtaaatttgagattattgtcgtcttgctttaaaggttggagatacagcttcaaaaaccttttactacccacacacccaaggggagtcaaatggatttaggtgttaaatacttcaggtttgaaatcctttgtgcattatttcagcatctgatttaagtatcagaggtcatctttaggtaataagtaagtattttggaatatgggatttggcaaaatctcaagaaataatttcaggttgtctcagcaatgaggttaaattgtgctccagagtccatattcagacaaacggaatggtggagcccgaggttgatttctttgaattctggttggtattaaagtcattcagccctcgggttaccattggtagcacatctaggagcaagttttaattttttagtcatagtgactgtgctggatttggtaggtcgtacgaattgggtaagaggcataggacaccaaggattttgcaaaaagcaggcaactaacatttgttttccacctactatgattatgttaggctctcaatatatgtttaccacttattccccattttacagaaacgataactgagtttcacatgggttcaaggcgtgaccttagatcccacagcttgtacgtgcttagaactggcagcaacacaagtgtgtccaacttgagttttcctctgtgctatgctgattttccttgagaagtattctgtataaatagactgttttctatgaagattaggcctgtgggagtgatatgaatgaatgaactttactaggctctttcacatggtgatgtcaggaagataacggtatgctgattttgcgtgcatattaacattatcttgtaaacaataatttatggccatttgacatgggtttggctgaattgcatagctgccttctctagtagaattgactactttgttattgtactgtactctatagggtcttccaccacagattacaaaatatggtattttttagtttagagcaatgggttggtgttcaagctctggattagactgcctcttctttttcctccctccctcccctcccctcctctcctttccccttttttgagatgactttaaaatatagattcatattttttaaatatacagaactttttcagttttccatttcttcttgtggcaactttttttgtagtgtttttctaggaatttgtcttttttacctgtattgtaaattcattggtataaagttgttcaccatatcttaagatcttctttgggttcataggatctgtagtccttttctttatttttcatttttaaaaacaactttattgaggtatgattgatgtacaaaaagccttacgtatttgatgtatagaacttgataagtttggagataagtatatacctgtgaaaccattatattttataagtacatgatacaatatgagcacagtactatatggtagatctctagggcttttccatctggcgtacctgaaacttcataccctttggctaatacctccttgtttctctctcccctcagccctttgcctacaccattctattttttgcctctatgagtttgagtgtcttagattcctcatataaattgtatcatgtagtatttgtccttctgtgtctggcttatttcacttagcataatgtccttcaggttcatccatgttgttgcaaatagcagaatttccttcattcctaaggctgaataatattccattgtgtgtgtttgtgtgtgtgtgtgtttgtgtgtgtgtcttccacatttcctttatccattcattcatcagtagaaatttaggctgcttccatgtcttggctagtatgaataatgctgcagtgaacatgagagggcagacatattgttgtgatcctgatttgagttcctttggatatgtatccagaagtaggattgctggatcataatccagcaatttttaattcttgtttcgttttttgaggaacctccatactgtttttcataatggttgcaccaatttacattccactaaggaatgtaagtttctcacgcataagggggctcttgtttccacaccctgaaccacacttgttatctttcattttatgatgagaaccaccttaagaggtgtgaggtgacatctcactgtggtttcaatttgcattttcctgagaattagtgacagtgagccccttttcatacacttggctatttgtatgttttctttggagaattgtctatttggttcctttgcttgtttttaaaatctgtggtttttttttttttttttttttttgctattgggttttaggagttccttatatattttggatatgaacactatcagttatgaggtttgcaagtattttttactattttgtagcttgccctttcagtgtcttgattgttttctttaacgtgcagaagctttttagttttacgtaacctcacttgtctagttttgcttttgttgcttatgcttttatgtggcataatgttgtccttttattcatccctgatattggttgttcaagccctctctttctgtctctgtctctctctctgtcattcttgctagccctttatcaattttattagttttttcaattgacagacttttagcttctttttttctctgtattttatgtttgttttagatttataagtttctcctttctccttttatttccatcgttctgctttctttaggcttaatttgctgggttattttcctaatgtaatggatgcttagatcatcttggatgcttagatcatcattttttctttctttctttttttttggagcaagatctcactctgtcacccaggctggagtgaagtggcatgatcatcctcctgagtagctgggaccacaggtgtgcaccaccacgcccaactaattttttgtagagatggaattttgccatgttgcccaggctggtctcgaactcttgggctcaagcgatccacccgcctcggccaccccgattcctgggattacagccatgagccactgtgcctggtcttctttttaatatatgtagttaaggctatagattttcttttaaccatggctttagctatactccttaagtttgtatatgtgtttgtaattaccgagtttaaaatatttctaactttcattgtaattttttgagccataatgtcttatttatttatacatatatttccagaaatgagaattttctgggatcttgttattgatttgtaatttaattccattgcggtcaaagagcatactttctaattttaatcttttgaaattcattgagacttgcttttgcccctgcaaatcatcagttttggtaagtattcttgaagtacttgagtatattttgctgttgctttcagtgtttatcatattcaattattttcagtttatcaattaagttgttcaagtcttctatatactttgtgtttgtctgcttattttatctgttactaagagggatatgttaaaatcttccattataattgtgaatttgtctatttattgtcctaattctgtcaatttttgacatatatgagaggctctattattaagtacatataaatttagaattgtcatgtattcttggtggattgaaatttaccattgtgaaatattcagcactttctcttgtaatgcttcttgctttagagtcttttttttctgaaattagtacagctatatcagatttcttttggcccgtgttatacagtataccttttctattcttttactttttttatgcttatgtttaaataaggtataaaacataatgtacattcttttttaaggacagtatatgtatatttatgttttcttcagtctgacaaactttttcttttaattgccatctttaggccatttatatttaatgtaatgacagatatatttgagtttgggtttaaatataccaccttattattggcttcctgttaagttattctatattcctctttcccttatttctatcctttctttctcttttttcttttcctttttcctttctctctctctctctctttctttctctttcctttctttcttccatttaaattgagacagggccttgctctgtcactctggctggagtgcagtggcataatcatagctgactgtgcccttgaactcttggactcaggcaatccctcgacatcagccttctgagtagctgggactaccggtacctgccaccacacctggctatttcttttttaattttaatttttgtagagacagagttttgctatgttgcccaagctggtcacaagtgatcctcatgctttggccgcccacggtgctagaattacaggccactgtacctagtcatcttctctcctttcttgcctttttatcattctgcttttcttctccattagctttttaaatttgtagagatttacatcttgcatctttgacttattaaaatctaatataaatcagtattatatcacttcctggagaagacaagaaccttaggatactttgcttccattactcacctcctaggttaagcattgttattattattgatatagtaatttttgctatatattttaaaactcacagatttcactcttaccatttggatcttaacatgtcgttaccctttatgttgctctttgttactttctgcatctctgggtttatagctaaggtcattttcctcctgcctgaagagcatcctttagtgtttcctctagtgtgggtctatacgtgacactaggtgtagtgtaggtgacaaacaaaaagcagctttcgtttgcttaaaatttttgttctctgcctttatttttcaaaaatattttcactaggtatagaattctaagatgaaagttttattttttttcagctgtggcttccatcattttcctgagaggtataactatcagtcttgtagctactggtctctaactacttctaaaactatctgcagtttttagcagttttactctgatgtgccttgctttgacatgtatgtgtatatatgtgtatctacacacacatacacacatacagatacacactcacatatatatttctgtttgcggctcacacagacataaatatatatatatatacaaacgtacatttctgcttgtagcttgcacatatatatatacacacacacacatacatgtagacacacacatttatacatatacatgtcaacacatacacatacatatttctgcttatggctcaggatacttctttttttggccgtgtatgcgtcattgattttgtaacattatcagccattctgtctttaaatattgcttttcttagtctatttcacttgttttggaactcagattacatgtatgtgtaagagcctgggagaatgtgtttcatatgtctcttttgtgctttgttttattgtgttatttttttctttttatgcttcactttggatttttttgttaacttattttgtagtttcctcaatcttgtcgtcagctgtgtcttgtattctgttaaactatatgctgaattcttctttactcttattactcttattttgtttaagtttcagaatatctatttgaatttttttattgtttctaattccctggcaaaattctccatcttgcctttttgttccttgaatttgtcagtcagacttattttaatcactgtttctgaataacttgattagacagatctcctgtgcatttatttccatttgttcccctctggcttttggtgaagttttttctttttgtatgcttagctattttgtttgaatgtctgagagtttatatgagtatttgaaataatcatagtggtaatttgagactctagataatggtatcttcctccagagaacattttctcttgcttctggaaattggatagatagggactgatcactttaatcaaactaggaattgaaatggcctgaagctgagtttccactcttgtgaaggctggactgtctcttgttattacagcgagggtataactctttaggatcccgacccaaggtttggtgtgtttaccgtggccctttcctggtgggtcctgagctcaaatttatgtctttttccttgttataaaattgccaaaagctcagcccatcttctcaggcttccaaccactatgtttggaaatgaaatatgccttgaaggaaaaaagctgccaaatgctggccttgcagtttttgcagatcttggcccccaaaattcttagtcatagtgcccttctgatgccttcaaacagatatgggtgtgtatgcacgtgtgttattttgtccatcttttctaattgttctcagtaggaaatggggctaagaaacctaggtaacactggtagaagcagaggtgctggcgacacttaccatagagtagagcataaagtccttatcgtgggcacaggatctggtcattattgatggttaaatggctggacatgccgtgaactcttctatgtcccagtcttcatctttgaaatcactgcatccctaggacaagttttctcaccatcacagtgttgacagtccgggccagatggttctatgttgtcaggggctgccctgttcatggtaagatgttttgtaatgcctggtgtttacccactagatgccagtaggactctaccccacaactgtggccactgaaaatgtctccagacatttgcttctgtcccctggggatcaaaatcacccctggttgagaacttggggtaatttaagtggtgctccggtaaaggccattcaacatgactcactgtgttgatgttatgttttctaacattgactttcctttaaaccatagggttcgaaaccgccaagtcttttgccctccatggtgcacatgtgatcttggcctgcaggaacatggcaagggcgagtgaagcagtgtcacgcattttagaagaatgggtaagtgcttgactgttgttgttttttttaattgtcaaatacacatgccgggctaaccatatggagatttcagtggagtgtgtaaagtttattgctcttggaatcatgtctttatttttaaagtcatcttcactttgtttgtcttatgaatgaaagcatgagcaagtccattattattcacgcatttgtttgtagttcattgtcagtgtcatctgctttattagtcaggggtttgagaatgtttcttcctttaactcatttattaagaaaaataaaacgtggtgaacgcccatgattgcaactaggagactgttatgcttatggttgttaagattagaaagaaggaggctttaaccctatctctaatttcttacttttctctgtctatgtagaagttgatgttgatacgtgtctacataaatatttactaagggcttgccttagtcttgggaccaaggatatagtattaaacgaaacagaatccctgccctcataggcttaccttctaggtaggaaaaatagaccataatcaagtttaatatttgccataatgtcagtaaataaaggactgtaaagcagaggaaggtggggggaatgatagcgtgagtgtgatggagtcatcagcagggagccttccaaagttgtgacatttgatctgagacctgaatgaagtaggggtaagccatgcagatgtcaagagaagtattctcttagcagtgagaagagcatatgctaaggctcagaggtaggcacaagcctggagatttcaaggatcatcagggaagctagtgtggctggagatgaatggagtgggtaggagaggtgctgttgggggatgggtatctggtagactctgagatagcggtgaggaagacattagagggtttgagctagagagtgatgcgagctgtttgatttttgaaacatcgctggatttcagaatgaagtccagactgcattcattcacttttcattcattcacatattcatgaagtgcacctctgtgatgggtgctggggtctactgttaaggacaacagacgttgccactgtctttgtagagctttcagcctattgtggaagacaaatttagtcaaaaaacacagatcttaatgtaaacttgaaaaagcagtgagtggtcctaggaatcagtaatgatgccagggagttgggagacctttggggtccccaaggaagaagtgattgaactaagatctgaagaaagacctgaagagggtggagaagggtcagatggggtaggggaatggcaggtgcagaggccctgggaggagggggaggaggagatagagcagcgtgtttgggagcagagcctgaagggggctgggtacaccctgtggaggccgtcttcatttttgaatgctgtgaaagatttcttgccatttgaagaaatagactacagtgtacttaagaaaatttttggtactctggactgaaaagtagtgaaaataaagaaaaggaagatttatttctgctttttcagtgtatttatgatgaaatatttgaaattcagtatatttgaaatgagcccttatcttgagctcactgagcttattattttgggttaaataaaaaagaaaacagagtcttactttttctgatcattttattgtctttctgactaatgttaaaaagtagtaacctctagtaggtgggatagtagcaatttttagggatgtattgagaagagtacaaatgggaatacgtgcatcttatttgaatctacacgcagaatgggaaggtgaaaaatgaaatgtgaaagtcgttcttggtccttctcttggaagataaacattatgtattcttccagaaaaaggttatctatataccagcaaacacactcacattctgttctgtactttttttttttttaaacttagtactgcaggagatctcttattagtgcatatagatctacttcattgttttaactgctgtataatattccatcatgtgcttatgctataaccagtcttccctttggtggccatttaggttgtttgcattgttttgctatttgttattccaagcaatggtgtttcacagttctctctttcttgcatcagtctttcttacgatatcatctgatattgggcctaaactatgctgctgtgagcattctttatttacgtatttgtgagtaaatgcctggggcagaatcttagcactggactccttgattcaaagggcatatgcatttaaaattttggtaacagttcccgagtcattttcttttttcttttttttctttttcttttttattttttttttgagactgagtttcactctgtcaccaggctggagtgcagtggcacaatctcgactcactgcaactttcacctcctgcgttcaagcaattcttctgcctcagcctcccgagtagccgggactacaggcacgcgtcaccatgcccagctaatttttgtatttttaatacagacggagtttcaccatgttggccgggatagtctcgacctcctgatctcatgatctacacacctaggcctcccaaagtgctgggattacaggcatgagccaccgtgcccgacctcccgagtcatttcttatcttgttgctccaatttccattcccactgacagtgtagacagacaactgctgagggcttgcagtgttcttgggactagcaggagggcgtgtcaaaattgtaaaactctgcctatttgatgtaatatttgaaactagaaaggtaaaattccagggacgctagtgacactatggtaacctgattgtacagtgacattcatgtttaaaccagtcttggaagataatgctgtagcacaactgtttttgcatcattaaatttatcctcttcttttctgagaacacaatatatatgagaacacattcatctgcatttatcctattttaattattgtttgatgcttagagcagaaattcctggacctgccccaattagcgatgagaccttgggtaagcctctggatctatttggagcctgtttcctcatctttaaggaaaaaggttggatggatgatgtcaaagacccactgttcagtctttctttcttatattttgagccttaattgggtccctgtgagtcaatttccgatgatagaatttgctgttttatagttttactctaacatgtagtaccttgagatagaccagtgatcccagactaagaattattcagaatcattcaccgtcggggacacagaaaaaggaaaatggaacagaaacaaaactaatacacgtggctccagatgtttaaaattagatttgataggttgtaggctgaagaaactcaacctgttcatcatctctcatcttttcacttgttctctctgtatgccattatattgtgttcctcattttcccaagatgatgattatggaaactcaaattttgcaccagaagctgtagttaccatttcattccattgcaccattcataccctgcagagaggatgtgaagtcgtaaggccttcttgctctggtgacatctgttaggcttcgtctctatatcatcccccaactccttgacccttgatatttgctggtctacttcccttcaggtccttcctcacctcacatctctgcgcaaggatttcatctggtatgtcactaaatattaccttcctgtgtttctcaaggtcaatttgatagactccaatttttcaagctgctggccagcttgagcgtattcatatgttacctacgatgaatcacatcagtgtcggggccgggaaggtactgcaacatattggcgcctcacgggaggctctcaaaatgatccaaagttttttgttgcagcaaaagctcattcagaagtctttgggccatttggctcagcggaggctgtcatgtgccaaggctccgtgggcattcttagctctgcttctggagataagagttcattcctccatcccaacttgttcttccctgcccattcttcctcttcctgccttcactgcacattccgggatcgccatgttctagaacattcatgtctgccttttagccagcagaatgctattctcacatccacaatgggacagctaacagcccccatttatcaaatccctgtcatatgctgtgtcaggcactttatatccctcatccaggaggatgcaaaaacctggtgtttttcttttttttttttttgcattttccagacgagccaagggatggctcagaagggtgaaggaactcacccgaattgcacagctggtgagctcagagtcaggctccttgcttggtccatctggcttccaaactccaagtctgtctgctccaccccatggcccatctttttaccatgtttagtatcaatgttcatactttgcagattttgctttcaaactctctagctgcggtttgagtgattaatttcaggatccatcctatttcttagaggaagccactctgatctaccctgtcgtctctttatattcaagatatcctttatagagctctcaaattacttttgggaagaaggagctatttaataaaatacaacttaagtgaaaacacattccatatagaagtatattaagaacctatatgtaattactatgactactaattatttcatgggaaaatgccctcctgctgagatgttttagatgctccaaagttagaagagaaaaaatgaaaacaattaaaacaggataacatggacagtacagaagtaaaccactgtcttaaaaggccaatccatttggcataattaaaaaaagagggaggagatggaggcacatcagcccccattcatatttaaataaagaaaacggggcagtggggcttgttcctatgttgtggaacagcacacagatgtgatctacctcattcacatccttatgtgaattatacactggtgccctcacctcttaagacaagcacctatcgttttcctgtgtattccaagaggccagtgtggctggtggaataagatgttttcctgttttcaagatgcagtggactctcttttatttaacagcagtgtctatgtgttaggaatccatgtgagttctctaagtctgggacaacgataggtgtgtctgagtcctgcattaccatggtttattctttcctttacccagtatctattggagttgggcttctgttgctttatttctcggggtctggcatatcccactccctgtcttgagatctcaggacctctgagatctcaggacctctgcatgtaaagaacaagagcttattaggtatcaaaacatacttcatgaacagctacagcaagacctcgacattccagtgtagagctcttgaaagaccccagtggggctctgagttcctccttcttctgtttctattagatttctaaattttagtttctaaattttagatccccggaacttgggatctaaaactctggtcctgtggaagaaggaggtagggtagagtgggagcagatggacctgatgtcatccatctccctacgttgtttgcaggaggaaaagggatgaggctgaggctgggaggcaggggcggtggattgagagagaggagagggattgttatgagtaaccaatgttcctcatgcctgccaggccctcactagatctgtttaacagagagtgcagaagagcttctgttggggactggccattagtatagcgaggggcccaataagtgttgtgaaacatcagcatctgctggacattgagatggccacaggttggtcagagagggctggtatgggaagaggggcaggtggctctcccttagagttactatttgactcacccctgacttcccagaatgtgtcttgagtctattaccctctcatatgggaggggtgacccaagtatgtttgtggcaaccaaaatgtctccaggcattgccagatgtctcttgggggtgcaaatcgtccccagttcataaccacggctataaaacatgctgtattatagtggcaaagattagaatcagatacatcttatgaccttgggcaagtttcttaacttctttaaacctcagtttcttcatctgtaaaatgcacatcataatatctctattcagagatacaggtggttctattaaacacatcaactctgtgtatataaagtcttaacccattgtggaataaattaagtgctcaattaaatgttagctgctgctattaataacaacaataataatattttcttcacgcatgaaagtgcaaagtgatgcttacttttcttaacctctccaactggctgaaagaggagctctagggcagatgtttatcagcctgatttcagtggagttgcaatgaattctttttctgtcttcatatgtctggactcctacattttaatggatgtgtatttagtttgttgattagtattttccagtgtagctcatattagcactcaactgtcatttgaaaagccatcttaactatttatgtgattgctttttcttttgtatttacaaagaaatacactctgcatatattttggaaagatgattaagggattagtcatcaggaacagcaagcaatggtttatatcaaaatgattattgagaaagcagagagatgaggggtaaaaataaaagatttattagccagaggtaatggaatgtgcatgttttagggagagagcgcatgctcagttgattgcaaccacacggtttgctgctgaagtgctgtaatgattcaggttttcaatagagttgatatcgggtctatttattttgtgggagtgaagggatagggatagtactgacagcattatgtgattgcagcctcattgattagcatcggaaataatgactttaacattattttcagatagggagcactcagtaccaaccattatattaggctcatgggctcaacattttgctgtgcttttcatagatactgacacctgtgttttcattttgttgttgttgttgttttccctgccgggaaactgccgcatcctgtgttttcatggcatgatattaaggaacgatgggtaggatgctgaggagtaaattgctcgcacttttaaagacttctgcaaaactccacctacttttaggctccttaaaattcagtgactttatgagctggtatagcttcactgtttgtgggaattccatgcaatctcctttgacactaaaagcttaagtcccatgatttgcctttgtggatggaaggccttggccttcttttatgatatatgtgttggggggaggcatgtggtatgtggggcgggtaaaatacgagcctcatgcctgtctaagctggtgacttggcttggaaaagatgatcattcgtcaacgcatcacaagtcacagggcttatctccattgttctgaacgatctgtagctaaacaaaaagataaaagctattaatattattaatagttgtagattaccgggaagagcgcatcctaaatcagccattagatttgttcctcatttctttgctttacaaattgtttttctgtatagtattggattttcaataaataaaggatgatataaacaagtctgcaaaccagcaagaactatataagccacttgctcaagtcaataagcgcatgctcacaaaggaacgtaaagttctgaagttcttctttggggcgtttgcaaaatgtcctattattgtcacctgcaggtggggggttggatattcctatttgtctttgtactaggtactgtgcttagcatttaacagtaaagtatttatattatgtgtgaaacccattgtgcagatgaggcagtttagaggctggaagaggcatagactttcccaggctcacacagctgggagataacggggtggatccaagatttgcagctggtgtgtgggtgatgccggaagattggcctttttcaaggacttagacaagtattgtactcatacattatttgcatttatttgtatgaatacttctgggttcctaatatgagggtacctaaaaagtacatccgctgcgcttcttgtaatctgagggagttgatgaacatgggccaaggaagctctttccttcgccttccgttccagacttccttttcgagtagtatatcgtgtatttactgttctacttcagttgcctatttgacctttcttgtcacaggctcagggaagattctttatcagataataaattattcatccccctcatagacataatcggttgctaaaatattctgagtttcctgtctccagaatacctaaaacttgtgcttggtacttatcctctaagttttccgtttcatttctcattctgaaaattttgcaccgacttagtcttgaatgttattcattgttctttgatcattgtctttgtgtcttctccttttttttttttttcctggccaccgctcgcagtcttgaaccgaatctttcaaactttatatccatgtaacctttgtataatgagggctgtgattaactgcagagttttaaagagtgaaagtcaagcataggtggctggctctgaaccatcactcccaataatgtgaaacccaaagcagatgcatcctttcattaatgtggggtcccctgagttcttattaagcaattttgacatagtttgaagagacggatttcatgttcagacagtgttcagccgccaatggctgaaaggcctgcttttggccacttggcatttagactccattatttaagaggggaaaaatatgcctgagactgtttttcatatttattgtgggacatttagagaatctcagactagcaggtgttagattaaacagaggagaaacggtccttgtggtgataaaacttccctacgcaaggacaagtagagaaacaactgtagatgaagcagccagtctcaggctggggcagcacgccctgcgataggttaaggtttattttagacaaatatttaaaatgcagctaatttttacatatgcagacgcaacccagtggaatagaggtagccccagctttggagtcatacagatctggggttaaatcccagtgtgaatactaactcactcggtgtccctgggcaaatctggtcatctctctctctcttttctttttttgagatagggtattgctctgtcacccaggctggtgttcagtggcacaatgatggttcactgcaaccttgacctcctgggctcaagtgatcctcccatctctgcctcctgagtagctgggactacaggcttatgccaccacacctggctaattttttttttttttttttttaatgtagaggaagggcttcaccacgttgcccaggctagtctcgaattcctctgctcaggcgatcctcctgcctgggtctcccaaagtgctgggattacaggcatgggccatcgtgcctggccttagtcatctctttgaaccttggctgatttacctgcagatgctaatatgactctcagattctggcacatagtaaagattcagtaaatggtcgttgcagggaaagctaacttgtccaatgcagatctgtaaaatatactcataaatcttgttggagcaatatttcttctttgtcttacttcgggctaataacaaaaatatcatacaatgagtggcttaaatatttattcttacagttctagaggctggaagtccgagacgagggtgccaaccttgttgagttcttagtgaggtccctctttctggtttttaagtagcctgtttcttgctgtgtcctcatatggtggagagctgagaggaattgagagagagagagagagaggtcgcactgtctcatgtgtcttgtaagggcactaatcccttcatgaggattccactctcatctaatcacctctgaaaggccctgtctccaactaccatcacatgggcaattagggtttcaccataataattttggagggacactgtattagtccattttcatgcttctaataaagacacacccacgactgggaagaaaaagaggtttaactggacttacagttccacatggctggggaggcttcagaatcatggtaggaggcgaaaggcacttcttatatggtgtcagcaagagaaaaatgaggaagaagcaaaagcagaaactgcctgataaacccatcagatctcttgagacttattcactatcatgagaatagcatgggaaagaccggcccccatgattcaattacctccccccgggtccctcccacaacatgtgggaatcctgggagatataattcaagttgagatttcggtggggcgcagccaaaccatatcagacacaaacattcaattcacagcattctaccccagccctccaaaattcatgttcttctgacatgctaaatacatttattacatccaaatatccccaaaatcttaactcattccggcatcagctgtaaagtctatgtctttttaatttttttaaatgatcaaagcactgggaagtagccacttctttcctcagcttcccaccaatgtgtcaattaataatctgactaaggtggccgggtgtggtggctcacacctgtaatcccagcactttgggaggccaaggcgggcggattgcctgagctcaaaagctggcgaccagcctgggcaatacggtgaaaccccgtctctactgaaaatacaaaaattagctgggtgtggcggcatgcgcctttagtcccagctactggggaggctgaggcaggagaattgctttaacctgggaggtggaggttgcagtgagccgagatcaggccactgcactccaatctgggtgacagagcaagactctgtctcaaaaataatagtaataataataataataataataataataataagaatctgactaaggttattaaccattaaggtatgctgtgctaaggagcagggggccccttccatccgtagagggcagaaaggtgcctatcatgtcttcagtgtcagtgccctggtatggagctagctggccttccacaggttctggagttaatgctggagagaagtaggggtgtcagagcctaccctgtgttcctaggggggttcatctggagctagtccctgacccttaggtggaagatgcagctatgcccaaggttctgaagaccctgtaaaaggaagccttagaagtggctgcgattgttttaaagtctgtccacaaattctttgataattctcctttcaagaagtagaggccagttctcctctcttggaatatgggctgtacttagtgactcactctccatgaatagaatttggcagaaatggccgggtatgactcctgaggtaggtcctaaaggcttcgtggcttcttcttgctcactctcttggatcactcaccagccaccatgttgtgaggaaactcaagcagacctgaggtgaggcccatgcaacaaggaattgaggccaccagccatgtatatgatcccccttggaatcctccagcccagtcaagccttcagatgactgaggccctggctgattcatgtcatgagagatcctgagtcagaaccacccagcagctaagccacttctgaatccttgacccacaaaatatggtaagataccaaatggttactgttttaagccactatgctctgggggaatttgtgatgtagcggtagataactatcacaggatccatggcctcaaggggagaaggatccttaagagagactggacagtgagttctaaggataagacatgtatacttacccaggaagctccactgtgtgcaaggaatcctaagttcccggggttgcatccatctcccaggtcaccttgtttgacctctctccaacacttttaaaacatacctgatcaggaatcaccccgctttggcataagttcctctctccccatgctgcccatcccatttctgcacacctcttaattagtaagttctccctcatattgaaggcagaatcttcctctgagcgtcttctatgcaccggccctggtcctgccctccgagttccactggctgcattctcatcagaacccagctaaaactcacgtctctcaaattccctaaataataaatccaaagttattgaagatattgggatactaaaagttggcagtgagactggccccactcatttctttgtaacccctgtccctctttttattattgaagcttgggatgcacttggtaaggctaggcagctggagagcgtgcagactcaggagccaagacctgccttgccttccctggagttaatgaatcagtgtgaatgaagagcacagtcttcttttaaatggcaggggaaccatgcacttatttaccggcaattctcagattctaattgttccgactacaatgcgtcctgtaaaccgggtagctgggagaaacttcaatgcatctttgtaatggctttgttgttgtttattgagagggactaattaactttgattattgcactaatattatggcactttgacagcccttcagatttatgactctgggaaaataaacaaatgaaatgcaggtgctggagcagaaagaataagttattactgaactttaattacttggaatgcgtagccaggagagaattagttgatgaattacaggatgcttaaaatctacatcaaattgcaagcaataagaagataaaaataaaaaggaaggggcaggaagggtgctatttttaaggcagggaaggataggatgcatttgcagtggtctccgtggtgtttcattgattaaactttgtggtctctaatgctgcagatatgtacatggtgctactcaaagcatggtccctgacctgcagcatcagtgtcacttgagagcttgttggaaatgcaaattcttgggccccaccccagacctactaggtaagaatctctggaggtagggcccagccatctgtggtttgcagttactccaggagattttgatatctgcagaagttgagaagcatggctcaacagttctcatgcagcttgctttttcttttataaaagggcgggtacacatttttatctttgcttatgaaaatcaaatgttttcccaacccagtttaccaagtagctcccaaattttcaagctattttaaaaattggctgaaatttaaaaattttgggcaattttaatttatccaacatctattacgtgctaggtggtagagtgggtgacacaagatagtctagaaggattttgctaatgaggtgatacccctaaactgtcatcgatgccagcgcctgggtagtgtggtaagagtgatactcccatgactcatgaaagatggtctccccacgtgctttaaagcaggatggttgcaggagaaagtattggtggactgtgaacagcccccatggcaagggtgcatctggagctggaggaagagcatccacagagtgtaagtagtttgtcctgggaatggagatgtcaggcttgggtgtggtgtcggggagagggcaggcagctcctctatgaggccagatcattcggggccttggattccagtcttaggagaatagactttattctctaggtcctggcagccatcactggctgagtctgagtggtggtgatacagtccatactcagtgactgagatagacagacatttgggctgaattagcgaggggagtgcggggtctggagactctgttggcctgttggccatggtcctgggcgcaaagagcagaaaaggacgagacggggactgaacagacttgcttagttcctgacattcaaggaagaactttaacgtccatccacggagcctcaaaggctaaaaataatcatccctttcaatagttcctgttgtgaggaccattaacaaattataagagaaagcattcctcacttgtagaaactccatgaaaacagacatgtgtttacttatctgcaaccctgtgttaggaggagggtgatgagacactttactgtttgaatcaggaagtgctgacagtgaagggaggagctcttcataattatacccggagagcaggcaagacagccacatgcaagtggcctggcctggctgggtttggtacagaggggattagggcagattcaaacctcactggtcccccgtcccagcacttctgtgctgtctgcagttactaagcacttttcctgtttaagttgttgctgttttcattcccgcaaaagctcagccagcctctagcccaaaattgtctctgtttattggacagttggaaatgtcactgtggccccacagaccttgttgtcaagcaggctgctacgcttttattctagagcgtctttcatctgatttcctccaccatctggaaccttctggattcttcctcttatgggtagtgatgggcactttaggagtaggaatacatgtcagtgctagaccacatcctttcatacccggaattcgcatagtgacatttaaaaatagatagcaggccaggtgcggtggctcacgcctgtaatcccagcactttgggaggccgaggcgggtggatcacttgaggttaggagttcgagaccagcctggcaaacatggtgaaactgtgtctactaaaaatacaaaaattagccagttgtcttggcgcatggctataatcccagctgctcaggaagctgaggcaggagaatcccttgaacctgggaggcagaggttgcagtgagccaaggtggtgccactgcattccagcctgggcgacagagcgagattccgtctcaaaaaaaaaaaaaaagtaatcattttagaattgctttctcttcgggatggtttacctcgtgtttagtctgtaaacgcggataaccgagagctggtcaaatgtttacatggggctgtggaccattttgtatcattggaggagaagccagggcacttggcaggggtgttcatgatgataatcaggtggctgggtggagtcaccatttgtggcatcctcaaagacttgccaacatagacatttttggggagacagaaacacagaaataattctgcagtgctttaaagaatctgttaaaaatcaagtttctttcagtcatgtatgatccattgggctttatataacttttagcctttgctttgcagggacagcaaagatgtgagcaaatttgtgcaaacctaatagggtgaaaaattgaggtatgaattagtaaagtcatttgtccttctggaaagagttatggattaacagattacatttgggtatattgtggttgtgaaaaggtaacattctcagattggaaaggactttctgagatcatccaacttaactttccccacttgacagacaagaaaactgaggcccacagaaggtaacttaggcaattaattaattatagttaataattaattctgcctgcagaacaggaatatggcccccaacgcttcatgcttaattggatggcttattaaattcttatttttatggtagtgatgatgatgataataataataataacagtagtagctagcattgttttccagtgctaagcactttaaatgcattaattcagttcatctttatgacaacactatgagatagctaatattatgaatcctattttcagatgaaagactgagtcttagggaacaaacagccgagagatgaaatgccacagggatgtctaggttcaaacagcaacagaggtgcgtaccatagggatgtggaagccttgcttgtcttgttcctcttggtataaccccagtgagtagcatagcgcctggtcaattggagggatttggtaaatatttactgagtgagtgagagggtaaaacagctgagccatgggagttataacttgggcagcagtaatcctgccattgtaggaggggacagatcggctggttagtttttggaaagcagaccagcagaagttgcaaataacttgttgtgttttcctaagtactgagctgtgtgaattggtttcatgttgatgttactgaagtctccccaattcatcatctaccttgtagcttgttgaagaaagagtccttatttacagtctattatgttaaacgtattttattccagttctttgaaaatgacccatcctgatttggaaaatctctaacttgcctggtcattctggagcagtgggagccgactgtgatgcagagtggactcataatccagcttgattttgagggacagaaacctgggcctttaggtagaatgaacagcttaaaaggctgcacctgagagtagggggcatatgggtaaatccagctgtacccaagagttgggggcatatgttagccctactgggtaaatccagctgcacccaagagtagggggtatatgttagggctagtgcgtaaacccagctgcacccgagatatggggtatacatgagtgctattgggcaaatccagctgcacaggagagtaaggggcatatgttagggctagtgggtaaacccagctgcacctgagagtaggggtatatgttagggcttgtgggtaaatccagttgcacctggcagttggggcatatgttagggctagtgggtaaacccagccgcaccggagagttgtgggtatatgttagggccagtgggtaaatccagctccatctgagatatggggtatacatgaatactagtgggtaaatccagctgtacacgagagtagggggcatatgttagggctagcaggtaaacccagctgcaccccagagcaggtgtatacatgagtgctagtgggtaaatccagcagacgtccggactgtgcttgagggtgtcatcgagagagagaaggttgatccgaagttagtaaaggctttaaaaattaaaaggcctgagatgatggtagggttttggaggtaagtataaaaaccttcttgttttctactacttaaagctgaaaacccagcttgggttggctttgcttctaatatccttcttcctttttgtttcataagtaattgtcctgaagcctgtcgagataaatgtatactgaaagagaaagacacagaggagagacaggcatacagagaaagagagacacgcagacacacgaaggggaggtggagacacggaggagggacagaaagacagagagagacagaaggagagagagagagagaacctgtctagcggtgtttttatgaggtttttagtgctgggctttgcatcgtggtgacggtgtgtgtgtgggggtgttgatcactgttttcagtgttctctgatcatttcttgcttagaaaggaggaaattagaattgttgagctatgatttgttttaatcagaaagaaattgtctaacataaatctcttcgtgagctctggaaaagcccctaaagcggccaggaaaaaaatatcaatactttgcaaaggaggaatgattgttccaattcgtggcttaattgactttaagccttaatgaaactaaggccggagcgggtggcacactccgtggctgggatccacagtgaaatctacgctgggagaggaggaatttagggtggtaatttggttctttgctattgacgaaattttctaattgactggggttacttaataccagataatatttttttcttgctataaagagagtaaatttgtttttttctgaggaacacaggaatttattttaaattacagctttttctattggaagcattcatttatgttggattattgttccctgagtgaaatttcactgatgctgtataattaaatatagatttttttagagatagtatatattttagatgtataagtggataaactggaggtatggaaggtctttatttaaggagaataaatagcccaccccatcaacatgatggcccttggaaaggactcttttagcctccgcgagttccttttccgcaccaggctccacttacgaaggactgcaaaaacttgctaacgtcatcagtctgaaaggattgagctgtaaaatgtgttatgggggcctaagcaacgcatctggaatttagccttcccaagttcaaatccggtttatgccacttgcgaaaaccatgtgaccttcacttgttcttattgcctcagtttcctcatctgtaacttggggatgatgacagtatttggatcacaagattgttgtgaagatgaactgaagtgctaatgtgaaatgttcatgatggtacccgagtacttgcggtggtacctagcgtgtgctttccaagtgctggcaaagaaaagaaaagaaatgcttggggctctgcctacctgtctaggctcctgtctggccattctctttcttgttccaaccatatcaaactcactgctgttgctaaaccttcctgtctctctgcatcttggcacagactatgtcctctgcttggaagggtctcagctaagcttttcctccccacatctgcctctgtatcctgtgagtctctgttcaagggtatctttcccacaaagctttcctgggcttctctttcctgtctcctgccctcccttccttcttttgttcagcacatcgctgtcaaccttcttctctgggtcaggtagagcactgagcaccagtgatatggcagtgataaagaaagcaaaggttctcactgggtgtggtggctcacgcctgtaatcccagcactttgggaggccgaggtgggtggatcacgaggtcaggagatcgagaccatcctggctaacaaagtgaaagcccgtctctactaaaaatacaaaaattagcagggcatggtggcgggtacctgtagtgccagctgcttgggaggctgaggcaggagaatggcatgaacctgggaggcagagcttgcagtgagccgagattgcgccactgcacttcagcctgggtgacagagcgagaatctgtctcaaaaaaaaaaaaaaaaagaaagaaagaaagcaaaggttttttcctcccaagaactcatggtccaagttttggtttttaaatatgcatctatgacagcacggatcacatagtgcattgattgtttgcctgtaggtctccttatttagtcaacaagcatgttttgatcctttattctataccagccgtcccactggactctcagcacatataggtatgcgagacgttgtccttgccctaagtgtggagacagacacgtaaattaatagtaataataatatctaccacccactaggggtctatgtgtgtatgtgttgggggcggtgtggctggggagggaagcaaggcctgtattatggcccaagctcaagaatattcgggcaagagcagatacaatgcctgtatttctcatcacttttgggtggcataggaccagttggttatgagcgtgaaaggttttctttgactttggtggtctagttagtggttgagaacatggattttggaatcagcccggtggaggttggaatcctggctgcgccgttctgtagcagtgttgtggatctcagacaaggtgttcctgcatatgcctctctatcttcctacaagaaatggaggtattgcatccccgaaccgtaggatgcttgtcaggattaaatgagataacagtgcctggttagtggcacatgctcagtaacacctgccaagtaccactcactgagccgaaatctcctgaataccaccccttcatgccttgcacatcctgggttctaactcattgaggtgcccccacctttccttcttcccatcaacaactcttgtgcccacgagggactggcctcctcagtgccacacagagcctcccctgagtagatttgtgtcattttcaaacaaagcatcctggctgcagtgttggattttgtaggatggtgaccgtttacagaaacctctggtccgtgagccaatttggagaaaattgaatcattctctgtgcctttcggcttgcatcctaaaagcctgcacaaacactttgggcaggcttcagcaacttcacatcaagggctcaattgcagctccaatataaaaacctcccccgttgctctctgtgtgtgaagctggattccatgcttggcacagacctcggtgctcacggtaatgcttccttccaccatatcagaaggtcctcagcagccgcagccacttaacatgctcggtgcttctctgtaggaggatttttaaaaagcaggaactgtcagggtcccaaatgttcagtggcacttcagccagaggtaggatagggattttgaagtgtttggagaagtgttttcatatttgaatttacggggatggggtgggctggggtaggcaagggacagactgtagcgattcgcttggtgttttctcatgatgccagagaaaatgacctcattatcatcatgctcacattcacctttgccaggacccctgtgtagaaataatcatgaacttagtgactgacaatcataagcgttttatgatttgtggaggatttatatgtgaaggaaaatggatgaattaaaaatattaaacagcttagccggcacccacatggatgaatcaccgagatctattttttccccgtttatactataaacatatggcatgaattttctgctctcattacagatgctgagagaaggcaaagacaaatatttatattacattcatgttttacagtaaaaacactgttcggtttgtttacacagttccactgttacagtttttatggtcggtaatgcaaccaccgtaaaagcaagtctgggttatatagcagatgtgataagccctcatactcagagagatgtctgggaaagaatcgttgatgtcacatgtacaggatcaacaatggaattatgtgttgggacagtctaagttatgctgtaataacaaccaacctcaaaatctctggggcttgaaacaacaaaggtttatttcttgctcaaactgtattttcatcatgagttgcttggagggatctgtgagatggggatctcactcagccaccggggcccacagagcagcctgcactgctggatgttgtgacagaggaagagagggatgtgctgaccctcgctctggctcaaaagtgactcctgccatctctgctcacattccattggccaaagcaagtctcagggccaaggagtgggcagtagtagggtgctgtgtgtgtgtacaaacccaccatatgtgcatagagggaggccgagaactggactatcagagaatagccaaagatttctttccacggtcatgtcaagcctttttgctgttatttaattgatgttctatttttaatgcaacatggaatcagaagaatatagaacaggcgtcaaagaccctcccgcctctgtaaccgcactgtttaaaattgatgagactctgtcttcattcgaagatgatctgataggaaggattcacagctttccccaagaatacaccacagtgcatacaaatcctcgaagccgcagaactttttcaagttgaactgtgaactgtgatttttttttttttttaagtaagtttacatgtagaagctcattggtagagagctttagatatattacttcccagggtggtgcatcctgtcaccatgaagtaggcatgaaatgctggagatatgcgttcattcaaagaaaataaaaaggcgcaattatgaaaagctctcaaagtgactttttattttattttttatttttacatggagtctcgctctgttacccaggctagagtacagtggcgtgatctcagctcactgcagtctccatctcccaggttcaagtgattctcccgtctcagcctccagagtagctgggattacaggcacccaccatcacgcccagctaatttttgtatttttagtagagatgggtttcaccatgttggccaggctggtcttgaactcttgacctcaagtgatccacccgcctcggcctccgaaagcgttgggattacaggtgtgagtcagagcacccggcctcaaagtgactttaacagcaacttaaaggcggtggctagctctgccccattcagtatggtagccactggccatgtgtggcagttgagtgcttgaaaggtagttagtccagattgaaatgagctgttgatataaaataacatgactcccaggtttcagacagtataaaaaaatcttaattaacatttttatattagttccatgctgaaataatatttgagacatactaggttaaataaaatatcattgaagttcatttaatctgtttctttttacctttttttttttttgacacggctcctggaaaggttaacaatatgtaggtgaccctttattttcatcagacattgccgacctagagggtaaccactggagaggaaaaaagtacaatttggtatttttgtcacaaatccttaattgctagaactcacagtttaacctgacagttgatcaattgatatcctttgacttgttggaattttattctttacattcgtcttttaaaaagctttattttatgccagatgcagtgcctcatgcctgtaatgtcagcactttgggaggctgaggcaggtggatcacttgtggtcaggagtttgagaccagcctggccaatatggcgaaaccctgtctctactcaaaatacaaaaagttagccgggcgtggtggcacgtgcctgtaatcccagctactgaggaggctgaggcaggagaattgcttgaacttgggaggcagaggttgcagtgagccaagatcgtgccactgcactccagcctgggtgacaaagtgagaccctgtctcaaaagaaaaataaataaaaagctttgttttaaaataagtttagattctcatagaagttgcgaagaatagtctatagtattcttcacaagggttctgggtacccttaacccagcttccccagtgatagtcacagcataacaatcaagtctgggaaattgacactggcatgataatattaactaactacagattttatccgagttctgctagtgtttgcatgtactcatttgtgtgcggctctctctgtgtgtgtgtagttctatgaaaagttataacatatatacatttggtttaccaacatcatagtcaggatacagaactgtcccatctccccaaagaaacaccctttaccttagtttttattctttgagttatatcttaaccaggttaactgagggtaattgtcttaggcaagttagtaccaaatgatgctcttggttccttgtctgtctttttgcccatccaacccacccttcacacatggccgagttatgccaaactttgcaagaggtgccaggtgggcacaaagaaaagaggactgcactcaaggaacttagtctttgaggccaagcacggtggctcatgtctgtaatcctagcactttgggaggctgacacaggcagatcacttgaggtcgggagttctagaccaacatggtgaaaaccagtctctactaaaaatacaaaaaattagctggccgtggtggtgtgcacccgtagtcccacctacttgggaggctaaggcaggagaattgcttgaaccgcggaggcagagattgcaatgagccgagatcgcgccactgcactccagcctggtccacacacagagtgagactctgagacttcgagactctgtccccaaaaaaagacgcaaaggagctcagtctttgaagggttacagaaacagtttcactagaaggtgtgacattgtgtaacagaaatcggttccttaacctgccaaagggaagaaaatagtgcggaatcttttctccaggtttcaggacccatgtctgttgtccttcctttaccttaacttcagcagggcaagaatggttcaagccacattagaaagcagttactttctcacccaattttaaaggagaaaggtagatgcggtgggttctagggatttcagtgacgtaacaggtgtttcccaggcattaagacctagtaaggtttccatttccattaggtattatggatgcattccaagaatttaattactataacatcacttcattcattgtaattccttactagagttatgagaacttgggattgtgtggtttcttattcaatcgattaaaaggtacttgctatagttttctaactagctatttatatgaaatttagtacttgtcaatatgtattaaatcaatacagttatatttatcaaagtggtgagaagagtttacatctgaacatagaatagattgcttgccttggccgggcgcgggagctcacacctgtaatcccagcactttgggaggccgaggcgggcagatcacgaggtcaggagatcgagaccatcctggctaacacggtgaaaccccgtctttactaaaaatacaaaaaattagccaatgtggtggtgggtgcctgtagtcccagctactcgggaggctgaggcaggacaatggcgtgaacccaggaggcggagattgcagtgagctgggattgtgccactgcactccagcctgggtgacagagcgagactctgtctcaaaaaaaaaaaaaaaaaatagtagattgtttgcctcagttgggaaaaaataaagttttaaggctctagaattggagtgactcagctttacttgaaaaatcccagaatagtaggaccatcatttagaagtttcgagacgataatattagggaaaaataacagcaaatgttacttgatagacactaaactctggggcatatgagatgacccaggctggaaaaccactggcttacataaaggtattgacagacccatgggtgttaagatccttcatggctactggggagaaatgacaggccttttgaaatcgtatcagtggttttccctgggatcactggaaataatacccctgtttgacaagatatgacacatgctctgttttaattctgcatttgactaacagaaaagattggtgaagatcagactctgctttaaagttattgaagcagggtacaaggaaaaggggaagggaatagaggctgcagaggagaatgggggaagggggcaggaaggtaaaatttggaggtgcaggcagagtcaaggtcatgcctgaggcccaaccttcctgttgaagctggtgtttgattcaagctgtggctgagaacgtgcagctcatctggagggtagagttgcaagacatgggttcaggtctgagccaagccagaaactggagaaagcgtggcttctcaagactaggaatacctagattccagaggtggcgtgggcatggggcacattgtgacaagttaacagcaagatcttcagagctgcagctcacctgtgccacgatggtctcctaggagccctttcctgctgtagtcccgccccgaggggtttcacttcccactgcctcttggtagccgtgggcactttggtgctctgatgatgtaacatggagattgtccttgtctccatcgctgtctttactggtgtatgcccatgaggtatgtcaaagtctgtatgtctttgtaataatgctggatcatttgtccaccttcagagacaactgaagacagttttaagtgaaaccacacagagggcatataccattgggacaagaggtctgaagtctatttttgagaaagagaagagatcaagtagttaacagccagtggctatcataataatggcacctaaacaaatccttcttttttattttatttaattaattaacttatttatttttgagttggagtcttgctgtgtctcccaggctggagtgcaatggcgtgatcttggctcactgcaacctccgcctcccaagttcaagcgattctcctggctcaacctcctaagtagctgggattacaggcacctgccaccacgctcagctaatttttgtatgtttagtagagacgaggtttcaccatgtttgtcaggttagaccggaactcctgacctcaagtgatccacccacctcggcctcccaaagtgctgggattacaggaatgagccaccacgcccggctcaaatccttcttacttttcctcaagaactcacttcccacccaaacctttcctattgtggcagctgttatcttgtccagcacatgtgtccacacttggtattaatagctccatcttaggaactatgaaagtgaggggggtggtggtaatttgcatgaactggtttgggccagttatggtctgttacatccttgctgaaatggttggtgctaagatgagcacttggcttaggccagaccagtccctagcctgtggagaaggggcaatctcttatctgaaggcctaggaggtgcagggatgtttatatgggctgctagcgcttagtttcctgccacagggagacagtaagaaaggtgacgtcaatctgagatgagagagagagcaaaacagttcttttgaccaccttgaccccgaccttgaaataaggtggaactaataaatcccgctttgtgctggagcaagttttggctgagtttctgtcacttgcaaccaaatcagtcctatccagtatacctagtgactctctggtctccaaaggctatgcctgctgggtactgagtgtctccccgaccgaccccatgatggctacagtgcacatcccttccagccaactctattgtgcacacatattcgtagggtgagttgggccccaggtagagtgattggctcagatcctgcatcctttcagggtctgactgtaatcacactggcatggcagggggaaagtgtattggatttcagagtcaaaaaccacttggtatgaaacccagctcattttctatgtggatgtccaacctgagccagataattaatcttggagatgacgctgcatacttcatcaagttgtaaagttgactgctgtgataatggagaatgctggacaggctgcttttcatgtcatgggttcgctatactttagttcccattatatcatcctgccaatccccatttgttgtttttttgggacccagggtatcagtcatctgatcattgtgtgactttctcaaggacctttacttgagtcttgcacctctggtccacaatgtccacataccagcttgatggtgacttgtgtcattctccatccccttgttaagagaaaatctactttatgagccctctttccaaccgcagtgttgaggactagaccaggcaagatgatgccgctggaccactggatccagctggaccgctagaccacagagcccctggagcctcccaaggccaagcccgccagccacacacacctttgtgagaattaagaaaagatgccccctcctcttggggcccacagctcctccacctgggcacccagcctggtgaacagggtgcaggctgggatttagccctaccttgcttttggaccattgagctactaagttggagcaacaaggcttgggaatttttctttgatcataggtaggaaaggtaaaaaaacataaatctgccaatagaaaatagcatcgtaatgagtttctactatatttgtttgggctttgaaaaatatgccgccacaatatatcaatgtatggtcccaacgttttaggaagttgcatttaaaaaatcttggatacctgttttgtacatattatatatagcatcccgtgtgaatatgttaattcctttttatgagtttcggtcttttttccctctcctatacatgattgctgttttatagctccagtttggtggaattaacatagatttcccacatggggaaggttttgggtgaggatttagaacaaggcaggttcttgatcctcggaagagattcttatctgagaggggatttgagaatggcattgcagagtgggaggcgctgctgtgtggaaaaatgaactggaataattattagaacagttctcagaatttacaggatatttgatcataggagtaactttcctcaggagtgatggatggaatgcctgtacttggaatatttttaaattaatctattttcattacattgaaagtatgacacacagagaacactaaaattggatgaggcactacctggaattatataaagaatgacaaagatgcggttatccatttattttctaggcaagttagttagcctctctgtgtttctatttctttgtttataaaagagggacaaaaataggacctattactatctaggtgacaggatcattcataccccaaacctcagcataatgcaatatactcatgtaacaaatctgcataagtacccccttaatctgaaataaaagttgaaattattaaaaaagaaaacgaaggccgggtacggtggctcatgcctgtaatcccagcactttgggatgctgacgcgggtggatcacatgaggtcaggaattcgagaccagtctggccaacatggcaaaactccgtctctactaaaaattcaaaaattaggcttggtggcacgtgcctgtagtcccaagctactcaggaggctgaggcaggagaatcacttgaacccagtaggcggaggttgcagtgagccgagatcgcaccactgcactccagcctaggtgacagagtgagactccgtctcaaaaaaaaaaaaaaaaaaaagaaagaaaacaaaaacaaataggacccatatccctggattgttgaggaaatacgtgaacatatgtggcacacattatagtgtctggcatacaataaatactttgtaatgttactggtgtcttcttaccgttattgtctcactggtgaccgtttgaaatgttgaagctttattgttacagataatggtggatatagtctcttccttgtttattttttgacagaatctttttttaaaaaagtttttatttgtttggtgagaatttacttgttacaggtctagtgctgttatagttgaatgttttgaattatgtaacttaagtgaaacataaagctatgacttgaattttgtggttagaaattttctcagtcgattgacaaggatggcgtattggccaccttttgccgcagtaacaaacaatcccagactctcaaggcttgcaaaaataaatgtgtgtttgtttgctcataacacatgtggctgagggttggccgtggctccacagtcacgggtgggctttcctgggctcagcttctcacagcgtctccttgcagggcccaggctgtaggagatgtcatcagggcctgcagagggcaaaacctcacagaggcttctgttcatacattgttgtacctcatgtgtgcgtcatattgtcatatatcaatggcagtagccaagaccaacagccaagaccaatgtattctgcccacaggaaagtgaggcaaaggcagggagggaatgataattgtgaacaaagaattcacttgaccaaagatggttttcttgatatggttgccacttacctttcagtaaaatagcacttcacaaatttgtttaatgttttatctcaagctcccagaagtagctaaaaccacgaacatacatgttgaaaatttcaaaagggaaaaaagaaaagaaaggcacatctgagtcaggaaaacattaactagtcttatttctgagaatcaaaccggtggtcttttcagtgatcagtcaccccattaaccacacatgaatggcacaagtaggaaatgcctgcttcaataccaagaagctggtcttatttagatctagtcttatatcattgaaatatcattagaattcttatggaaaatatgttttggctgtttaggggatgctaggggctggaagtgagaaggtttcaacaccatatgggtatgtgagtatagatgcttacaagaagaagggtagacttagccaaaactaatttgggatttttgtttgtttgaattgttggagggtggatgagagtgaagacatatccttttgaaacttaatttaatttttatttattattattattattattttcaattttttatttttattattattattattttctattttttatttttattttttgagacggactctcgcactgtcgcccaggctggagtgcagtggcgtgatctcggctcactgcaagctccgcctcccgggttcctgccattctcttgcctcagcctcccaagtagctgggactacaggcgcccaccaccgagcccggctaatttttttgtatttttggtagagacggggtttcactgaagtagccgggatggtctcgatctcctgacctcgtgatccgtccgcctcggcctcccaaagtgctgggattacaggcgtgagcaacttaatttaattttttaaaacaatatatgtctctttggagtcagggtgtttgttacagtgatgttttgcagacaggtttattggaactgcttggtaggtgataggtttttctttctgttttttaattaaaaaataagattggccgggcgtggtgtctcacacctgtaatctctgcaatttgggaggccgaggcgggtggatcacctgaggtcaggagttcaagaccagcctggccaacatggtggaaccatgtttctactaaaaatacaaaaattagcctggcgtggtggtgggcacctgtattcccagctactcgggatgctgaggtgggagaattgcttgagcctgggaggcagaggttgcagtgagctgagatcatgctactgcactccaggctgggcgacagagtgagactccatctcaaaaaaaaaaaaaaaaaagatttatgtcaagaattcacatttctggcctctcttaaaaatattggaagacatggcaataattatctgggactgaatagcagctgcttctttttgggacaggtgatcacccccaaccccaaacccctacccttaactcttctactcctttggatgttatccctgcctggtttaaccatcaaccctcttaactcccgatccttttaaacttcctctactctttttattcttagcacttagaacccactaacgctctatgtaactgtcttacgtgttccatttcttgtttctagactgtctccctccagtagaatgtgcgttctgctatacagcagtgctgtgtgacgcgatagcaggtcctttttaaacatctgttgaaggagaaaatgaaggcacacgtggccttgctgacatctgagtttgcaacttcttttatgccttctgctaactgggaccccagtgggcttccctgctacaccctctgaggttccccagtcctgccaagctgttccatccccagttccttggtgcctgctggtacttcaccctggagagcccagcccttccacttgttcagatctcagtctctcatctgggagggacagcttgagcactatgacctgtgtgaagcttttcccagtgctggcagactgactggaacctgctccttcattaaacctgacagatgcctccacctggcagttctaccctaagaccatgaacttcttgagggagggagatgtgacttttcatccctgggacccagcagctggctcacctcctactggttagtgggtgatgattggatggcttccgaatgaactcaggtgtcttaagtaccgttggtcctgacaccatggccaccttccagaaatttccacatgttaagattgcagatgcaggctggacacattagtgatttctaagtgctaagaaaaaaaaagagcggctcacacctgtaatctcagcactttgggaggctaaggtgggcgaatcaccccaggtcaggagtttgagaccagcctgagcaacatgacgaaaccctgtctctactaaaaatacaaaaattagccagacatggtgctgggcatctgtaatcccagctagttgggaggctgaggcaggagaattgcttgaactctggagacagaggttggcgtgagctgagatcgcaccactgcactccggcctgggtgacagagcaagactctgcctcaaaaaaaaaaaaaaaaaaagaaaaaaaaaagattgaacatgtggaatatgagacaaatgaaaaagattgaattccgttccaactgggcttttgaatttattttcgcacttcctattttttgagcccgggagtgcaagatgtaagctaagaaaagataagatgaaagtattgctctaacattctggcttccttctattagagaagaatgcaaatctttgccttatctcgatgatgggccccacttaaccctttgttttactgagagcacttttctgcagatgatcaagtggaatttactatgatggcctgtcaaatcttgaaataatctacctttaaggaagaaaagtttaactagatgattgtaccttttagccatatctacaattaatttgaatgtattgcaagctgtttaaaatattccattagtgaagaaggtaagcctagcttctggtaaatacactactaagtgtttatagtacatttcatattttacatgatttcctttataattctgcttatcttttcattctaattccctgaaggacatataaaagaacccctaaagagagtaattactgctgtactctttaaccaaggctccttttgcaaagagaaatctgagctgctttttaaagaaggccgtttttaaataaaaatgcaaataagctactttgtaaccacattaattacccacctagcctcttattaccatgtttgtattgtttgcaaatactatttacagtcgtgtggaaattaacattactggtcctgaggaaagattgtgttggggaggttgtgctttggaaccaattagggcgaaccttgtctccactgagactctggggaaaagcacagccttgcaatgtcaaataatagcattagctctgactgtacaggcagagtgctgtaattatattattggccctattttgcttctgcaatgaatttcattgcctgcattgtaaaatcagcaggtagcaaagtttctgctaatgatttaatgtactctctgatcattttggacaaaagtcatggtaagatccacaaggcaattttatcatccccactgactactgcctggtttaagcattttaagtgaagacaaaacatgattctcatctccttgtttcctggtgaattccttcccacacagaagagagaattacttgtctaatatataatttcaggcataaggagaaggtgatattgcattgcaaataatagcagttagtgggagttgagagccagctctgcaccagactcgtatcagccacttgacctccattattccttattccttggtacctctgcgccatctgtgatatcagatccttttttctgcaaggaaactgaggctcggcgatactaagaaactcagccagggtccgtcagctgtcaagtggcattgctggcacccagattgagggccatctgactccaaagccacctgactctttcccatataccacagtttctaatacgatattataccaagctttaatatgagcacacctcctggatgatgctgtaaattagttgcctcccaccacaccacatcaagtataatggatataatatgatttttcagaattcagctaattacctactgagctttacattttgtaacttttttgactgtccatcaaaatgtctttgggattaaaaatttttttcatatgttttgaggtcaatttgaatctgagtttaataaacgttaccatgaaacatttctcccatctttttaggaaatatctgtgaataaactcattttgtgatagaaggctgtgtgtttatccagttttcatcctaaggagagggggagaagggaaataatacttcacgtctttattgcatgccaaacgtttatagacattatatgatttcatcctttaataaccccatgaaaaggatgtcattgtcttcacttgacaaatgagggagatggcagtgcaatcaagacatactgacaaggagaggaggtgagcgacttgcccgaggccacgctgctgataccttggcagaagcagaatttgaaaacagagcccccatatgttttaactgctcattggaaactgactaggtcacatactcctcctccttccctgtactggtagtttttcttttattttttttttaaatttcttccattttctttcctttttacagcaaatttgtagttatggtggagcaaagggcagttttcactcctcttccctaaaactgtagtttaactaaaaagtggccactgtctcctggtagcggttggtaagccatccagtctctgcaggcatctacgctccaggtctccagtctgaggagtctggctcctggggcaggtgcctctgggggtctctgccaggcttgtctggtcatgcagctacttccagactgattcctagatcttgcatttttacataggacatccccagcattcaaagaagatcctgggaactggattcctaccagaggaattagaatgaaaccaacaaaactaaaaacgacaccctcccccatcccccgcatccgatacacatgcaaggtaatatttgatgtcagtaggaaaaaaatccagtgttataggagacaaaccatagcaagcaatggcctctcacccttcccttcacaccctccactctgtccacttgtttgttccttcaataaatactgatggagaatgggctctatgccagtgtttctctggatgttggctgcagggatgaacaaaggcaacttctaggagaaatttctgtttttgatgctctcgtggctgcttcctgtgtcttaatattgtgcttaaactgccacttcttcagctgttgatttcaggcactatctaatgacttttgctgttacgagcatggatttagctcatttttaccatcttccctagttgtatcaccttcctcccattatgtttgtaacttcagattttgtatatttcgcatatgtcaatatgtaaacattttatatatatatatatgcattcacacacatgcatacatatatgtaatggtatatatacatgtaagtttccatttttgctcaaattgctctggacagttctttgctctgggagttctttactccctttctcataagaagaggctgtttgtaccctgatcaatccctctacctcttcttttcccctttcacccgtaacttctgctacttatacttctgccttatcatggtccataacattcaccttccactctgtagccataattaaatctcccatgcatcccactttgggaggctgaggtggatggatcaccaggtcaggagattgagaccatcctggctaacacggtgaaaccccgtttctactaaaaatacaaaaaattagccgggcatggtggcacgtgcctgtaatccaagctactcgggaggctgaggcaggagaatcacttgaacccaggaggcggaggttgcagtgagcccagatcgcaccactgcactccagcctgggtgacagagcgagactccatctcaaacaaacaaacaaacaaacaaacaaacaaactaagaacaacaacgaaaaaactcccatgtattatctatggattgactgtaaaatatgagaagcaataaatatgttcatcactagggccatctagaaatttctaacccaagggtcaactaatctttccctgtgttgtatttcctgctctgcggatccggcatcatgacctttgtactacccaggaaagccagtgttctcatgggctcttctcttttttatgctctaccagatgctagcactgtggcatgccattcgctcactagcagcttaaagggtacaggttctaaatctccttagtgctactcacctgttatttctgagcctgcgtagatgatcttcttttattcagacgtctgtgtcacatatacatgacatcctacccccttcccataaaaaaaatcacatttgtgaatgtctctcttaggctgagttccagactccaagatccctcttctctcttgtcagaatccagcagctgatggcatttatgtctgtagatttcactgtcaatgagtcattgacaggctaagcaggctgttggatggagtgatcaatggtatgagggaaaacactaatgtatgcaagaagagccatttcctagtaggaaaaatatttatgtatggagccacaaaggtgatcgcttcagtagaaatcaccaaggacctggtagtcaatgtgcaacctaattttctttcaaaagctgtaggaatggcaagggaggaaataaataatgcatttctttatatctcctgttttaagttactgagtgtcgccaagagatttctaaggccagacattgagtcagctgtaaaactggaaggagcaatgtttgctgactgttgcctcagccgctgaccctgatctcctctgcacgtagtaggcagcttaaaaattcctcgcccgacttctgattttcacgtgactcactgcttagttgtctgggtttgttttaattcctttccccctgctgacagttctttaagtggatgtctataaaggttggggcattcgctcttacaacaataggaaaagaaaggaggaaggaataaaaaagagagaaaaggaataaaaaaaagtttggtttagatgtctgatttctctgagcctcagtttcccagcatgtaaaatgttgtgagggctcacactggtcttgtccaggtgcttagtagagcatccattacaccataaagtatcacaaaaatttttaatatcatcattattactgtgctttcccttgagtttttttttttttaaatcagttaatccacatactggcagatctgacttccttgttttaggccctggggaatttttgttatctgtagagctggattaattttacagtgtggtgcctttgcccaaggtgaacctgtctgtttatagaaagtgtcaccaagttctgtcttgggcccgtccactcggttatatgtgctggaccctgggtggaagcactttgcacgtgtgcattcacgatgggctgtgctggaggggaaaacaggcatcactcccaaattctattcatgcaattaaaaattcctttcatttttatttgtgagagggtatgggtgcacagcagacggcaaacagaagaaaagcttttgattgaaaggtaaacatttacttctgccttttaaatagacatagcaagtctctttactctcatggaagcagttataaggaacatagagctgaagagaatatgaccatttctggtcttttactatgctcgtattaatccaccctggatagaagggactgtactatttggaaacacctaaataaaatgtttttgtcttaaggtgttaaaatgtactcattaatgtggcagtgtattccttttcttctgtgatcgttgaagtagggaaggaatttcaactaagaaccaaaatgattgtctgttaagacacttattttttgagaagacaaattaatataacattattatgtggggaatgtggaaaggctaaggttgtattgaaaacttattaagcttatgagaatattgaaagcatgaggaggcatgaccggaaggtattaatgatttgggcttgattattctaagactgtattctaagtctaaaatgttgataactaagacctgaaatgataaatgtttggcaaaaccaaataaatgagtagcaggttgaaaaaagaggcaagagagaagtagatatttatagttttctaaaacaatttagtcccttctggaagagagtcctacctcagccatgcctaccaggttgtgtttgtgggattatttctgagtcacccttaagctcatctttacccctctcccagacccccagtcccctcactgggcattccttggattatttatttatttatttatttatttatttatttatttattgtttgagacagtctcactttgtcaccaagtctggagtgcagtggtgtgaccttgactcactgcaacctctgcctcccaggttcaagtgattctcttgcctcagccccctgagtagctgggactacaggcacgtgccaccatgcctggctaattttttgtatttttagtagagacgggattttgctatgttgcccaggctggtcacgaactcctaaactcaggcagtccacccgcctcggcctcccaaagtgtaatcctggattataggtgtgatccaccacacccagccttccttttgtttttgatttttcctctttaaactctacttgtaaccacccctttcctttcccaaacttttactagcttcttccatcctggacttgcaatctggctgaaaacctgctaaataagggaacaattttgacatggctcctgtactccccacaaacctagttgattccagaccagtaatgtcttggggacagtgttgtcccatcttcctttctaggctgggctcagattactgacgtggaagagttgttggtcctggtgcaacatgccatgaccatgaggcctctggtagaaaggaaggaatgaagggtggttctccaaacccttggcccatgcctcatccttctgttcccttccttttccaggtacgtagctggtcaggtttcttaaattccgtcgatctggctttatccattttaagccttaggttgttggaacatagctaagttggtcaccttttcaagaattgaatctcaaaaaagccatgtagacctcggttgtaaccatcacattcattgacttggttgttgatctgtttgtcagatcagttttctgtttggggaacatttttgtaagtgcatgtatttcagcttttaacattttaaaaataaaatttcattgggaaagaaatttcattcgactggagtaccaggaacttagaatgaatccatttgtcagcagtatttataccctgtctaaaagagtgtcctcccagttctctgtctctgtactgtgtccccactttaaaaaatagctcaacctctcattatatttgcaattttttgtttttttcattgcctggtgggtttttttttttttgtctttttaaatgctccatgtagaaaagaattcctggaatagttcttggaacagcataggtgaataaatgagcaattattttgtcctcagcactataactgatttgagaaggtcaaaacagaaaataaaaacatgtttcagtagtaccagttcctgcacaggctgtctgccaactatggaagtaaagggaatagaattaggctgtctggattatagtgggaaaacaaaacacaatcacatcctgcctcagcctatccttgaactggtgtctttagaaaggggaggtcaagtaaaggccataaggctggatggtggggaagaaagaggcctgggaacaggtgagaaactgcagagcctggcggagttcatttaacctcactgtggttctgttggacttagtgcaaaatcaagagacccacctttgcctgcccatcctgcaatggtttggggggccccaagtagatgactggggaagatgactgggaaactgcagcactggttcatgttctgggacaaatcaatattaagcaagtttaatgatgggtaggttcattcaaaagggaaatatgtttcaatggagaagagaaatttgttaggttgtataataaatattttgagtgtatttggatagaagtttatgacggaaaaggcaaaattctctgtgtctttatggggagatattcgatatgttttttcttggcagaaataaaacatattcaataatataattaggcaaacttgttttagttgacaagaagaccgtatctccgtctgcaagatgaaggcaagatcaagagatgtcagttaacattcttgcgaccacaggtagggaggagaactggggaggaatttatggataggtgagagcataaaactagatgcggaagggatgggggagcaggtaaaataatgaggctcaatgttcaagaaggtcttgggcaagcgcgtgctagttattttcctcactggtgtggtcgtgacagatgaatcacattttactctcctccctttctcatagtatgattacataaaggagaccttccctggaaagagccctgtgcatggcttttgagagtgggcctgggctaacagtgagtgtggaagcttgctgccttgaattctttccaattctggagagttgatgggtaacaagtgtgtatctatagtctgcttggacatggcggtgtggccactgacacgttgtcagccatcccctcaactccagggacaggaatggtgagaaggtggtgagggcacagtctgcccggagacgggacagtttgtactacctgtagcaagagcatgtctttgagagccatagcagctggcttcctatttggagagaacaagaatgtgaaaagctatttattaccagatgtgggcagaccctccagcctttttttgttcttttaaaccctaatctctttttaaaattttttttatttttaatgtttatgggtacatagtaggtgcttatatttgtggggtacatccgatgttttgatacaggcatgcaatgtgaaataatcacatatgaagaatggggtatccaacccctcaaacatttatcctttgtgttacaagcaatccagtcactcttttagttatataaaaatgtacagtttaagttattattgactatagtcaccctgttgtgttgtcaaatagtaggtcttatttattccttgtatttttttgtacccattgaccatccccacctcctcatcaaccccccactacccttcccagcttctggtaaccatttttgtgctctccatttctgtgagttcagttgttttgatttttagatccaagaaacacaatcttagatgcatagtaggtgcattctgttgccatctgcatcatgggactgcacaatcggagaggcaggaaggccctgagaaatacctgattacacacctgcgtgctgggatgagaaatatgaggggaggagagaaaagatgagcctcatattgcatagcaagtctgtgatggaagcaaagttagaccctgttgatttttatgtcttacctccttgccattagttaggtaaatttagaccaccatattttctaagatcagagaatagagaattttaaattctagattcttgccttgtggatgttgaaaagaacaattaaaagttatttgggatatccaatcagttaataaataattatgaatgaataaactgttttgttgaagacactcttatggcagacatgaacatggggcttaaatcagttctgacatctagaagctcaaatccaggaggcagaggagttggatattaaagaactctgtggtgagctggacaggatgacatgacaattatggaagttcagagcacatagcagtcttttccagtgatggggatggaatgtgggggtcatggaagactttgtggaagagttgcaagtagaattattactgttgaaaagagatggggagttaggtagacaaacagaaaaaatgccaccaaacaataagttaggatagaaaaactccacgtatccatatgtcagttggcccatctgttcgttcatacatcctttcattcttctatccatccaaccgtccttgcatccatctatccatccacacaaccacttattcttcattcatctgcccatctgcccacctacccatccacccttccatacattcatctagtcatccccatccatccactcatctatccacccatccatccacccatgaatctatccatccatctgccaatccacccacccttccactcacccacccatccatacacacttccatctgcctttccaattatccacccttccatccatccatctacccactcatctaccctttcatacatccatacacatccatctgttcattcatctatccatccatgcatccttccttcgttgttttcttccttctatccatctattcatctacccaccccacccacctatccttcacccatctggccatccatccttctacccacaccttccttcctaccttccttccttccttccgtccttccttccttccttccttccgtcctcccttcctcccatcctcccttccttcctcctgtcttcctttcctttccttccttctctttctttcttttgttccttcctttctttcctccctccctttctttcctccctcccttcctcccttcctgtctccattattaacttgctggtattttgtttcaccattgcattgtgtttatcaatagacgattaatggaagaagagaagaaatcaggtgaagtctttgtaggatctagaatgtctaggctaaggagtttgaaattttttatactatgttctattgggaaccatttcagggttttgagatatagtatgatataataacagctatgctaaattctttgaagttattggtggtggaatatcaatccagaatgaaaataaataattttggaaatgagcctgtcattgaaatatactttatttctcgttaaatgtcccagcaaaagtattttggttgttaaaataaaggaacaaccattagaaaggaggaggagaagaattagaaggaaaaaaaaggtaaaggtaaagtaccttggtattttagggtttctaagattaggaactttaaatgttgaccccattttggtctttaccttcaaaagacgggagaaagactgagagaagtttctaagctgatgctgctctactacctggagtaggaatgagaaaccatctataaatattacctttggtgtttccatcaaaaatttagaatttcaccctattctatttttaattctggtttaagactgaaggggttcttggtgaatacttttgtagatacaattaatagttatgaaaatcattactgattacctccagggttcagatattgggctgaatgtcttctctcaccatcagaactaccttttgactagagtgttaattattaacatattttagattagtcagacaactgcaatatttaaggaatacgtccaaggtcacacaactaaaagaagtgacaaagtacggtttcagacccttttagtcttttctgtgttgcaaaattgagataatgataatagctaatgatacctctcccttactgataattgaatgttttatgtgaattaaaaagtttaatctgcatagtgtttcatcaagatagattccttgttatcctcattttggagatgaagagactcaggcatgcaaaggtgaagtaattttcccagggccagagggctaaggaaagggagaattgggattaattctacattgtctactggtaatacctattgctcatttttaccagttaaaactatttaatgagcatttgcccactttctaaaaatatgatggtcttagttacccacatggacctactctatcccaggcagatgccacaaattattttgttttctttttgtatatatttatgctgtttcctcatttttaaatagtgggctttgatgactattcttctacataaattattacatatctgtatcatagaatcttaaaaattatttgattcaagtgtatacataattttcatatccctgatagatattgccaaatatttaccagaagtgaatcaagtagtttttctaccaacattatctaagagggcttgtctttttacatctttgtcagcactaagtattatctcccttacttttttttttttttggtaatctttgttactttgttaggattaaagtagcttctcattttaattttcactcctttaattgagaagcagaacgtattcttttttggtgacttgtttcagagtctctttagtttgaagatacaatagatgtagcatctgctatatccggtaacaggataacagtgcattgctgggatgatgaggctgcagtgggctgtgattgtgccactgcattttcagcctgggtgacagaggaagaccctattacaaaaaaaaaaaaaaaaaagggtctgttatcaaccatgcttttttattttattttattttattttcctgtttctgagttagagtctcttttgctcaggctggagtacagtggcgtgatcttggttcactgcagcatcaacctcctgggctcaagcaatcctcctagctcagcctcctgagtacctgggattgcaggtatttgccaccacgcccagctaatttttgtatttttagtagagacagggtttcgccatgttggccaggctggtctcggactcctgacctcaggtcatccgcccgccttggcttcccaaaatgctggtattacaggcatgagcctctccatctggcctcagcagtgctcttctggctagcttgatcatatgccaatgttttattccttcgtggagctcagagtaagcttgttttactggacgttttctataataaagctaggggatggcgaatcattctaattaccaaaaagctgtctttgataacaatgtaggagataacgaaggcagaaataacatttgagtaattctttgccattctgtctctgaatcttgaaataaatactcttgaatttatatgttcttggtcctttaggagtcataaaaacataccgttacatatgtatatgaaacggtgagaaactgcgtatttattaagagtcacgacccttaggactagacaaatcaaattaaatctcataaaaacctgttatggaatatgaatacgtggcactattttttcttttagggtgtctttattaattttgtcatgtttaatatgttgcagttgcaaacaaaggcataaatgcatgcgttcattcctaattaatttatgtaattgggttttataaatttagctgtttaggaagctgtgcataacacactccatttactgtgtgctgtagccaataaaagcataatagaaagaaatatagtttgaagctcacttcaatggtaaatatagattagttgtaaatgatatctttgtaatgtttattttaaattttgcagtgctgcagattttctgaacataccaattaatgttcttatttgaaataatgactagttaattactataaattctaagtgctccatctctgacaattaaaaattgtcttacagctttttatttatttatttattttttttagatctttccaaattatattaagtgcagcatctggggaaagaagaatgggaatggaaggagtgtgtttaaaatgtgggtggttttgtcaattcctattgggaatgcttgtatttgaatgtatatacatatgcatatttatgtgtaatgtctatttcatgctaaatagggagtgatcaagttgaaaaataagaaatgctgtttgaatttttaaaataggttataaattataacatgaaaatcaaatacaatgggtaaaaccagtaaattttaaataagtttacatttgttgtcgtgatgtgactgtgacgttacctgagatctcagcaaggagctctgcagcccgaaaagaccaactggaatgatttgatcagaaagggaatgggtattaggctgctccactgatactttatccacttcgggagagagagccctgttccttcttcatctagctcaagccaactgtcagaaatgcatgtcagagctacacaattctatccaaggcattaactgttgtcaagtctgttttttatgaatatgtttcaatataagaaattgtcttaggcccaaagtgaaacgtcttcctccttgactcatagcaagctcatgcaggtatttgaacattgttctgtataatatgtgcacctttgagaaatcccatgattcttgctattctttgtaaatctaataccttccatccagagagagagtatacatgtggagtcaattgggagtaccttttgtatcctctagtctgagccttacaggttaaaggagaatgttggatttgcttttgaaagtatgggcttgcggagattaaaaaaaaaaaaaaagaaaccttgaataatcatgtacaaatataaatactgtatgtagaataagtgtaatggatcacatttatgatgaaatatgtatgtctttccaagggtaagaccttcataattcatttataagttaccttctttctcttacatgtaagtagcagaatagtaattttcttcgttctttctgaagaattgccacacagggaatgaaaagaagaaaggataaacttttcttaaacagcagaatgttattcagagataactggaaaaaagtacgagaaaagccaaaaagaaaaaaaaaaattgtgggtcctggtgatgttggaaaaatgacgtgtgagctgaagttccagacgccgagcttcatctattttgtcatgttatgacagaaatcattacaagggtgataggtttatttataaagacttgcttcaatattcaaagtacatctattctagcattcctcattttgagccaggctgtggatcaagatgaaagaaaaattaaattgtatattgaagagctcttaattgagccatgctgtatttaacagggaagcatcggcttcaggcagtcgataccactgaggatttttaatgccctgcatcatgagactgtcagtttgctttggagaatgcaaacaggctaatgacaaagccctgcaaacttttgtagttgctgctggtctctttggaaggcaagtgctaatttacccacagttgaaacctgacacacacacgcgcgtgcacacacacagacacacactctctctctctttctctgtctctctctctttctctgtctctcataaggaactaaatcctgcgttttctcaccagagggctaatgacacactgcttagtcacccaaaacctgtttcctaaggagccactttggggcttgtttaaagtttttaatgtaaggcattatataatattagatttcccctgtttttccttaatcaatgtaaattcaattgcatttcagagggtggccaagtggcatttcatcatctctaatatccatttaaaaatgttaggtctacccagttataattctccaaagtagcctatctgtggtttaatatgttatctacattctctaaggcagtgttaatttccttttgtagttaatctatcctactaccaaatttagtatatttatagttaaagattctgttaagagctaagtgatttaagtacatctgggataaagtggccttggctttaactatgaaacaaattttctttatttcattctcttcactgataaatccatagtaactggaggcatttttagaattgtgggcaatttcagcctctaaagtttgattaaagatacttcagatattcctactgagaggctagagggctgaaaggaatttattttgggttctggccctagtgcagctcagtggaagagaacagacattgtgagtttaattcccacgctgccaatttcccacgagtctagggtgggtgttacttctcaagaaggcgatggtagaaccgctggagacttcttatggctgtggcaggggactcacacgtcacaaggagtccagaggcatggctttgaagagctcttttcattcattcttccttttgttcacttgtacatcaaatacatgctgtgggcctactgtgtgctgagcactgatcttgtcaggttcttggggaagacttcattgctgaggtgacctttgagctgagtgtatgagtgcaagagagagcgatcacacctgggaactgcttaataaagtccccggcatcttgaagccacttgcagaccttggcagttgctgttgctcctgctgctgctgctgctgctgcattgtcaagactacattgatgtcttggaaatatagaaaaaagaggctgctggactgtgtgcttagaatcagtgtgctaactctgttaccaacaccgtagagaagtggttccagaaggaagagttcagggtgagaatgaataacggagtggctttgcagtgggaacctggctttgcagcacagctaggattggagaagatcttcccagcagggagaagaactcaaagaacatgcatgaagggaggaaggttgcaccagtgggagggaccagaatatggtgtggaaagaacgaggttcaaatccaggctctgtcattaactgcccctaccctctctgagctgagtttgttttggacactggagataatgcatgttaacatcctggtagctctatttatttgctaccatggtacataatcatgggagctctatttatttgaacatcttcttttgttattatttggtgtatttgggaaaggcatgtgggagcagcaagcaggtgagcatcctgtttggaatgcagggccgggaactgccctgcccagtccagcctcattccagaggctagcacctggcctcagctgtagagctgctgggagcatttcagctctctgcttctttggcagtctagtgctgtcacagaaggaaagctcactccatggaaaaggggggattgatttcttctctgagggcagaggctgatcaatctaggctggtaggaatagatgtaacctcagaggaaacaatttgcattggcgaaagcaagtcaatggccatccccaaattcaaaaggacagggaagtgtaatcctactgtgatccctaaagcatccaggccccaggaatggtggtgatttgccagggggaaatggaggaacaaccccttctttgactacctctgtagtttatattggattctgcaaagtcccatgaggactgatagatgggctgtgtctgcatttgaattttgtagctgaaatgtgggtgagttcacctaggtccccttcatgacaaggtggtgagaaacattttcttgttctacaaatctgaattaggtccacgaaagagggtatgcagcatagagaggaaccaaaaaggacgcaagatttaggatagatattgccccttgggaggcctgcctggtctgcccttgataactcatgaacagtctggtaatgctggaaggcaaagtaaaagccaacctcttgagaaagacatggaacacaggatggaacttgaactgcttaaaatggcttttctcaggccagctgcactggagtgtgctgctgtaacaaacacgcccggatctcagtggcttagcatggtgaattcatttcccattcgtgatatctgaccacagatgggaggtaaggggctgtgctttaaagtcattcatggatctggctgggcccgatgcctcacacctgtaatcccagcaacttgggaggtgggcggatcactttaggtcagaagttcgagaccagcctggccaatatggtgaaactccatgtctactaataacacagattagtcaggtatggtgacgtgcacctgtaatcccagctactcgggagactgaggcacaaggattgcttgaaccgtggaggcagaggctgcagagagctgagatcatgccactgtactctagcctgggtgacagagcgagactgtatctcaaaaaaaaaaaaaaaaaaaaaatctttcagggatccaggctgacctcagcaccatctcttacatgtgcctctgttctttccctaatataagggagcatgggggattagtgtctggcttaagcacttccactcagaaatcttgcttctccccacaatccattggtgaaagcaaggcaatggtcatgccccaattcgaaagataagtgcagtcctactgtgtgccctaaagaattgaagatcaggatacttatgagcagcgctcacaactgccatagtggcaatgcgaatggcatctatttttaatgtgactgagaaaataattggtcagatattgcaggatttttgtgggggagagggtggaaaagaacttacagattaaaaaaagaactggcatagcacctagattttaaacagaaggaaaagatgacattggggaccagagacagaaatttcacttctgtgccatgacaaataccagggagatgtaattgcaaaatgaagctgcaaatgtcttacccagggaactaggtgacaacctgcttggcttcatgaagaaggaataatatccaattaggctaagtgtattcggtgcctgagtgacaagccctggagacctgagggcttctggggcccccagggcggtttcaggaggctgtctccagacctgtccggggtgtgagcatgtcacgctgtggcccgcgcctcccctgtacagctgcctctgctcttctaagcactgaaatgagaggtgtaacctgtgttccagagtctgcgcctcccagccactggggcaggggcacctggcccatcagacttaccttgcctcccctgctgcccatgccctgctgcctagggctgggctcatgactgggtccacatcagctccacattgcagactgaccccctggaccctcacgtctcaggatccctatctccctgtcagtgctttgtcacccaaagtcaccgcagctcctcttgagtgctttcaagatcagaccgaggggtcctagttcaagctaattcctacctgtgcgatcactagccaagtactgaacctctctgaacttcaattatctcatctgtaaaaggtgttggtttgtaattgttcctacctcttagggcttttgtgagagtttagatgataaaccaccaagcaacagtggctggcattctgtgcacaatcgaagtctgctgctgtcagctctgtggtcgctgtctgcactcccacccctgtcatcctccaagtctgatctcctcccgaagtctcttcctggacctcagccctcagggattgcacctccctctgaatatgctgtcccttctaatcatgccatttagccacactgcctagcactttcttttttgaatattcgtgtcccaggtccctgaaaaagttgctaagcctgctaaaagcaaggcaaggcctttctttctttgtaaccttaatgcccagcaacgctccattcagtttgaccctcagttggcttcatactttgattttatgtctttatttgtttcttaatgagctactttatcattgtgaaaacagttaaatatcaatagtcaatgaataaatattaccaaaaaaaaaaaaaggtttgtcgtttaaaaatttggagctgggctggaaactagggatactacttggtatattttagttctactgatatgacagtatttgatacttaatcatattcaagcagctttacagagactaccatgagaatgggttaaattaagaggattgtctttgctgtttagccaatatgggccaaagttcagtggtttgagacatggcggggtttggtagtagatgtaggatattgctggggaaagagtgttagaggatggaagattgcatgatatttctggctttgctctttgactgtgtgctgtttgtaaaatcacttaagtcccatgggtcattttcttccccatatcaagcacctgctatgtatcaggtgttgtgctcacgtggtgttttatgcacagtgtttcctctttgttaatcctcatgatgattggtatggtttggctgtgtccccacccaaatctcattttgaactgtaatctccataatccctacgtgccaggtagggacctggtaggaggtgattggcccgtggtggcagtttccctcatgctgttctcgtgatagcacgtgagttctcgtgagatctgatagttttataaatggaagtttcccctggccttcattctctttcctgctgctttgcgaagaaggtgcttgcttctgctttgccttctgccatgattgtaagtttcctgaggcctccctagccatgcggaactgtgagtcaataaacctctttcctttatacattacccagtctcgggtagtatcttcatagcagtgcaaaaacggactaatacaggttgggcacggtggctcatgcctgtaatcccagcactttaggaggccgaggcagatggatcacttgaggtcaagagtttgagaccatcctggccaacatggtgaaaccctgcctctactaaaaatacaaaacagccgggtatggtggtgtgtgcctgtaatcccagctatttgggaccctgaggcaggagaatcgcttgaacctggaaggtggaggtttcagtgagccgagatcatgccactgcactctagcctgggtgattccatctcaaaaaaaaaaaaagagaaagaaaacagattaatacaatgatctgtgagatattgggactgttcttattcccatttcacagatgagccactaactggctcctggcaggacagtgaataaggggcacaacagagacacaaacacatcgctaaccaatggtctcatccgtcagccacactgcctgtctcagcatgggccctgtgtggaccattccatctcaatttgtttctgattcttgtcaattaaataagaacagctgaaaagtaaaataataaatatatacataaaaacaatggggggagtaataatgataatagatacaattttttggtctttataatccccagagcctggcttaattattttaaagtaaatcaacactttgaacacttgcaggttagaaaaccagtggactgatggatgcgttacagccattgtttccaagtgtattagtttctgctggccgctgtaacacattatcaccagtgtagcacctaaacaacacaaatgtattgtctttcagttctgtaagatagaagtcctacagggttctccttgggctaaaatgtagttgttggcatttctttctggaggctctgggggaaggtcgttccttggccttttcccatgacgctagaggctgacacattcctctgctatggcctcttcatttttcaaagccagcaagattgcatctctctgtctttcttttgtggtcacattttaccaggactcttctcctgcttttttttttctacctttagggatctttgtgatttcatttggcccacctagataaccagggtcctctccctatttatttttattttatttgtgagacagagctttgctttgttgcccagactggagtgcagtggcttgatcttggctcactgcaacttccgcctccagggttcaagcgattctcctgcctcagcctcctgagtacctgggaccacaggcacatgccaccatgccagctaatttttagtagagatggggtttcaccatgttggcgaggctggtctcaaactcctgacctcaagtgatctgcctgccttggcctcctaaactgccgggattacaggtgtgagccaccacacccagcccctctccctattttaatgcgaggtaattaacaaccttaatttcaccggtaacctgaattctcctttgccacgcagtctaccatattcacgggtttcagggattaggacctggacatctttggttgggaaatgggcatcattttgtctaccacaacgtgagagcccattgccctgcatccacagtcataaaagtctgttcccttcctccctgattcttcctaacttctcctgcctgccttgcaggatatgtggagttatcagttcctagcaccactggccaaagcgaggatagctgattgcactcctactttcctgctggtggaaacagcatgtatataggtacaactctggtgtggggaaaatgctaaagatataaagtagaaatagcctttgtgtgatgtgagcagcagaacaaaaatcgagggtgccaaataatcgtatgaagtggtgaactgcctaagatggaatattgctgttcctaaatcctggctgtgttgagacatgtgatcctgccgatgagatgagagctgaaccactctcttctcccagatgctgggcttccgaccttaatagagaccgagaaacttaacagagggctcagaagagaaatctattgaaagttactaggtgccaggtgtctcggaaagtgtttaacacatgcctgagacgttaaaggcaagattcatgcattctttcagcagacagtttcttcacttaccggggaagggggtgtaatatatgggggtatagggataaataattctgtgtgctgtgcaggccgtggagactcatcttctgcacaggtcaagttctgaagtcagcatataagctggaagtggagtgaagtcaaatgaccctcaaagatccttccagacttcatgcccttggcaactcagtttggacactcatatgctggtttcttccttgtatttatgcagcagcctccttttccacaaaaagcagaggccaacgtatctcaccccctcaatttttttactttccctctccctccctgtgcttgcctttcttttcttttcttttttctttttaagacaggctctcactcttgtcacccaggctagaatgcagtggtgcaatcacagctcactgcagcctgtaactcccagactgaagcgatcctcctgcctcagcctcccgagtagcttgtactgcagatgtgtgtcaccatacctggctgatttatacttatatttatgtatgtgcatgtgtgtttatatatatatatttgtagaaatgggattttgccatgtttcccaggctgggctcaaactcctgggtttaagcagtcctcctccagcctcccaaagtgctgggattacaagcctgagccaccatgcctggcctttgcttgcctttcttaatgtctttgacaattcatgtaaatgtgtgtatgatgtaactctataggactaagggtgtgtgaggatgccaggaggctgttggttgacaggagtcatgatttgactatatgaggtcacagaaaatgctttttaaaatttaccgccaacccacaggaaaactattctccttcttctaaggaaaaaaaaaatgtcacgataaagcagctacattaatgacaggcacatcaaggttttaacgtgttctctagatttatgatgtgtagcgtggtctccattctagaaagcaaagtagggaaagcacgactttggggccagggccctttctggttcagaatgtccctggccagtgtgcgccgtgcagtgtggaagcacgcttcggtgcgcatgtaagtttacgtgctatctgtagggacagtgatttttattcattagagtttttgagtctaattgtttttaaactgccacttttgtttgttaaagatacagatgtctggccatagaggaaagcaaggtggatttatcgttgcaattagatgcttcacaatttgaaaacttatcacttaaattggtgaaatgtcacttttatgcaacttgatgtttagaagtccttggcgtccaggactaaagtcatgtgcaatttaacaagatcttggtgagataaaggaagttgcgcttgaggaaacattgaaacacaccagatggaattttccaattccctcctacatgatagagactaggtgaagggagatagaccacaaattgattttgtgtaactcttaaattaagtggagcagagttaaaaaaaaaaaatcactggatttgaagttggcctatgttagattactccaaggaagttagttaatatgttaatatgaatctagatgaacattgagtgttttgctcttcttgttaatttgcgccatctactaatctctggacaatggagaaaaagtcgtaggttatgagttttttatttatggacattaagcaatatctttaaaatgtaaaatgaagccgacaaaatgcacagccagataacaacaacaaatctaatctaaagtgacaggaagagactctcccagacatttttctctttaatgtaacatgactttaaattgatgcaaccccacagtgattgaaaaactctcagagcttgtctcctatgattacatttctgatctgtacaacttaattttttaactcggtgagtctcagttttgcgaatgaacagttctcttttgctttctctctcatattatttgggaagacattatttggcaaccaggcagataaagctctgttaccacgacgaatactgagaagtcctaaaacaataaagaccccaagaactcaccctggaatatgtacctccaaatctcttctcttttccttctctccttctctttgtttttctttctcttcctgttctcttgttttatcttgacttctctcgactgtggtgacggtttgcatatatctgcgattgtactgaaacttaccaaacattgtacgttttaaatgggcaaaatgtatttgaactatatatatcacaataaagctataatactcttttaaagtgtctcctgaatcattaccagtataattattctgtgaactgtattttgatgaattcagaattaatttaaaatggattatccccctgtagaatgggaggtaatgctgaatgattgtgaatgattgtgaatgtttgtttattcggggtactccctcaaatttcttatccagtggtgtctagaacatgttgggattttgtgtgatagtttcttgagttggaaattgcgtttctttggcctcccatgtgggtatcaatgagttttacatggtttaaaggccagttatgtgatggatacttctattaccttatgtctttctgatttcatacacttaaatgtacagtttttatcttccttcaaaaccttatttttccgagcaagttttatttattcactttcagtcattactgaagtgaataacaaacatataacaatgctattttgggtcatagctgttttgctaagtaatacttaaaggctttctgactatatttttaatttctcgacagtctcccatggttattttctgatcataacttgaaaatcaaagctttctgttcagtttaaccatcttttaaaacccagtggttttagcttgggtattaacctttaacatagctagcgaaaattgaacatttttatttgaaatatgcttaatgttgtcttgtgtaagacaaaaagtttagggacaagtgaaccatttacttttcttttaatgtggaaagcagtttacaaatgctggtatgactaacaagaatgaaaggaccagaatggcagttctgagctagaatgtgatgagtaagtaccaccatagttagcggctagggaagggaggttgttctacagagaaacatgcccatcatttcttctgttacctggtattcactctggcaatttctttttggactcattctaaaatcaggattaaggatatccactgagaagcttgcatttattactctaagcaagaaacttctatttaattttttaaccatttgattcatatgtatttagattttaaaatttcattttctcttatccaaatgtatcatatatctttaagtaggtgaatcttggagtagattttattatatatcacatcacagagttaagctcggttcatctggattttaaaaatctctacagctttgagaatgactttgaaacactctttactgttggagcttaaagaaaataaatctctaatgtcctctgtattaattcacctgcttggaaagttagagattaaaaggtttagtaggatttttatattttctataatttctatttgtattggagtaaactgttcgttgtatggagtggcttagctttcataaaacagaaagattcctatattgagaaaagaggaagaaggaaaaagtgtaatataaatacataaaacttcctctagctttcttgtgttatgtgtaaaggagttagtacgttactttaattgtgtactttgaagaaagcaatctcctatttccattaatggtggactctgtgggtagagacatggatatttttccttttataagaaaggtcttgtctttcctcagaaggcattgtgagcaaaataagggaagaaaaagagaagtagataagaaaaacaaatcacaatattgaagcaggacccgagtactatagccttcctcatattttggtatctggaaccgaggttgctaattaatgacccaagagctaagccttgtttgatgaaatgcaagatgtaatacacagattgccttggagtgatgtgtgattattaccatccattcatgtgtaatcccgtatttggaaggtttgtaatttgtttttgacacatttctctctgattttatacactcatgcatacaggtctcacctccctccaaaaccttatttccaaagcagactttgtttgtttggtttgggtaattcattgggccctatttgtcttccttatacataatctattttcttactgctgcctctgtcttccaaaccaagaatataaagaatgaagcctggggactggaacttaaaacttctgccgagaaaagaaagtcaaggcctgtgggctcctaaaacatcctgtggaattcgcctcagatgcccctccatttgcactggtatatggaggatgtttgaaaaccaccagaacctattgtgtactttggaacaatggcattttcctgcttgattgtgaagatggccgctggaaaagaagccaactcccagggggcacgaggggctaagctgtctcctgggaagtttgagggaggccaagtgttttccagttcatttccaacgcgtatttcttcagggccaagggcccagctgtgcctcattaggggtgagagtttggctgtgacacgacttaatagaaaaaaaaaaaaaaaaggagaagtccaactagctgagtggcaacagaacttgggacaacctgtgcccacagcctttcatgtcctgtaatgagtgtgccatttgctcactgggaggagaaaaaaatgacagtatgcaacagtcaactttttcctgaagaaagagagaaaaaaatacatattttgcagccgagacatcggggtacctgttaactttaggcacagcgctagtgtcagccctggaaagagactccctgtgaacagcactttttaccatttaatcagcctgtacttcttcgtatttatagccctggcgaggctggcccattgttacaagaggaaattgtgatgttcagcagtttataccttgggagctggaagcgtttctccatggtgaatttgtaatattaattggccatgtcagttcatgacaaatgtagtgacatctatttcaagtatttcagttttatggtgctgaagaagtgacacgcgctccagataagtaatctcacaaaagatcttcccgctcgctgtggagcgcctccagaacatgctctcagaggagatgcaaataggctcagggttcagggggctgtccccttccttttgctcaaggctcagaggggagccagaggaatgcagggagggacgcactccctgtcattcccctttcagtctcaggagattctggttgaagctctggcatggactttcctgcccaagaagtgtccttgcggtgatcatttatgtgatttgggtacctgctgcttgtaggctgtgactgtcagtagcagaaataaatatattgcctttctcactgtgtacagtggtgctgtaccaagggtgactctgcccatcaagggacacttgtctggagatatttgggttgtcatatcttggaggagaataggctgctattagcatctagtgggtaagagcaagggatgctgtagaacttcctacaatgcacaggcgcatcctacaacagagaattgtctggccccaaaagtcaatagtgctgaggctgagaaaccctgcacttgtgtggaccatgcccttttatgcttttcaaccttgaagcactaataggtcagagaagaatgccagggatgtgttgatgggtctgcaagaggttgatgggggatgcttgagctcctaccaagtggaaggtggtgtaggcaaagagaaggatgcataggcacattggacggtggaaggcaggggctgctgaatgatgtggcaggaaacatgcaaagtgctcagcgtccctgggcggtgcagagtcttgggaagcaagaggatggagccatcctttcagtttccagcctgggtttcccaaaggagagggtgtttgagttcagtggcagagagagtggggaagagtgttggagcccagctgagtggccacctttgtcaaatggagctgagaaatgattttcacatggctggcgtaatggcggagtttccaaaacagcagcacaacaaaatagccatttacatgtcaagactatattcatagaatccatatgtctaaggtggggaagttgtcattattcctgttttatagatgaggaaacagaggcccagatggagtaagtgactgctgaagtacacatgatttgtcagtagaaaggaagagaccaaaggtggcatcaactttatctttccttcttttttttgagactggagtcttgctctgttgcccaggcaggaatgcagtggggtgatctcagctcattgcaagctccgtctcctgggttcacaccattttcctgcctcagcctcccaagtagctgggactacaggcacccgccaccaagcccagctaattttttgtaattttagtagagatggggtttcaccacgttagccaggatggtctctatctcctgacctcgtgatccgcctgcctcggcctcccaaagtgctgggattacaggtgtgagccaccacgtccggcctgtttttccttctttgttaagtggaacaagtcatttttttggtggtcatttccaatatgtaattcctgataacacacgtatatattatctctttaaaaattaaaaaaaaaaaagccagccaaaaaaagaaaatggaagtgttcaagaaactgccttttttcatgtaatagtatttctgtgtcactaaatccttcaacagcattatttttaatagctgcccaatgtcctaatggatgggtgagtcatgatttacttaaccaatcccctgttgttggacatacaggttattcacagcttttctctattgtaagtggaattgcaatgaatgtttttgtagtacacaccagtgagtgattccttggtgcgcttggaagtgctggttccaagaataagataaggctttgagattaattgccaaattgctttcttgaaatattgaggctactattttccagtatcttcactaggaataagtaacgtttttctaaagctgagtagtaagagaaaggtagaatctaattttactgtgcattttcttgattattagtgaagctaaacattattttttattgatgtgttaacaatttctttcttttgcaaatgatctattaatgttctgtgactgatttctatcttggtgtctttacgtttgtgaatggtaagaatttttatgtgttcaggaactatttaaatgttcaagacattaacctgtggttatgtatatcacaggtacagtcacatcgcttaacaagggagatacattctgaaaaatgtattgtcggaattctgtcattgcatgaagatcatagagtgtatttacacgagcctagatggatagcctactacacatccaggctatatggtatagcctcttcctccagggctatgaacctgtatagtatattactgtaatgaatagtgtaagcagttgtaatacaatgggacatatttgtgcatctaaacacacctaaacatagaaaaggtacagtgaaaatatggtattataatctgatgggatcggcattgtgtacatagttcgttattgactgaaatgttggtatgaggtgtatgactatgttttctcatgacctctgctttttttgtctttaagtttttaatttttgttttacttttgtcttttaattttaattctattgcaaccaaatctatcagcctgtcttctatgatctctgcttttaattgttacgctttaaaaatccttctccatggtaacattatattgactcatatgtcttactggttgaacgtgcctatgtttgactttgaaatcattaaattcattgaggatttgttttgccatgaggaattgggtaaggatccagctgattttctccagatgagtagttcattgtcccaacaccagttattgcaataagttattccttccccaggaaatatacctgggctaattaagaaaactgtgcttcaatgtaattattccaccttaatgcatgaaatattaggttaacatggaaaaaacatggcatcccatgttttagtattttttccttatttccaagcagcacctctctttgaattatattctgttctctgtttttataatttgactcccttctattctacatctaaatagtgcattgtctgttttcactcaggactttaaaaatagttctagtactaattgtatttttattctaatactgctattccttttactggtacttctgcatcttaaaaaaacaaaacaaaacaacgaaaacttggcatgttggctcacttggtgaatgaaagcatatactgttcagttgtttattcttcagcaacatctgagtatcctcgagaaatgagtggaatgaaccgctagagatgaatagccttaagccctcaaagctgagccctttggggtaacttgctctaattctgccctctccagtttgagtttaggttaaattcagcttgcagattgcaccaagcctgatgcctcccagccatcaaggaaaagggtacctaacattttgaatctccattaatcttacagctcagatcctgtgtattaaatctcagcattttcagggatgtatactctggcagaaaaactttaatgattttttttttctgatgctgcctagaaaatattagaaagaagacccttctttcctttcctttcttgtcctgtcctgtcctgtcctgtcctgtcttccctccctccctccctccctcccttccttccttccttctctccttctcctcctcctcctctccttttcttttcttttcctttccttcttcttcctttcttcctttatttctttcttcctgtattattttcttgtatagctcaggtctcactgctttgctgccattcttgtggagaataataggtaacagaggtgtgcacctggcctcatttattgtcacactggataggtaatagacgccggcatggctatgctgtggttcctgctgatgggcacactattacaggtgcatgataagtgtgtcgtacgcaggaagtacgtttcccccagccttccctacctgctgagggctgctcccagcctaaggatttcatccagatagattcatagcgcttccagtaaatgcaccccttgcctttcaaagttgaaaaagaaattactttggacacaaagaggtgtttcttttgacacagcaggcatgtgaaaaaataagcaaaaaaacaagagggatttctgttaccattggcatgtgcttctcttttacttctttagttcacaatgccagtggttcagcttcccgttctgatcctcactgctctaatctcttcatctgtgcttgcaatcacagccacgcgggctcgcaatattaccacgaaatcattttatctgttggaatctctttcctgttcattactcttttttatccccaggtagacaaacaccctaagtttacctcttgcgaattgtacgctttaaggttaaggaattcgtagttgaataagaatgacttttcacataaatttaatggagttttatcttctgagccaaggctttatttaaggagtcttgggaggtaatcatgtgttacctgagactctccgcccataggatgtagttcctttccattggaacacatggggaccgagggaataaagaatgttttcatctctgaaaatatctctcattcttccaatcaatgctgctcttttcttgcatactgtatactgggaagcatttgtttcgatttgtggttaaatgtatgtgtccactggacttcagtatccaccctttgaaggaccgcaggagaagttgttcaggtagaaacatacaagggccggatgcggtggctcacacctgtaatcccagcactttgggaggcctaggcgggtggatcacttgaggcctggagtttgagaccagcctggctaacatggtgaaaccctgtctctactaaaaatacaaaaattagccaggtgcggtggcgcaaacctgtaatcccagctacttgggaggctgaggcaggagaatcgcttgaactcgggaggcggaggttgcagtgagtcgagtcgtgtcagtgcactccagcctgggtgacagagcgaaactctgtctcaaaaaacaaacaaaaagaaacataccgggagatctggttctattgaaccccagtgcagccatgggtagaattttaggcttatttatattccatttcaccacaagatgtcaccagggcaccacaccaacatggtctatggaccctctctctggcaaatagagttatggtcatcaaacagcacctgcccagggctatggggagaggaagctggttggctttgtcacaaatgccttgatgtctctttcctcccctggggcccatctcttccagcctttgcatagagagagaaggcaggcaacaggacacaagaagattttcccagagtccagggtgttctcttacccctgaaatcgtttcttcactggatgggaaggcaggcacccagggggagatggcatcagctgcataaacaatttttctcctcagtagacatttacatgagtcaataggaatcatattctctctttttttttttttttttttttggagatggtctcactctgttacccaggctggaatgcagtggtgtgatctcagctcactgcagccttgacctcctgggttcaagagatcctcccacctcagcctcctgagcagctgggaccacaggtgcttgccaccatgcccaactaacttttgtattttttgtagagacagggtttcaccacattgcccaggcaggtctcaaactcccgggctcaagcgatcctcccaccttggcctcccaaagtgctgggattacaggtgtgagccactgtatctggcctaggaatcatattctcttcactgaaacatttcagatgacttaaaaattcaccttgtagaacttttaaaattgaaactttctggtgaacatcattagttgacagatatgtcattgaagtttcatccttcttcatttcagagtctgctggaagacccttcatttaccactctctccttcctggaggtgtggaaatactctacctgggtgaggctctcgtggctttttgtgccaagtgtccgtaaacttcaacttaattgttttaaatcctttgtggtgattatgcggaaggtcaaatctaacaggaagctccatgtccacttgatgtgtacttacttctatttttgcaccttgtgttgtttgttatcctgaattatgccagggctggtttgtgctaagatacttgttatttgacctcataataccagcatgtcccgtttgtataaccctctctgtagcttcttccagcatgtgatcatacatctacctaacctctcccattggttgaatttaatatactagtgaattttccattgcaaagatgaggttacgaatcatagtgttcatactcagaaggactttataaatattttgcctttttgaagtatatacaagaaatgaaaaaaaaaacaggaataaataaaaagaataaaaagagccaggactagaacctacaattcctgactcttgatcaaattgcttttctttttaactctagttaaatattttccattctttttaactcaagaagcctttgtttttgttgtcatcgttttatgattaacttatatctggtcctttagacatttagattttttctgttttatctctctctatatgtatatctgtatatatatttatctatatctatatagagatatatatatatatataaaataatgaatgaaatggactgtttgcaacctcagatgtatttctaggacttagagtgattagcttgaggcgatggtagtttctgtttttggagtctctgtaggtctcagactcacagtctgtacttcttgttttgggggctaattaagtggacagtttcagtgttggtagctcatttaagccataaacatgcagaccatgtggaatcccattagtcaaaccttagcagagtgccttgatgagtacctccttttctttctgaattctattagttgatgctttgttctttctccccaagagccatatctcagctatttcttttcatttcttgtgtatagttcaacatctttctttctttttttttctaaacaggatctcactctgtcacccaggctggagtgcagtggcatgaccatggctcactgcagcctcgacctctggggctcaagcgatccttctgcaacagcctccctagtagctgggactacaggtgcatgccaccacacccagctaatttttatattttttgtggagatggggttttaccatgttgcctaggctggtctcgatctcctgggctctagcaatcctcccacctcggcctcccaaagtgttgggattacaggcgtgagctaccgtgcccgtgcccggccttacgtttcagcatctttcaatccatctaatacgcagtgccagggaaggtttgtgaaaacatttgaatcacagagtcacaaacagtgagaatagctgcagttatgtttgtgatgctctaatgaacttacaaaaggccaggcctagtatttcagctgtgtccatgatgtctctgatggaaatggacaggtaacatgatgtacacaagcatttgactgttgcatcctttgattgggccatgttcatgcagccagcctgggaaagcaattagtagttttaagcatgggaaatcatataaaagtaaactaaaattgcatttgaattaattgatgaacatgtttgcttgaccatatcctgctgttaggcgtcttcaagttaacttaagtggttgataaaactttccaaaaagaatactatcaactgctgagcacctgttgtcagagttgtgggtaattcgcaaaggttttcaaatggaaaagttgttttctcctgctaggaagcatggtctcagatccacttctaaggtcagtgtgaaagggaaggcaaattcactttgagcaggggaggcatgatctggaagataaagcagctaggagtatagactagggggctgatggaggggaacacctatcacaatatgtgttctcacaccaatggtatatattttccacacatttagattctccatgccactccttatctctttagtgcagaaaacggagaggaggttcagtattcttaagaaactcccatgattgctttgaggcaatggatttaacaggtatctttatcccttatttacgcactgactgtggtactgagtcatccctggtgtttctggattttattggcaatgccaagagagcaggaagactgggacgtgaactgacaacatttatgattctggcagcttgacatcacccaactgttctctttgtttggttttgcttcagacttagtttagttttgttttttaagggctggggtggaggagagggatttgctcttgcagttttcctttcaaaccaaactctttcaaagccttttgcaaactcttttatggattttactcactggttgagcaagagttacttatgagatgtggcttcggcattttcacagtgtccataaaaaaatgtatattactatgcattgcacatttgccacttagaatttctgaatgcaaattaatcaacttgcagctgtgactaacaataaaacacaggataatgtacctacagaaatgagggcattggaaatccgctctcaggtggccatcgaaaatagtcagcctgagtgttgctacctgttttccataattgtgtagctttgcctttccttagttaatctgttcaataaactcctctgcagaatccaaatgcttaaattcagtttctttttgtctttatggtgtttttcattgttaacgtggcatcggagtagctcgacttttgcatcatgataaattcataacccaagagaaggcagaaaacataattattatcaattgcctctctcctggaattgccattggctgagtggaacaaaatacgaacttaaggagtagctgattcagagaaatccagggtaggaacgggtcccatcttgatttcaatgtcttttttgaggaggccttcccattgcacttctcttcaagtttgcccagatagtaagttctactagacatgtcaattttttctgaggtctaatcttgattttttttttcctgcacaatatggaattcagtgtttttatttaatcattcagtaagtcttgactgcctgctatggaggttaagccctttactaagttccaaggatgtacctgtgaataaggcaagttcctttttatcattgtctttgcagtctattaggggctacacaatttaaacagagaatatatataaaatggtagaaagtacaagtaagtataccttattttttttaaaaaaatgaatgtggtatttcacccacagcctcaagaatcactttccttaaaattgccagagtaggaaaacttacaattgaagaatttcaggtatttatgggaaaaatagtattagggcaattgcggtcaaacacattcgtctgttcgttcaattacagcagtaaggatggaagtctaaagagagtttctacgtgatcttatttatcctgcatttataaatacacaaattcttgtacaattaactcagtttttcactcctttcttgcttgcaacttgtcaggtcgttccctccccagtagttgtgaacttctttatgctagcttcttccatcaggggctcacaaccagggactgtagaggtttgcagaggtaaatcttggtagataaggattttatgaaaagggagctcactgttggtgaaaaatccttgtttctacagattttgggtcaagataagaaaaattaacttttaaaatctgaggaatttggagattatctccaggggctgaatatatttttatgggagaaataaaatggatagttttaaacttgaatttagtttttcctaatggaggcccttttgaagatcaaatgggatctgtaaaaactctttgaaaaatgtagactgcttcttatgtgattcttactggtctattatttatcaagaaattaaaaaggaatgaatatctgtagctgtttttctttttctttcttttcttttctttttttttaagatggagtctcgctctgtcaccgggctggagtgcagtggtgctatttcggctaactgcaatctctgcctcctgggttcaagcaattctcctgcctcagcctcccaagttgctgggactacaggcgtgcgccaccatgcccagctaatttgtaattgtttgtttctaaaaggatattcagtgcttccactgtcttttagaagtctgtagaaggaaggccaagaaagaaatacccattattttggctgaagatgatcactttagctgaaaccagttcaggttcaaactcagacattggtgctattttcatatatctgaaatgttctgaaaagattactgacgatcaacatgctgaactgacatttcacagatatgcagatttattcatctctgttcaaggtatgccttttccaatcataatagccacgtagaggacattaaacaaatattttattgtggtaaaaacacttaacatgagacctacccttttaacaaatttttaaatatataatttattattattgttgactataggtaaaacaggacatttttaacgtgctgtggtggcctattggactttcagcctccctgggtgtatttcgctgtatatgtgtaccatgtcagcttaccctagaatttgaaacattttcctttgatgattaaattttttttttttttttttttgagatggagtcttgctcttttgcccaggctggagtgcactatcgcgatctcggctcattgcaagctccgcctcccgggttcatgccattcttctgcctcagcctcccgagtagctgggactacaggcgcctgccactacacctggctaatttttttgtagttttagtagggatggggtttcaccgtgttagccaggatggtctagatctcctgacctggtgatccgcctgtcttggcctcccaaagtgctaggattacaggcgtgagccaccgtgcctggcctgatgattcagtttttaccccaagatgcagtatgcctcagtctcactaaaatatgccaatatgttcttcttcttgaggatcagggctgatttcttctactgggaaaatgtatcccctgtgtttggccccagaggcatcagggtaacctgctctcttccattctcaaagcagaaacagtgttcctaacattctaagcctgggaataggatggcaggtcgtgggaccagcattttaattacctaaagggaacttattgattttagtccagaacacggtggggaggagttcatattcttttttttttttgagtctggattttagaataaattcactgtgtacatagctattccatctttaaaaacctttgtgaatgttaatatacagcctttataaatttgaggtataatgttcaaaatgctctaatccctaaattttccagtctaggttattatacttttatgactattcattttgatgtaggccttttaaaatcaattcctccctgttattacaatgctgctttatggtatttgtgatatatcatatgaatatacttgagggtcatgagaagttcatatgtgtgtgtgtagtgtgggccccagactttcgccataccgctggctaaagtggccatgtttttgtacgtctctgcagagcttacaagttattcaacagccagatttctattctgatatgcccttttagttttcaaagcatcgaaaaagggtaatctttagaaccgaagtatttggaaaactcctagacttgaataaggtatttttgaatttgaagagctaagaacccatcaaatcaaaatgctaataattcttccaagtcaaaaggtaactctcattttattatgcattgaccaccattcactttctgttggactgcttttggaaaaagaaccacaagtctctatttttaaaatagaggtacaatgataaaacaaaacaaaacaaaacaaaaaaacaacaaaaaaaaacccacacaggtctcatcagccaagggatttaaaaatcaaatttaacttcaaaaaactgaagttgatatagcaggatcttggagatgcagtttcttcacttttcttttttttctaactgagggattaaggatataaacccaacttcaaatttctttctgggtggtcttgaaaacttaacagtaggtcctgtaaagaggtgggggagaggaaaaagaaatcctttactctcatctgctggttttaaaatgagaaaaatacacacacacacgtaatgatgttcgtgatgttaatggagggaaatatcataaataattaagaatttaaaattattataaaatatttagtattattgttgttactgttattagtaggaaggggccttgccatgcttcctttcttcaaacagctcagtactttaaaatcgagtgtggctgtgtttgtcagtcgtggtttgtgttctttgatttgttctgcatgttcttcttttggagaggatgtgtcactttgccaatcttggtccttgctgttgtctggtggagggaaacaagcctgccaggccggctcatctgacccctggtggcagggagtggaggtgcactcaggatgctcttggggaatcataaaggaggttaaagaaagggacagcagaaccctgacaatccttgcccctaagcatggaaaagcctccggaccgggtctggagtgcaacagaggcccctgaccttgtctctagctctctgtctgcatcttcagcgtggcttcactggtttctaagtctctggtgtcttttgtcttttgcagccggcttgcaattgcctccttctaactctcaaaaggatgcatgggatgggttcagtgtagtcactgttgtgccttttggacaaggctttccagccaggccaccctgtttacaaggctgtcctcacgtcatgggcgctcatattgtccagactagatggtcaaggtgattgggggaaggaagtcacagagccaccaattactaaggaactgcccagagatcctgcctcactgggaacctgtgagtgggctggtttcccccagcagaggggctgtagcatagcaggtacccacaggagcctgggcatggcctttttctctaaagggctggatagtcaatatttttagctttgtgggctttatggtctctgttgcaacttctcaactctcctgttacagcaggaaagcagccacagataatatataaatggacggatgtgttccaataaaactttatttataggaacaggcagtgggccagattcagcccgtgggccataggttgccagcctctgactctggtgttcagatcacagactttggatgtctcatatctgaatctttctaatctcgtgatagggcaaggtaattaaaatgttaatacgttagttttctcactgtcaatgtgttctatgacatcatttatgcaaagcatacaaagctgagaataaagtctcagcaaatgctagtttcctggcctccttatacatacttacaaaggatggtgggagatagtttgagatttgaggcctctgaagaataggtgtttttgtgatgattttggcttttcagtttgacagttggctttgcttttttgacagacacattaagagcttcaagggtcatttcatggtttgtcctttccatgtcagggacacctttcacgtggccattttaagcacaggaattgccttcaagtagtttactcgtacgaacttgtctgtaatcatctttccccatttggatggtgggttgcccattttaattcaaggtttgtctaatgtgttagtgcatattcttggctcaagcaggataagacactagtaaccatgaacctgtatatcaaaaagcgtgactagagtttcatagttaaacatgtgctgaaatccacagtggacaccagagagggtcatggaatctgggaatggatgacttgtcccatgatgataatatctgtgttcctacggctgggcccggtggctcacacctgtaatcccagcactttgggaggccgagatgggaggatcacgaggtcaggagttgaagaccaccttgatcaatatggtgaaaccctatctctactaaaaatacaaaagttagccggtgtggtggtgcatgcctgtaatcccagctactcaggaggctgaggcaggagaatcacttgaacccaggaggcggaggttgcagtgagccgagatcacgccattgcactccagcctgggtgacagagtgagactccgtctcaaaaaaaaaaaaaaaaaaaaaaatctgtgttcttgcctggcttattgagctccatggtaaatgttcagaggctgcaggaatgattcaaagtctgactgatttatgtgcattgggcattttgttgatgtcattcagattaatgatggcactgaaaatgtgtaatggaaatgagaagtttgtatcctgcctgctataccatgattccaatttaagagggggtaaaaatattgcactttttaatctattgttttttgaaagagactgtttaaaacacgtaattttgctaagttatggctcatatcgtatttgttattttggttttgaaaaattgagtaggaagcaattgcgttcttaaatgacttgaacatcaaaggcaagtagtgtcttgttttaggagcagccaggctcctatccctctgatccagccaagtgctttcacttggtcccactctggggaatcaccagtggttctcactctgggagaggcccctggttgacctggaatgacctagaccagcagtcacaagctcctgcccatggacaaaatacagccggtacctctttggctatggcctgcaggctcagaatagttcttacattttcaatcatctgcaaaaaagaataaagaggagaatattatttcttgaaggaggaaaatgatatggaattctgatttcagtgtcataaagttttgaatttcatcaataaaaaatttgcagaaatttgtttttctctcctgttatgtaaatacctctgtaatagcctcggttttgcctcttggctcacaaagcctaagttgtttactatttagccctttacaaaaaaagtttgccagcatctgatgtccaacaacaattttcagtcttttttgtagctcccaaattctctcattaaaccagatcccttgagggaagcctggtttacaaaatagattaagtgatgtggctgtttggagcaggaggctgtggtctgagtcttgctggcctcaaccctcaactcacttccacaccttacctcctggggataaggctgccttcgtctagaaagtgcctcggttccagcttggaaatatccatgtacagtcccttttttgttattccaaaacccaaagagatctgaaaagcaaaaacaaatttattgtatatttatagcaaatttatttggtggtgaaatttgacttcagctttagcgtccctgtttctcctttctagtgtgaatgttcattttgttttgtttgtttttttgaggcaaggtctcacttcatcacccaggctggagtgcagtagtgtgttcacagctcagagaagcctcgacctcccgggctcaggcgatcttcctgctgtagcctcccaagtagctgggactccaggcatgtgccaccatacccagccaatttttgtgtctttgtagagatgcggtttctctaccatgttggccaggctgaataatcatattttcactgaagaaatagaaatgtcattgttataggatgttgccccaaaccccgcaaaggtattttgtaatatgcagtatatgtgctaaattactttttttgttgttgttgagatggagtttcgctcttgttgcccaggctggagtgcagtggtgtgatcttggctcgccatgatctctacctcccaggttcaagcgattctcctgccgcagcctcccgagtagctgggattacagacatgtgccaccacacccggctaattttgtatttttagtagagatggggcttctccattttggtcaggctggtctcgaactccggacctcaggtgatctgcccaccttggcctcccaaagtgctgggattacagtacctggcccaaaatacctttctaacatggaggaattaggaatactgaaggcatcggcccccaagggtttgatgtgctcttgtccccaaggcctgcagatttgcatcacctctccacttcgtggactcctcgtacctgcctgattccaggatgctctaacctggccacgcatcccccgtggattctcagctgttgtgtgtttcctcctcaggtggccactgtgtctggtgctcacccacattttggttcatcctgactttgcctcagcctccccattctgcatttctcccacggcttctcccagccctggcccagtgacactgtaatgtggactgtggcatcccctgagtctaagctgttgaccagctcttgatggacagatgctggcagagatggggaaggtgctgttcccttcctcctgggaagggcaaagaaagcagggtggtcctcccatccccgtgaggaaggaagagcctcattcatgctgagaccctgatggagaactgggtccagggataatgttttgtgttcctgctcatgggactggtgtgttattgtcaagggatcttacaggccttgcttcccaggcccctctatcccctctgttcttgcttaggcattagtgatttggttcttctagctttttttctttttttgagacagggtctcgctttgtcatacaggctggagtgcagcagcgcgatcttggctcactgcaacctccgcctcctgggttcaagcaattctcctgtctcagtctcctgagtaggtgggtctacagtcacatgccaccacgtctggctagtttttgtattttttagtagagatagggtttcacttgttggccaggctggtctcgaactcctgacctcaggtgatccgccagtctcaacctcccaaaatgccgggattatagatgtgagccaccacaccaggctggctcttctagtttttgaagctcacttttcttttttcctcaagactcacagggaatgggaccaggcacctgtctttatacattctcaaagtccatggtgacgatgccatgctccggttctaagccagttggacagacacaggcaagggaagctgtcagtgtgggtgtgagttgcagtgtaagggtagtgggtggaatagcgtctccccaaaatccacacccacacagaatcacagatgtaacgttatatggaaacagggtctttgcagatgtaattagctaagaatctcaaggttaaatcattcaggctttagagtgggccctaaatccaatgacggttatcctcatgagaagaggaaagcagggggcacagtggtgggtgtgcctgcaatcccagctactcgggaggctgcggagggggcatcacttgagcccaggagttcattgccagcctgggcaatatagcaagaccccatctcttaaaaaaaaaataacaccaaaagacaaaacagaaaaaggaggagaggacacagaggagaaggctctgtgaagtcagaggcagagattggagtgatgcgtctacaagccaagagatgccacggtcatgggcagcccccagaaacgaggagagaaacctggcacggtttccacaaggagtcacccctgccaacaccttggtttcagacttctggtctcctgaactgtgagagtcagtttctgttgagcttgtgctgatacgctagggcagccctagcacactgccacatctggtttcccggaggaacttcacagggtctttgttctttatctacagtctctggaagtctcagcagcctcctgtgttcgcaactgtcattccagagcagccgtctcgtgttatgcatttgcttactcataagcaaatatttcacaagaacctgcgagggccaggctgggccaggcaggtattgcaggtgcaaggatctatataagacagtgccctttagaagatccctgtctcattgagaagcgttgagtaaatgggtctctctggtcattctctccagaacatgaagccaaagggctgagagggagagactccaagaatgaattagtgtccagcaaggtatcgcttgtctcaggatgacaacttgcaatttggggatctctcaacgtcctgacctccatctcagtgggcatgttcctcacctggctggctgcccctgcttactgatgcagcctcctgtcacacggtactcacctctattcactgtattccaccaacactggccttgggagccagcagtacccccattgtacagatgaaagtcttgtgactgtcaacattaaaatgagaatgatattgacccatgatacttacccacctgttcagtggattcggtgtgccgtcagcatggttcccagcacatagtaagtgctccgtaaatgtcagcatctattattatcatttgtgtttttttttccccttctctgccttcctttctctccctccttggtctgcttcctcctgttgctatcagagcctgcctgcctcatccttgttccagccttgatggtgatgatgattgtggttgctgttgctatttgtttttttggtttgtttgtttgttttgagagggagttttactcttgtcacccaggctggagtgcagtggcgccatctcggctcactgcagactcttcctcttgaagctggggaagttcaagcaattctcctgccttaggctcctgagtggctgggactacaggcatgtgctaccatgcctggctaattctttgtagttttagtagagatggggtttcagcatgttgtccaggctggtcttgaactcctcagctcaaatgatctgcccacctcggcttcccaaagtgttgggattacaggcgtgaaccaccacgcccctcacgcgcagccactgttgctattgatgattattatgacatcattgctcagattcacttggctcagagagggcggagtcagagtgacccaggtggtcactgctccccttcttgtccatcaaatcagctgcctccaacagcattgcctggcagcgtcacgtagtagccctctccctcacaaggcttttgaggcagacaaatgccactgataaagcaaaagcaaatgttttgggtgaattccccatagctacactagatttgaggctgagaaatggaatgcctgtcattgttgactgaaaaatacagctctcctaatagagtcttggtgcaggagctgttagccttgccgccctgcagacttgaagaattgcgacgtcggcctaacataattttggtaactttgtctgcttctgcctcgggtagaaataattcagatttcactctccattttctttaatgggctaaacagccactttgtaatacctgtattttattagacataattctggatattgtttctgcagcgtttttgaaaagacaaacctgagagagcccagctatttaacttaagcaattttaaagttatttgtaaaatgatatgctgtcttttttgacccagttactttataaagctacattctttggcaaacattaacacaacttctccgtgtgtgggctaaataaatattcgggcaacactgattgagcactgccttgggtaaataattctctctccacacatttcctagtttataatgaggagttttcttcgtggtctgaccaaatgtaacattccattgaaaatgagacataaatccttgagtgagggagacgtggaaccagggtttgaggagggttattaaaaaggtgagggtagcagggtgacctcctgagtcccctgctctcccgagccttctctcctctctggaacccatggctaataggggacaggagagagcggaagcagaaagaataagagatatgaaagccagccgggcacagtggctcacgcctgtaatcctagcactttgggaggccgaggcaggcagatcacttgaggtcaggagttcgagaccagcctggccaacatggtgaaaccctatctctactaaaaataacaaaattagctgggtatggtggtgtgcgcctgtaattccagctacttgggaggctgaggcatgagaattgcttgaacctgggaggtggaggttgcagtgaactgagatcgcaccactgcactccagcctgggcaacagagggagactgtctcaaaaaaaaccaaaaacaaaaaaagagacatgtgagccttcccttccctctccccatcctagcctcctctcacccaggtccattcttccactgtcatcccatgatgctctcttgcattttaaagtttggaagcccttattcctttgttttgtttttgaaatacaaatatcaacatttttattgttctatagtaatacacgtttcttctatagtacattaaatcacaagaggtaatagtgtatctactaacacctatacttttgagtagtgttgagtgtaaatgatattttgaaatatctgcagtaactgatgtgatatgcaaacatctgtgatttcttttaatttttattaattttcattttttaaaaaactttagtttctggggtactcgtgcagggctgttaaataggtaaatgacatgtcatgggggtttggtatacagattcttttgtcacccaggtcagaagcatggtacccaataggtgctttttcggtcctctccctccttccaccctctaccctccagtaggccccagtgtctattgtttccttctttttttgagacagagtctcactctgtcttccaggctggaatgcagtggcaccatcttggctcactgcaacctccacctcctgggttcaagcgattcttgtgcctcagcctccggagtagctgggactacaggtgtgcaccaccatgcccggctaagttttgtattttgcgtagaggcagtgtttctccatgttggccaggctggtcacgaactcctgacctcgagtgatctgcctgcctcggcctcccaaggtgctgagatcacaggcgtgagccaccgcacctggcctattgttcccttctttatgtgcatgtgtactcaatgctcagtttccacttacaaatgagaacatgtggtagttggttttctcttcccgcattaattcatttaagataatgaagctcctgtccttgacccaatctccactctaccgtttgatgtccagtgtggactgcccctctgaaagcccttcactgcggcttagcctgtggtggaaggtgtccaaggtggctggaacacctcctgctgggggtgtcagtcttggctctcctgttttctgcctgtgcaatggtgggtaggtcccttgatacctcgtaacctcagcatccctgtgggtgataaggagatgataatagtctcttcccgatgggggttaaataaaataattctcggagtatgtgaagcagtacatgtgaagtgctcagctttgtgtctggcacataaggaagtggtcagtgtttaatgttagggatcatagatgctgataaattgccgtttatggcatatttcatgtattgcctcatttaaacctccttgcaatctgtatgactcctgctgatgatggggaatttgagactgtgagaggcttggcaaaagatctaagctgtgaagtatctggaataggattccaccttcagccctgccttaatgaagaccatggtcttgccacattgcatctccccaagatttttatggttctatttttagtcacgttggcctgcgttggtaaatttacctttcctggtccttttgagtaactatctctggaaaggattaagtgcagtgatcaatcagcagcaaagtcctggaagaaacccatttgttagtctctgggcctccccaggccttatcagggcttagccttcgagcagtagcaacacttgcacctgcagttactaattcctgtggaatgaagtaggcgggcccgaaatgtacagcccttatccagtgaattctcataggagcaaaaaaaagtgttttctttcccccttggagttctgtttcttcttaaaattagctatttctcatacacaatagggacatattcataaaaaagggaaaatactccaaagttgaaaaaaagattgaaaaagaaaatcctccaatatatatctactcttagcattttggcacatattcttacagtagtttcaaatgcccaggccattttgttttattttgttttgttacaattgtggcatatgtactcgtgatggatttgcttgttatctctaaattaattctcctcctgcaattcaaatattccagagatatgtatatttttaacacattgttaattatcccatatggataatagtttcttttctctcttaacattttaaaagcatgcctccaggttgttctagacggtcctgaacagtgctttgaatggggacatgttagtaaaccaatgagaggaaccacggtttagttcatcattctccttctaactgtatttttaggttgtcactaactcttttcagtcgtcatttccatggccacgaacatctttggttctaaagcatttttcccatttaaaattatttctatgggattgatttgccagaagtagaatttctaggtcaaaggtacaaacgcttgagaagtcctgatacatattaacttgggccagaaatctaccatgtaattgagagcaccttgagcttggcttcagagccaggatgaggacaggaataagtgggccttttgatttgaaatgttgagatacgaatgtattctagatgggccaaataaccagcttattttattttaaagtcgagtgaattttctgcctcactaatgtgcatgtcttcaaagacaagtagtgggaacggagtggggatttgtcatcccatagaatgccaccacatggaatcggtcctgaggcttctgaaagcagttccaaatttgaatgtttcctaagttagttcttgcggtacagcgcagacaatattcttcctcgacaatagctgagacccaagtgcctgggcgcttccaggtcataattaacctcttcaaaataagagcaaagaaaggcaggaaaaggtcctctccattccagaaaggagaacaaagagggggaattctaaccctcttgccacctctgttctcgtccgttccatattaagaagcattcaaagactaggatgccattttgcaaacgtctcattctccctgaatggtaaggctccacgctttagcacaagtggtacaaatctgccttccctcattcttttttgcagatcatcccgctccccacccctttctttatcatggctcatttggagcatctgtgcattttttaaaggctggattttctttctgttgccattgaaacattgcatttgtacaggagaactacttaatggcacagtttgttattacatggaattaaatacaacctatttaaatcatgtaccgtgaaaccaaagagctgtgtatggaaaaagcctcatataacccagtttgccaggtcctaactcccttcatacatatactaacatgcaaaagacctcctaccttttttttccccttctgtttctctcttggtataacactaccctgtttttgaaagtacttgtactgctaatatattctttaaagaagaggggggaaacctgttggtcccctcataaaacagttaacaggaagcccaaggcatctttcagtgccatttttggctgatgtttggaatggttccatcaatcactgctgttcatgtatagctggtttttatgtcagttaaaccatcttccatcaagttggtgaagcagagtcagggaacaagatgaatagcaaaacgtcttctgtggcatggaaaaggctttgcttttaaatgcccgtgttgatttcttaatattttcaacttcctcttctgaagccagttccccccgaccatcagtcatgagtccgttcttttaaccttgttcaggtggcgtggggcggtgtgtttggtggggagtgatgggtgcttgcctggaagtgcgagcaattgatcagctgatgaggggtatttattatctgtccctgactcccgagagaggaaataaatccttggaccccagagtgattttcggagccacaagaatgcaagatgtcctgtttccagtcagaccatagcagtatcagtctgtgcagttggaatcttgcatggggaggtgtttttatttcacacaagaaagaatggcacatctttccttgaaagatgtattttgtatatcttaatgtcagttatgtttacgtgtttgctgctcagaaatcaacaggatttctgcccttccccagccccctttttttcagcccttcagagaatatttgttgagtgcagtgtgtaaaatcatggcggtgccaagagggggtgtgatgggtgtggccgcccccctgccagcaggaggaatctgttttcactgacattgtttggaatcaccaagcatggtgatgataaaaagcagttaaactttggtcacttttattaatacttttaagtccttagcgaacaatgcacccgttattacttgcacctagtggacatggttctcattgctgctgcccacctttcttttttttgccatgggtgcaaaagatgcctctggggatcccagaggactcagcattggtaaggatgcagtcctaatcctgaaggagggtacagctgaccagggaggtaacacatgaatgcagctgatagggccagttggacccagatttcaactgcaatctctatttccttcggatctgttgcatctgctcaaacactagttctgcaatttcccaacacctgccccctgccccttataaaagctcatggttccatgtgactttccactcctgcgtctctggccttggggcaggtcagtccgtggatcacctcactgtcctagggatgctcttctggtccacactgtgcctaccttggatatggagttccacttgttcccttacctttcacccacctgtgctcctcacccaagcaggcattgatggaggtctcatactttactgaagatgtgaggaaagaggacacttatgtagaacccaactgcaggtggagccttggcgatccatagccctctgtaaagtggggattgaagcacatatcttgcaaggcttgggcattgattgcagggagtaatgtgtatatgaatcatcagctatgcaacataatgctgatgctaagtactaacattgatggagtgttggcatgagctgggcagagtgctccatcctctatgtgtgtattagttcattcttgcactgctataaagaaatacctgagactgggtaatttatttaaaagacacctttaattggctcacagttccacaggctgtacaggaagcatgatgctagcatctgcttggcttctggggaggcctcaggaaacttacaatcatggtggaaggcaaaggggaaggaaagcatctcacatggtgcaaacaggagcaagagagggagcaagggggcaggtgcaaaacacttttcaacaaccagatctcaggagagccaactcaccacacagcatacgtgctaaaccatgcatgagaaatctgtccgcatgatctaatcaccttccaccaggccccacctccaacgttagggattacatttggacatgaaggctgggtgcggtggcacactctgtaatcccagcactttgggaggccgaggcaggtggattgcttgagctcagtcgtttgagaccatcctgcacaatacggtgaaaactcatctctactaaaatacaaaaatgtagccaggcgtggcggcacatacctgtagtcacagctactcaggaggctgaggcaggagaattgcttgaacccgggaggtggaggttgcagtgaggtgagatcgcaccactgtactccagcctgtgtaacagagcgagaccccatttcaaaaaataaataaataaatttgacacgaaatttggtggggacacagattcaaaccatatcaatgtgaattaaatgacatcattcagtcctcaggacaaccctctgaggaagtacttatgccccccggcctttttttttttttttttttttgaggcagagtcttgctccatcaccaggctggcacgatcttggctcactgcaagcttcacctcctgggctcaggtgattctcctgcctcagcctccggagcagctgggactacaggcacgtgccaccatgcccagctaatttttttgtacttttagtagagatggagtttcaccaggccagactggtcttgatctcctgaccttgtgatcctcccacctcgacctcccaaagtgctgagattacaggcgtgagccaccgtgtctggcgtcatgccccgttttatagatgacaaggcatggaatggttaaatgtctttcccaagctcatggagtggtggcggtggaggtgttgtgaatgtgaacccaggaagtccgcctccagagctgcaggcattaatgcaaagctgcactgcctcacgaggtcgctgatgcactctcattccttttcctccagggactcctgcactttgccaggcgtgggccagaatgccactcgtattgtttatcttaatgcttagtgatagtagctacctccagtgcacgccgcattagcctctccaatgagtttctcctttattttaaatgtaaatctagagttcccttaatccccttaatttttagtacgtggctctgagggcagaaacattttcaggagcagcctgggctgagtttttaatgtggcagcagcctcggctggtttcagcatgcaggtgagaaggccgttcatctggaacttgggctacccaacagtgcaagtggggagatcagagcatggaaaatgtttttgtataaacttaggtggaccaaaatgatcatttcaacaacatttcggacttgattttttgtatttatatggcccctttcttcccaagaattgaaagcctcaaactagaacgtggcttttgaacggtgaacattccacaaacatttaatacagagatggctgtggggtgggggctgggggctgggggcctggaaggggagaaggggcaccagaaggagaaatgggaggaaagggcgagtgagatagcaaagagaactcagaaagtaataaagccctgcagtaatcagagggctgaggccaggtccccagtgagcggctgaacacacagtgattcaaacccactccagacctgtgttcttaatcattaccttcacctggagggacagacctggccttgggcaagccacccccactccctggctctgtgaccttggcagctgactggccctctccaagatcagtttcctcatttgtgtaacagtagtaatctccaatttagggggctgtatggatattaaatgagaaaacacacacagatcatttctttagcacaacgtctatctggcacattagcgagagctccggaaatacccatgccagggtcacaagctcggttctggagctggatggccggggtttgattcttaactctgctcctttctagctgtgtaactttaggcaaataatgtaacctccatctgcctttgttttttcctctgtaatagaaggaacaacaacgaacaacattttttttttggcaagattaagtgagatcttccatttgacatgcctggctaattggcagtgcccaacagatagaaactattggtattgtaaggactgcttattgggtacatatgctgtgccatgggaggtggaggtgctgtcatgctgaacccctattaacctcaataggaaaggcaccaggttcaagagctgaagaagacactcagagccaacagatagacatggggttttattaggaggttacatataggggagagagtccagtgatggcgggctggatagtacaactgcccaccttacatacagaaatggtccagtggcagtaggctggacaggatatccacctccctacagtccagtggtggcggtgggctgggcaggaaaaccataaccacctgcaaatgtcatgtggtttatatcacaccttcacttaacaccctccccctaacaacctctacctggcaatcttcatttaactccaaactcaggacctcaatcccctgtttggcctgtgttccacgggacaggcatggggcacagatgtctgttatatataagggacaaatctctgggttggtcactcctggattccccagcccggaccacacattcaggtgcatctcccacacaggatcattctaagggtatgcttacgttaccgctattggggtgtgttcaccctgcaggtgcagagatggcaaccgaggcagctgaggatcagggagtggaataacttgcctagttctggctcttcccatctaatgtggctgcactagatgctgttaggaggaggaggaagcctacttttgttttttacccagtttctgttcaaaggtcgtatttcatggtgcctcatcacagtatgttcttatatgccctggcaaacagaaggtgctcaataaatgctagttcatctggtcccttaatgaatactctggcttcgtcatcttccctaggctttggttaatttggtgccctcttttgccatttctgcaacccttattcattgctgtcaactgctcgttacacagcattgcctgtttcactctgtacaggtgccaggcgtctctcagcttctcctctctttcccatccaactgagcagcaccaataaatagataagaaacctgaaggtctacatcaaatcagcttctattgctgcaaaactcttctagctaacttcattctaaaagctgtctgaaatatatttacttacacccgagaagattcaaaaacattaccgctgaaccccgatgctttgggaacacatggtgtccttggccacttccttgcttgttaccttgtccaacagctgattggcatagtacagatgtagacatcaagtaattctatcgttaaaggattagtcagcctctccctactccccacccacttatctcagtaaggtttagtcaagaagttggaaattaatggggaaggaaggttttgggttatgtgtggatttcatttatccatgctatctcttccctccattagcatggttaattaagagttgtcaatacatctttgttggagtatttgattattttttcaacagggaagattagaatgaagtcttcagatctggcaagtgtcatgggacttgtaaagtaaattgcaggttaagccctcattttgatctctgggatgagagcaagcaccgtttcattgacatgtcatcagctatgatctgagggagcacacagaggtgccctttggggaaagaggggcatcttgcacttgtctcccacattgaaagggtttattgcacagtgagtgtgtgcaagtgaacaaatagcagatgggttagaatggacagaagctagctctgagcacctcctgatttatgctttatttaaaaaaaatcatatgtatgtatatgtgcatacacatacattgttttgtatatatttgtcagatggaggtgtgtgtaaacaaataacagaaatgagttaaaattgacaagttagcttggtaaacatcttgatttataatttattaaaaactacgtgggtatgtatatacatacagacacacacacttcttcaccacctgaacaaaaatcccttttgaatcatccttcttgccttccaaacaagtacactagcaaacacttttcccagatggcaaatgactatgcccgttaggcatttcttttagcatttgtgttgacaatggcctttatttttccttctacttaagggctctcacgttctagaatacatcttaccagcgattaattatgccttgagattgccaggagacgtagacgagcttttattgttttagccactgaatatacctctagataacacaatacatatttacagtgacaagctttgtattatttataggattatagcaaatcatcaaaaaacaacccaaaaagggccacttagaccaacatccttatttctccctcggcttcagcattgaattatgcatgcattacaaatggcaataaggagtaaaggtcggtttagaacaacacagattgcaaaattacaccatttgtttaaacaacattcattattgattattcagcataggggctgatagaaacgcaaacagtggcagtaatatcatctatttacgtaggccctttataaatgtgggaccataccctctgtttagatcggaacaattgttcaaattttccagctctgttttgcaagaaagtaaagatgaatttggcatctacttccttgtgtcttttaatttttgaaagatttttggtattctccctatatcactgaagagagggaattggggttcagatggattaagtaatttacttaaggtcctgcttctaaagttataagtactctttccatcatataacacttagcatgtctgaagccagtaatttattaataatagtaatgataataattataaccatatctaatacatattaactcttattttaccagtccatgcacaaagtgttttgcatgtgcttcgactttcagcctttacagaaaccctgtgaatagacattattatgatgttcgctttatagctgaaactgaggtgcaaaggagttaggtaccctgctcaagatcactgggttagtaagtggcagaactggatgatggaagtcatcactgtgttccagtatctgcagaagtgtcacacttttgtgctttgaccgtcttctcatgacccatgaatgccatgatttcacaaacctgttcaaacagtattggtttaatggttgattcaaatgggtgttccaaagatatcgtaaatatatttaggatattagaaataagatatttaactttactaacataaaccttcaatttagttttaaagagtcttagagcagcataaacaacatgactttcaactaaaatggaatttactaaataaaacccaagagattaattgtaggagctatgtcctggtgacttgggaaagaaaaatgtaaggtggtaagcttacgtacatgctttcggcatacacttcccacctccagcctcgcattcccctggtacaactcaacaggcatttcattttgccttacaaattgagtgcaaccgggaagctcatcgcatagctgcttactcagaaaatctggtgtagtggcttagctagcataacttttgagaggtctctgtgtgatggtcttttttaatgtctttcgtgaagaattcttcttttttttttctgagacaatgagttgttctgtcactcaggctagagtgcagtggcgtgatcatggctcactgcagtcttaacctcccaggctcaagcgatcctcctgcctggtaggtgggactacaggtattcaccaccaagctcggctaaattttttttgaaactatttgtagagattggtggcagggttggagggcaggtctcattatgttgccagggctagtctcgaactcctgggctcaagcaatcctcccacctcggcctcccaaaatgttgggattacaggtgtgagccaccacacccagctgaattcttctcttgatcattaatccccaccccaccccaccccagaaaatccatgttatctttttgcttagaggttcaccacctctgttccatcacttttctttttcttttctttcttgtttttttttttttttttgtttgacacagggcctcactctgtggcccaggctagtatgcaatggagcaatctcagctcactgcaacctctacctcccaggctcaagtgatcctcccacctcagcctcccaagtagctgggaccacagcctcctgagcacccgggtgcatgccactgccaccatgcctggctaatttttatattttttggtagagatggggtttcactctgttgcccaggctggtctcgaactcgcaagttcaagcgatctgcctgcctcatcttcccaaagtgctcggattacaggtgtgaaccaccacatctggccaacttccctttctaagagccctcttggggctctgatatgcacctctcatacctcagccccagtcagggttgttgaaaacccactgtctgcccagaggctgggagcacatcttggtctgcctggtatggagggctgggaggaggattgcaggaactgcttaagaggcctcactttgcaagagcagttcaggatgtgtttccagcacagtttccaacatgtgccacccatggcttcccctttcatgttcctggcctttatgctaagttctcacattgttatttttacaagtcttttccaaggcctctgattttctagaccatttaatgtttgccataacccataagggtataactgtcttggcacattcagatcccccgtccccctgctgtccttctagtcagtttctggcacactatgtttatgagcttacagaacagctcctaggttttcttacttccaaaacagtgggcaagaacagctaccttttagaagcaggaaaaaggaacataatgaataaacctaaaggatttaaaaacttggaagacactaagaaactatattgccgagaaagagaaatgtaaattccgctggataaattagcgtttgcggttacttctctctttgttgcttaagcagaggagaaacagaagtcatagcaaagagagaggtagctgcaaaagctaatttatccaaaagaatttacatttttctctcttggcactatagggggcatgtttactctcctgatgtcttttggggaaggcgaggcacaaaagaagggcatcttcttccttcacacacacaccccacttaggaaaatacgtacacttgagatgccagagacacacccaagtagaacacatcccaagaacagtcaataataataatacccatcatttattgaacatccacaatagccagacatttttctagttcttataaatccatgtactcctcccagtagctttatgaggtcttattattctcattttattgatgaagaacttaaagttcaaagaaaggagtaaatcacgaccaggcacagtggctcgcgcctgtaatctcataatctcagcactttgagaggctgaggtaggtggatcacaaggtaaggggtttgagaccagcctggccaacatggtgaaaccccatctctattaaaaatacataaattagtcgggcatggtggcatgtgcctgtagtcccagctgctcaggaggctgaggcaggagaatcactcgaacccgggaggcagaggttgcagtgagcctagactgcaccattgtactccatcctgggcgacagagcaagactccatctcaaaaaaaaaaaaaaaaaaaaaaaaagtaactcattcaaggctacacatttactccatgaagtgagcacacttcagacttccagtcttgtgtggcctgtctaccacaccatgagacttcatgtctctcctaaatgaggagaaccaaagctggaaattgtcaccccctgtcagcccacagcactggtttctaaacctactggcctctaccgcttcacttctcactgtaatctctctgaccctaccttccagcttctcttgagaacttgactcttaaattcattggtgagaaaggaaatttttgctccaataaactgggtagctcagtccaggagagaaatgtactggactcagacttggaggacagagctttgtgaccctcctaggcaatgtaatgaccctctcctggcctcaattaactgaggccaggagagggtcattagcaaactgtcctttgctaaatgggactaatgggaagaatagtgtctgccaaataaggtggttgaaggattggatgagactgacatttcatttgcatttagtgaatacttgttgaatgactgaatgaatggttgatgtacagaaacatgaacagagagtagagcagaacattggtgaatggtagtagattgcctcagacgcccccctttagaatcacacaagctgtcatctgtgattgcatacctgtagaagtctctatcatttcgtagtctatgtaaatgttgaccaactgagttgttcagtgtacagactgaacaaccatacagggaatccctaatctcctgcactgtgagtcaaagagtcagacaggtctagatgcatttgcttcaggtgaggccaaggcagtctactcttaatggcacattaggctttggacttgaggccgtgtcttttacatttcgcagcaatcagaaggaatggggtcgccccatgaacttcttaaccacatacaggctcgtggcgtggggtcttcatctggctactagattgtttaaagaaggatttttgtgattcttctaggctgacacattgcctgtcatctgttgtttttctaatcttctagtaaacatttggaaagtgaaggtttaggcatgtatgtttctcttatgtaggaaggggaaataaggccatgagattgcatgagttttctttccaagtttgtgcagatctgcacaatgattgaaatatttgcaacctgtagagcagcagggtatttatttggcagcaaacagtattgatggattcggggaatgccatttgacagttacaggctcccgtgaggcggtgcaggctcctccgagccagggatggagctggggattgagtgacacaagactctttgggtatgtctcaaacaatataaatcaccagcaaaatctcactcctacaaggagaacctgcagggagctccgtgggaggcactgctgtttactctcctcattccccactgcaaccacgcaattaaaaccaaggaatggaatctgatgtctaccgcagcggttttttccatctccattccttctgcattgggaggcttaaaaaaaagaaaaattagatcccagattctttattcttttggaaggatttgaaacgattatcactcatgctctgctgctttgaatggaaaagtgatttgataactttcaaaactcttagccttctaagacttagattctggtactatctcatttatgtgacgtgggacaaatagccactctcttgcataggattttcttttctttctagaaacaggaactgagtatgtttccaatatttttttatttctcctaaaaaaatcagagactatatatataaaatctcacaaactttgtttcccagaaaaacaactatatttaaatgcagctcatactgtatgtaagtatgatgtaggaaaatctgttaattgtgtgacaattatgacttctgagctgctcatttattaaaatattctccctataattaaaaatattttatttcggagacatggctccattaattgcacatttcctaatgaagtttgaaggaagatttaaaaatcatattagccacttgtacaaaaacaaaccagtcatatcatagcattaataacaaaaaaattccactgtttatttaacgtaccagcaaattctaccgtatattgtttgctctccgtttggtgggactaaaaagggatttaaaaataggctatatacactgaatgtagtttcactggaagatttaatgccaacatgttcttttttggtattaacatattgcattggtgtgaaaactaaaatgccttcagcgatgatcttttcctttggaaaactagattcccactcggatgctacgaggggtaatctgtgctaagtttatggtgtgtctgccagggctctgctttaaaaaacaaaacaaacccttttggaggccttgacagttccatggaattcctaggaacagcctagaaggtgaatgatgcagcccagttgtttttattctgagtttggcaaaaatgatagagaagaaaatgtacttttatgtgttcgttcgacagttaaagagtattccagattcctccctccaaaaaaaaaaaaaaaaaaaaaaaaaagggcatattccctagccaaggcccacatggcttttctttactttaagtactcctcatattatcttgaccttaaagtttacagggtaaaagaaacatttatggaacagttaagaccagttagaacataacgacttgcctcattatcacactccacaaatctccactttacagagttcacttccctgcctgctttaaacatgtgtttggcctgcaaacagtgttactagtgctcgcatatggaaacagagaacttctcattccttacctcagacgtgccaaaaataagaatctttaagaactcataaagtaatttagcaccacgttaataaaagaagcaccattttgaattagttctgtaagtatgtgtttgagttagaaatagagttttaaaaaactgtctgttcatatagttcatctgcttaataagtaagcagctctttcaaatcaccaagctcaaataaaacaaacaaataatgggacaattggcaaaactctaaaaagtgatacaaaagaccaagggatatttgaaaaatgtttaaagttattagcagagaagacacaatttagaagagagactgtattccattttatttttatttatatttatttttgagacagagtcttgctctgtcacccaggttggagtgcagtggcacaatctcggctgactgcaacctctgcctcccgggttcaagcaattctcctgcctcagtctgccgactagctgggactacaggcacacgccactatgcccagctaatttttgtagagatggagtttcaccatgttggccaggctggttttgaactcctgggctcaagtgatccacccaccttggcttcccaaagtgctgggattacaggcatgagccaccatgttcgaccccatttttataaatgtaaaattaacttaggtttaaactattaatacacaaggttgagaagtatagaagtgggcattctaatatactgtggatgggaagaacaattgattttcatagttctgagatataatttggagatctctatcaaaagttttataaactttttttttacctaggaatttcatatctagaaaaatattgtaaaggaatatttaaagatatatccacaaatttatgtacagtgatgtttatgcttatattatttatagacttttaaaaaacttaaaatatttaacaattgagttattttatgatgatctaaactgcataggataaaatcctatgcagtttacagaaatgtaaactaagtgcttcgttaaatgaatcctagatcccgtgccttctgactgggtgagacctcccagcaggcgttgccagagaacttacacaggagcgtttctgctggaatcagctcgatgcctcttgaggacagagactcccagaggaaggagcaggcagccatccttgctgtgctgcagcctccacaggtgacacctcctggtgtgggagggacccaggtgaacagggtctggagtagacccccagcaaactacagcagtgttactgggaagaggggcctgattgttaaaagagaaacaaacagaaaacaacaacatcactaacaaacaagttcccacaaagaccccatccaaaggtcagcagcctgaaagatcgaagccagataaattcacaaaaatgtaaggctcatttacattacaggctcaggcctgtaatcccagcactttgggaggccaaggcgggcagatcacttgaggccaggagtttgagaccagcctggccaacatggtaaaaccctgtctccactaaaaatacaaaagaaattagctgggcatggtggcaggtgcctgtaatcccacctacttgggaggctgaggcaggagaatcacttgaacctgggaggtggaggttgcagtgagccgagattgcaccactgcactccagcctgggtgacaaagctatactccatctaaaaaaaaaaattagttatctctgccctttgggaggctgaggcaggtggatcacttgaggtcaggagtttgaacctagcctgggcaacatggtgaaaccccgtctgtaccaaacatacaaaaattagctgggtgtggtggcgtgcctgtaatcccagctattggggaggctgaggcaggagaatcactcgaacccgggaggtggaggttgcagtgagccgagatcacaccactgcactccagcttgggaaacagagtaagactccatctcaaaaaaaaaaaaaaaaaaaagttattgattaaaatttaaatataaattacaagtaataatgaaagtatgaaatttttattgattcataaatatttggttttaatcaaatatgatgtgaagctttaagtgaaattattgatattcgaagtttttttttgaatgtttaaatcatttcacattcacattttttaagtaaaatgaaacaacttgacattttagcatagaatgtttatatggtggccaaaaaagcagattggtatcatgctttatgtgtgttcattctagtcctgcacgtgtagaaatgtaagattttaatgtgtggtaaggtagatagatagatagatagatacatacatacatacatacatacatacatataaaattaggtaagaggatacttttaatgtatggtaagctatgattgcaccactgcattctagcctaggcgacagagcaagaccctgtctctaaaaataaataaataaataaataaataaatattttgtaaaaggtatcatagctgtataaaaagaaaagactaaaaagaaagccactcaaattccatttctcttctgcagatttttttttagttttgtatttcatctgtgattgactgtgtatgtatttttgcatatatacctgcaagcatttgtccttttaaccttaggaaaaaaagtctgattgcaactacgtgtttgggaatcagggagactatggaagaacaatctcagatctcagcttgaggctccacttgcaatatcacaatttctaaaacatgttgtatgtgggcccatttgccatgtgtgtgtgtgtgtctgtctatctatctatctatgtatctatctatctatctatatatatatatatatatatatatatatacttataatgtggtgggttctcgaatcacagttgtaattcacatttttctccaccaattctgataacttgcattaagaaattgactgtgtaagttaaattttagatcaataatgcaaattgcaagacctagtacaggccaaggcctcattatatctgagtagggctttaagaaagcaagaaagaatcgcttgaacctgggaagcggaggttgcagtgagttgagagcatgccattgcgctctgctccagcctgggcaaaaagagtgaatgaaactctgtcaaaaaaaaaaaaaaaaaaaaaagaaggaaagagggaaatatacatcctcctatccagggtgaattacaaatagtaccagttggttgtaagtggatttaaaattactttttactgctaatggggcatctgtcttcattcaacaaatatatttcggtctctgttagatacagtgtatctctgttagatagagagcattctgttagatacagagaatctctggtagatataaagtattctgctattctgatcttcctgttagaagatcagatttacagaagtctacatttgctctcaagggaccttcagtctgtttggagcaatctctttattaatttatttattcagtaaattttattcagaaccagctatatggcaaaccctagtccttatgctgaggtttcagagatgataatgggggcagatgcagccattcagttgacttcctgtggacaccagagatgacaggcccctgtccccagcttaccatccagcatataaggcatatatgcccctttccatgaagtataatctaatgagaacagttggagaaggtcaggcaaaggggacaggacaggaactcaggaggaggggatatttagacttacagacctgccctacctaaggtcccacagatggtctgtgatgacagatagcccctggactgctaagactcggatctttaaatataggcccatctgggctgtggggaggtgacagcctgagaaaaagtcattcttagatgcccttactctgttgatcataaaagtaggagctgaaattctcatagcctgagaagctatttgcagcattccctgagggctttgaaacactatcaaacaacaaggagagacaaaacagtttttagccctgctcaactctcatgggcttgccttattttttcagggcatgctctgtctccatcccttggctctgctttccttacattggtcttcttgggcatccgtcttccattccacagtgtagcaagccagaagctgggggaaacatggtgcgtgcctgtaatctcagctactcgagaggctgaggcaggagaatcacttgaacccaggagatggaggttgcagtgagccaagattgcacctctgcacttcagagcgagacttcctctcaaagaaataaatacactgtgtcctctcagcaagaccaggacaacagtgattctctttcctcaaagttccaatcagtgcccagggcttcatgcatattggacagacctgagtcatgaggccatctccgattggtccatccagggccatgtgctcaccccttaattcaggatgtggggtccggctcccctgaagtgcacagagaagaggggttgcccaaaggtgaatggggagaaggggatataagtgcaggacaggtaagaacagcaaatgctcattaacaccatgcagtgatgaaacgcctcttaatcaacccttgctggctgcagttgatttgttacttaccgtgaggttatcatagctttgcagagactttgtgatggggctgtcaacagagagaaagagagagagagaaagaaaagaaagaagtgccaccagtccattttgttccactcaaatgtagatcgtaatttttaggtttgtaattactgatgagaagaatgcctgagccagaacttcccagagatttatctgccacttacctggagtaagtagaaaggatatcagttttccccagtacacctgcctccaatgaagccaactctcaggctctagaagtctctgccttgggatggattcaccagtgtgcttctcaggctggccagtgtggaagcagccttgctgtatttcatcctttaaaaatacagcctgcttgccatctcacgacttttcccttaatgcaacaaagaaatatgtgtttggctgtgaaatctttttttttttttttttttgtttttttgctgtggagcgcaaaatgttcatttatctctggatggtttgtttctggccacctgccctaagtgtatctgaatattgtaacggtgatcacttcttgagtcttggtcattacgaagtgacatttggcatgaatttgctcatcaccacagagggccccagggacccacttgggagaaggtgagttatagcccacaagataacatttctcctggtgactgtcctgaaagcctactttgggccaccacatcagtgtgttgggagatgagttaagaggttttattcttatacatgcggaagaattatgccttcttgagccatgctcaggagatgtcagccttttccattgtctccccgcccccaccgccagccctgcttaaattatcccctctttttaaacaaaatatcctaatcttggaagtggcatatcatgttccttcttttttaagagagaaggagaaattcctgcagatcatcagggactgaggctaactgaagctttggaatggatacagtgctactctcagctgaaagcacaaatcacttccatcacgtatatgagattcctcttgcagcactgcagaggggtgataagcaagagttgatcgatgacagaacacccacccaatttcttgactcattcttcaacgggcagggtctatacatgtggtatggctgcaatgtttgttgataacccctacattcacaaaacgggcgcatgggaacttgtttgctgccttctgccatgtgaggacacagcaagaaagcacatacaggaagtagagatggagccctcattagacgccagatctgctggtgccatgatcttggacttcccagcctctagaactgtaagaaatcagtcagtatctttgtttctttcctttctttttctttttctcctttcctttctttttctttttcccctcccctccccttccctcccctcccctcccttcccttccctttctttctttctttctttttttttttttttttcagacagaatctcactccgtcgtccaggttggagtgcagtggcacgatctcagctcactccaacctctgcctgcctggttcaagtgattctccttcttcagcctcccaagttgctgggattacaggtgcatggcaccatgcctagctaatttttgtatttttggtagaaacggggtttcatcatgtaggccaggctggtcttgaactcctgaccctgaggcccaccttggcctcccaaaatgctggaattacaggcataagccacctcacccagccaagaaattaatttctgttgaatgtatgttgttatagcagcctggatggactaagaatcatgatgaaaagttgggttgctttcatatttagaaatatcttggaacgggcaggcgtggtggcacacgcctgtaatcccagcactttgggaggctgaggcaggtggatcatgaggtcaggagttcgagaccagcctgaccaacatggagaaaccccgtctctactaaaaatacaaaattagccgggcatggtggtgcatgcctgtaatcccagctacttgggaggctgaggcaggagaattgcttgagtctgggaggcggaggttgcagtcagctgagattgtgccgttgcactccagcctgggcaacaagagcgaaactccatgtcaaaaaaaaaaaaaaacaacaaaaaacacgaatatctttttttgtcagctccatgagggcacaaagttgtatcagcttttttttttcacagctgtgtcttcatcctaaaatagtttctagcacagaacaggactcagtaagttatttgtcaagtaaatagactccttaataaattgtctatcctgtatccagtacaatgcttggcctaatatacatccagtttcatttaatcctcaaaacacattgatgaagtgggtgttaatccctattttacagatgtgggaattgaggtgtagagctgttgaagaacttgcccagggttgcagagctctttcacaggggcagagcatgggctgaacaccagacctgtctcacactaaaggtgaaacaatttcccctgcatcaaactgtctctgatatgaagggtctacacactgtggtttgaaggtcagatgtggcctgtcatgtttttgtacagcccgagagctaagaatggtttttacatttgtaattgtttgggggaaaaaaccaatagaataatgttttattacatgtaaaaattgtatgaaattcaaatttcagtgttcataactaaattttaaaaacttttattgaaattccagagagatctgaagtagttttattggaacacagccctacacaccttcatttataagctatctgtggctacttttgcactatgccagcaaagttgagtagttgggatggagactatatggcccataaagcctaaaatactctctgctcctttccagaaagcttggcaacccctactatcatctccacgtctgcctttgttcttcttatttgtcccttccctctgaaggcaggatagcatagggtgaccataagactctctggaactagcctgcttgagtctagtcttggctctgtgctgactacctgtagggatgtaggtgagcttttttatttttctcaacctcagattcctcatcaaatggaagaaataatgagtatccactaccttgggttgtatggaatgaaccaagttaacttagctaaactcatcgcttccaacatcgcctcctatgtaataagtgcttgataaatgcaagttctattcttctattctctctctctctctctctctctctctctctctctctgtctccctctctccccctctctctcatagtgatatggtttggctgtgtccccatccaaatctcaacttgaattgcatctcccagaattcccatgtgttgtgggagggacccaaggtgaggtaactgaatcatgggccccagtctttcccatgctattctcatgatagtgaataagtctcacaagatctgatgggtttatcagagggttttgcttttgcttcttcctcattttctcttgccaccagcatgtaagaagtgcctttgcctcctgccatgattctgaggcctcctcagccatgtggaactgtaagtccaattaaatctctttttcttccatgtcttgggtatgtctttttcaacagtgtgaaaatgaactaatacacatagacacatacacacatgtacccacacacacgtaatttttgtatctaagaaaggggagaaatactttttagttgttctttctgcttcatttatgtgtggagtgcttaatgtggtcacacggatattaattgcatgttttcttgttttataattaagaaataaaaatgaatcactctgacttttcgcttcattttctgcatttgcacaatttggatattttattttgtagtctattaaaatgtgaaagtcagtgtaaagtgtcagtagctttcatgagtgttcttaaaggaaggccatctgattggaatgcattgtatctgtccttccctcttgctggggtcagcccaggactcgaggggaatgagcccctgaggaaggctcagtccttggcagcgaaatccaggcatggaaaccaagcctgagacatgagctgcaggacatctgacactgtcttttaagagacctgcctgtgaggtcctcatcctgctccctacactgcttcagatccacttgtccacttgtagtgagggatagtatctgttccacctgattgattgattgattgattgattgattgtgaggcagggtctcactctcattgcccaggctcatctctgcctgccgggttcaagtgattctccttcttcagcctcccaggagtgccatggtgcaatctcaagtcactgcagccttgactttccaggctcaagtgatcctcccacctcagcctcctgagtagctgggactataggtgcgtgcccccacgcctggctaagtttttgtacttttagtagagacagggttttgccatgttgcccaggctcatctcgaaccccttgactcaagcgatctgcctgccttgtcatcccaaagtgctaggattacaggcgtgagccgccgtgtctggcttgctccacgattttcctctatgaattccacctttcccatggtgggaccaaggctggaagtacttcacaaaggctccatttgaaaagtggctacaaataaaagggaaaatatagtattccttaaaaaaaaagtagcattctatttttccccattggtaagtagtacaaatttgagaaagtgtaaatttgaattccttaataatcagatctctgcaatgtgttttgcttttatcatcctgggttgccatcttggccaagtgtagattattctgctcagggtagccatactgagatcctggtgtgcacaggaaaagagctaacctttgtggatgaaattgtagagtcactacctgcatttgctgtagctcttacaattattttatttttggaagacatcgagagcatggtccaaagctgcataggttgcaagtgggtagaggcagaatttctctccaggcctggtggattctaaagctgtttactcttcacccaccatttcctaggtctggtttcttggttaaatacgtggaagagtggatggacagaaagacagattgatcagttctccacaggcttccccaaactggccaggtagaaataagctaagcaaataaatgacttccccattttataattttctgcaagtcacataagccttcatgttgtttatttcttggttttagatttttttaattataaaagaacattattatacattatttgaataattttttaaaattatagagctgtctaaaggaggcattaaaaaaaccctttctattccttcatctaattctatccctctgaggcaaccatgattagtattttgtacttcttgtacatcctccttcatgttaatatagatgtacacatatataagattttgttctcattttctgaaataagtggacacatactccaccatccccaggtagtgtacagtgtgtgccctttcaggctagtatgtacagctttaaatcattcctttacagagctgtgtaatattccacaacccagaggagcagcttgaagccagctaaagtatgtatatccaagtggaattaagagcttcatgcgtagtttcttgattttgattaagaatctttcttaatagatatgtcagacgtgactttatgctgcaagacatagcataggtagaaatttttatgtcacaggtgggcctaattaaccttgattaatgttctgcaaacccggatagactggagactcagaaagggacgcaaaagctagtctggttcccatgttagtccctgctctgtgagcagctgccacacagtcatgctgatggctcctgcagcagccattctggtttgactgtgctcgtgctgccctgtgacatattgtttaacacagtgagttatgacacagggagcgaaatcaagacttcagccaccgatttaacaaactggtgactcggagatcagcagtccggcattgccatcctcatcaaaagctctatctttatctaaaatttattagccaacttcaaacctgtttgccagctcactaatggaagccttttgaatcaatttgctcctctaatttaaacagcatttcaatgtatattgtcgaagcagaaaggagttgcagcttctggccagtagaattaattatttattatccttttcataaatactttccgaggccgacataactgaaaattgctcaggctgtttgaaaacacacacacacagttttccagtggctaatttgaaaaatgtcaccgtattagttttcatttacatctgtcaggaaacatatctatacataaggaagttttttttttttttttttactttcaccaggtatttttttgtggagtatgcatttaattcacatttacaaattggtttctgtttttaactaaagatactttttcagcagaaatgatgtgtatgatgtcatatctaacttttgatctcactggtatttgatgttaagcctcaaaatcatcaaattttttttacggcactgaaaaaaatacataaatctgcttgattggttcatagaaaaagacccctgtgattaaggtaatgctagtttttgcattttctcctagctgtcattggttggacacagtgatcctcgggtctcttgtgttttcacatgtcttgggaacagaagtgctggcagctttggtttcaggccatctttccaaggaacgttgtctagcaaagaaacttgcaaggtacagatagtgtctccctcaggagcagaggacaggatggctttctttccagtataataaagacagtgcctccttccaggacaacggtttggcagatttgcttgataaaggttggggtttctaagcttggggctcctcagccatgactgaaacgtactatgagcacggcatctaccgggctgttccacatcctccctgtgggactaggggccagggcaatgggaatcagtgcagaaataaagctcatgctgtttgctctgccatgagtaacgaagtcctctgtatctgatcctgggtctcctgttttctgctagcttcctcaaaacttggtagctaactcattaacttacaaggaagagggtgaacgtgtagacccttcacagtttgaaaaatcacctgatcaataactgagattatgaaaaggtaggaatgaaccaattatggcccaaaggctaactccagccagtagccttttatttatgacccgttaaaaaaaacaaaaatgaacaaaaaatccaaagaaggctgtgtgccagagacgatacgtggcccgaagatgaaggtacttaactatctggcccttcacagagaaaatgtgtcaaccctttcctgtttgcgttcaggtcaaatagttgcattgaaaggcctcatcttacaaatgaatcaatatttagtggtttgaaaatatgttgtttaatttggggcgattcaatatcaaattaagatttttaggtttatttatcgatctttagaattacatcaacattaagctaattactttaaattgtgtttttaagtaaccaagaatacatctgtggacgctgttctgtgccatcttgagtcacgtttttaaaacaattacctttgatgatttcgtatgttatcccattcacagatggtttttttcgtccacctgagtttcaaatctgttgtagtcctggaaattttgcttaggttgaaggaatgagtgcgtgtatcttgtcaaaggaaatcacaagcccatgtaaactcgctcttgcttccgtcacctcgtgctttgaaacataaccacagtgtgctgaggtttcacattgttacatcctacaagcgtgcttacctgcatcaccttgctgggctgtttcagcattggaatatcactgggaatctcaagttcccaggagccaaccacgagagcttcacagctcagaattttcaagatgtggatgtaggcagggagcctatgtagtaattcaagtaagcatctcttcttcttgttttccttataggatgatagaaggtcagtgcttgttcaccccagtgaggtggagcctctgaggtgggaggttttctctcatccttgagtttatctttacttcctggtcattatgcaagttaatttttctagcagtgaaaacagtcacatgggactctgcccagcgagggcgttgggaggcctggcggagaagcagttgtagcatcgtccagccttctctacctaacaagggaatatgtgaggtagggtaggacattttggtagcagtcacacagcccaaagagcatggtgaatttaattagtctgccacacctgtatggccttacgttttccgggataacttaacaagcattgtgtgcagccaggtcaggcagatggaggttctaatccaggctgcacacctcatcagccaggagactacagataagtcagccaaacttttggagtaacaagtagctcatctgtaaaacgtggatgttccaatttatgtatagccgcataatacattaccccaaaacttagaggcttaaaacaacaaccattttgttttatcttgtgatttctgtaagttggggctcagtggagtgactcttctgccccttgtggtgttgactggggtcagtcagtggtgctatgctggaggatgaattggactggcacttcagctggtccaggatggtcacccatgggtctggcactttcacgaggatgactgggatgcttggctcagctgagggactcttacccagagccctacacatggcctttcctgcatggcagatatagggccatcagatttcttacatggtggctcagggctcccagaggattccaaaagaaagtaacaggaagctgccagtttcttatggcctggcttaggggttggcacagcatgactgctgtggactaagcagttacaaaacccactcagattcaaggggagcagacatacacctcactttcttctggtagaagtgacaaagaatttgcagccatctttattccaccacagcaggtaataatagcatctccctcattacctatagaataactccaaactttctgatgattaagtgagatatcatgtaaagtaccaagcaccttggataggcaatgggaaatgttcacaacgttcccatttttacctataacagcagtagcaataatgctaatagtaatgatactagtaataaaatcaggataatgctgtttttaattcaccacactgtatgccatttgcttaaaatcagaaaggactcatcggtaaggagtagggtggtagtatcattttggtctgcctttcacccccacaagacaacatccttaacagcagctatgttgaaggtttaggagtgcttgtcattagggtctcatttccaaaatctgggacataataatagatggttactgattacagggatttttgtttgtttatttgtttgtttgtttcttcttgataatctctttcattcatcattccttcatttccactcttctaattctgggcattatatctttgtcagagatagagtcttttagctgtttcttcacctcccaaatccttctcaagtctgttctccgcctgctgtgccttcctatagtgtagctccaattgccttcatccttagaagacctttaatgatatcctatgccaaacttcctagcctccacctgtaccctgaattggccctagcctagttgtccaaactttatccccaggtggttgaactttctaagtttccccaagctgatcagtgttttggggtggtatggaactcagaatagatcactttttttattgactaactctgaccataagtatgcttctgtgcgagcctgacctccacggtaccaggcagagaacaacatgtatgcagagaactcattcactcaataaacatttattaaatccaagccatggggatccataggaggaatttagagcagagttgtcgaatggtcagatttgcctttcagaagaccgttctggcagccatgtgagaaaggagggtggggagacctgctgggaaacaactctagtcacccaggcacgaaatgatgagcccttgagcaaaagtgattgcagtgagtacagggaggaagaggaaacattttgatagatacttggtaaaatcaacaagatttggccaacagctctgaaggggatgacaggcgtggtgaatggagaaggaaggacagaaggctagtttgggacttctggcttggacagtgtattgtgtagtggaaccatcgctgaagataggaggagtccttttcagtcatactgaattcatgacgcctgtggggcacccaagtggaagtcatccattggcacctggatttagatctggcactcaggagggatggacaggatagacattgaccagacacaattatattggcatatttggactggagaacccagcatctgacttaaagagtctgcttctcttcaaaattgcttaggtgttttcaaactacaaacaaatacactcccaaaacctcaatagattctcccagtataccctatattttggccaaactggaatcacatcctggtctccccaaacactgcttgctttttgttcctttcttgctcttccttctgattgcaatgaactccccatttccagtccccatcctccaatcccttcatgtccagctcctgctcatcctttgaaacccactggattttaagattccatctgacaagaatgatcactgttccttccagttcttcaagcactttttctgtttttgatgggatttatcacttgaaaatgcatattatagtaatttctgaattcatcctgattctcctactggtttctaaactcttcaggttagaattcctgttggatatccctctggcccgaaattcctgaatgagttaagcaggacacctagaactatgcagaggtaataccttccttgacctgtcccttttctgggtcagtttgcccttcatgatttcggcaggagtgtgtctccttccattctggtgaacacatccaatgttcaatgttgctcatcagggtaagagttctaagtccctatgtcttagagacaggggttatctagctttgtcttctgcattggcttcaggcttcacatccttcctggacatgttcaatgctgctttcgtttcttgggcgagggccctagaatcaccttagacaccttgctctagacatggccccatcgtggtattcccttttgagaagacaaagattttaaaaattctttctcccttaatgcctcatgaatgcccaagcagcacttcatggaagtacactgagtctctactgcttgcagggattaaacataacattctcaacagtggtaagagagcctttcccttctctttggctcgttttcagtttttattaatttcctgtgcttctggttcatgaatcccaagtcatgatgtgaatcagttcagttcagcaagcactgagctcccatgatataacaggtttttttcttttccgagctgtggcccatgcagagtttactgagacttggctcttgcctttatgctttaaggatcctaaagagaagatgtaattataagatctaaaacgtggaggggggtggtgaattcagcctgcaggcatgtgtttgctgcccccacccccacatcctctttttttaaagttcgcataaaaacctggattcttggtttctcttaaaaaactggaaggtctggcacctttgctcccacatttcccgggcgcagcccttgactcaccctgtacggtggccgccccagttggatgatggggcttgtgcccaccgggtcagctcacaccaaccagcccctattaatttatacctggcccgctttccaaattgacattacctggctggtccgtacgcatcccctgcagtaactggctttctggaggtatgtgctgaggatctctttggcttctgcatctcaaaggatgagtgatttagccaggtggagaggttggggcggtatcctgaatgaaagaatagcacagacaaaagtagtgagttgaaaacagaacagcatggcaggctcccagtaatcccatgagtcacgtgttctgcccacatggaatggatggtggagaagggaggagggaggaggttgggccagattaagcagattgtccccattggtccatttttaaatcttccttttggtatttgtcccttaaggcaacactttcagtctcagaaaaaatccagtaaagggcaaaccagtttgggtgaatttctttgtttttgcagcatgtctggtcccaaagtgggacctggagtccttccgacgaggaagtgcagcctcttgtcgaggagtgcactgggaggggaggctggacttctgggctctgctctgcctctaatctgctgcccagcatcagccttagcccagacccccaaacttcctgggcttcattctgctttgcattcatctcaaagttaagccttctggctggcaggggtttctgagacagactgacagtattagcgtgctgcagtttcatgatggcaagaaggaggttaccaaagccgttttcatacaccttaactcatgagtggtagtgagtggccccaggtgggaagcacaggtgatttggagctggctaacctccttcctttggctcttactctcaccagctcttagacttggggtaggttagttagctcctcccagcctcagtttccctgtttgtcaaatggggtcatagagggtgagaatcagagtttatgcagggcatagcactagtgtaatgctgggcagagagtgagcatccagcaagtggttttgacaatgataataattataacccaagcgacacatacaatttaatcaggcactgtgtgtccacagcgatgtcaaggaacaatgcacaaagcagagtttttccagtctcctgatgtttgagccctgcgcgagccccactcttctcccttttctcataactgctgtgagcaacctcaaatccttctggaagtaggttggttatgaattatgaataattaaagaaataaactctggctctgcagctgaaattgggatcgcatggagaaaatagaaagtccagtgtttgtagctgtgatctctcagttgcttgcatgaattgtgctttaagattgtaaaattttagcccattaaaaataaaatctgttgctttccacccacacctggcaatttggtgagggacgggggctaggatatttactgtctgaaagttttagggaggcttttatgaactgggccatctctccttgtccccatttttctttgcatctccgaactctcattaatttttcacaggcttgtgatggatagtttttatttattcacgtctgagattccgttgtgtgaaaaggactcattttataacattacatattcatggcttgggatggatgggataaggaacttattattaatgtgtcactgtgggaaacttactctagttcatttgcgaaccttgttaaattcggtgtggtcagcagacccggtgaagttttggatacattctcttaacagagggcaaagagtttgctgttgcttttccttgattcagtaaaacaagtttaaatcttatttaaatcgtttgaagtagcaatttgaaaggggaggaaaaaaagggggatggcagagattaagtagagagagaagctccgattttcttgttgaatagccgtgtttcctcagcattctgtagatttttggccaggtttgtgtaagggatgaacgactctctataaaatgatgtcaggatcctttctttcctgcccattgccatttctagcattctctccttgagggaagttgcagttttctccctctgtgtattcatccttctgacctgtgctccggattccagggagttctcaatttggagctcataccgacatcacagaattccttgcctgggacaaatagagggaatattaacatagcatcttgtaaatcaaagctgggcagggggtgggggagggcacagtggggaacctggcccaatctgcttcagtgtgagcttggtaagaaggaagcatatgttgcatttagttctctgcaaagacaggcgctgctctctggcagggacagcgtgtagggtttgcatgatttgtggggccgtttcatgtttgcacggtttggcttggcttgggactcggccagtggtcactgcagtttaacagattccccccgggtgtgaaggaaagcgagataaatgcaggaaaaaggatacattttgaaatctggaaattttacataacaggcatcagatttgaagaatgtccaaaatattacgaatcatagcacaacctttgctaacaccgtggaaatttttgaacatggaatttgttaatgctgacttggcccaccatggggttaaaaaaagtgaatttctttttgataaccaaggtgatgatcttatgaagttgatgatggggtgtgaacggtgtgagtgggggacaaagcaatgaaatatcccttaaaatgcatcctctgatgatgtttccataatgccaaacatttgtttctctccaggatctcattggcggtttgctggtattatattgccatttatattggaaaggcaggcagtgcgaaaactgtagtctattaagagtttgtgagtgtgtgtatgtgtatacagtgaaataatatctagtgtaatgtgaagtgacagtcaaaattacagcttttctcttgccgcaagggtacttctctgccaagtatagtaatattgttgtagcagtgttcaaggttgtcagcaattctggcttactctgcagagagccataatagtgtgtggaaggaaggagcttcctgtcaggggaaatactataattttgatatatatttgttggtgccaaactgcaattaaataggaggtgttggaagaaggttttatttaaccagcttgaatttgttaattaattagcaaaaacttatctttggaatgcttcaagaaacagttctatgttgttctcataacttaattttacacaactgtcttttgtttgtatcttacagaaaacaaaataccaccctccgccagaaaagtgcagaataaaaattttccactagcaaaagaaggaaaaaataaaagatcttgaatagtctcatcaattacatcttcttttgtgggtatttcctggtcttttcatgttttgacttctatctcggtgatctgacagacatgtacgatttgcaacaacatctattatatgatttaatttatacctttatcagtttgcagttatgctttacgactcttcaggtgactaaagaaaaagagggtgttttaaagtgtgtgtgtttgtgtgtgcgtgtacgtgtatacatgtgtttttctgtgtacataagtgtgtgtgttttaaattgtttgaaaaacactagtccatctctattgtattatctgagggatgctagctcgttacttgggatagtaacaagtttcttggtgacaactcctcctcccattgtcaaggaagactgaggatgtcaccagagttcgctgtcaatggctattcagatgaaaaataccttctttttgaataagtagaaaaaccatgggggattgaaatagcaataatatattaaaagctccaaggcagttatgtgtgaagaaataaagaacagaacagagagattgtgttgttttaaaaagggctatttaagagtcttgaaaagagtgtgtgtgtgtagggggacacctccctctcatattaagtattttgcaaattaaatgagtttcattctcctataaaatatgagtctaatcacattttatatgattgtaaaatgtgtctacttttgtctctatctttcatggaaaaaagaaatattcccaaagtatattataaaaaataattaataagcaacttttcatcattattttctgaggttaattattaccctaagaaatcaatttcaatttcttcagtttgaaagactcatttgtgatggggtgtttccaaaaagagagttagttaaatgctatatggaagccttcattccctaaagaaaatgcctctgctgctggcagtgatttatccagagctgtctcacccatttatgccccatgccaggagaatgtatggaaaatgtaatagagctattagaatccagtgtagtagattggtaatagtaaggaacaacagttgtcttcacattgttaaaataaaagtgagataccctttaatcttcgcaaagggaaataactcttctgctaaccctcctgcccaacctgagatgaagtatcaggggatgcagtatggatgtattttcctgacgattggtccttctgtcctgggacccaggtgtgagtgcatagggaaaagggaggagaaatttaatcctgtaactatctccttatggaaaacaggaaaccacagatgaatcaaatgaatccgtttcccctctttctgatcctctgcaaaagtcatcaaaatcactctgttctcaccaggcaactggagtttcgtcagctgagtctagagtgttccaggcagttacagctaatcatggcaggctctacccaactgggggaacaatttagctgttgtgggatttccctttaaattaaatatgttcttcaggtacagttttttaaaaccagtttttctcccccacttttaacctactttatcgtccattgctgggcctagaattgcatgtccattggcatggctgacgttatatataaatatttggaattgtagttgtaatgatagatattatatatatttcacatgttttaagattaacatattaacagtttgtgatattcaacaaagaatgcaataacttctgcgaaacaggtaagagaaacaaccagtcacttgatctggatattgagacgttacctgtaggatatgtattaggctgttcttgcactgctgtaaagaaatgcttgagactgggtaatttataagaaaagaggtttaattggctcacagttttgtaagtggtacaggaagcatagcggcttctgcttctggggaggcctcaggaaacttacaatcatggcagaaggcaaagagagagcagcaggtgacatggtgacagtgggaagtgacagagcgtggggtgggggtgggaggtgccccacttttaacccttttcctgtttaggaaaaaaaaagcgcagctcactgccagcgctcatttaattttacataaacatgctctttgaagctgaagcaaatgtgaccgattttcaaagtgataataaaatataaaaacagttcttggaaatatttctgaacagaactaacatcagaatcatctgaatcatcagaattgtgtattttggaaaaatcggattcatcaaatgaatcttcagccaacaactgttcgagaattatgttaacatcacatgcaggaatgctacattttctcggatttgacattttcagtgatggagaactattatattttgtaaatggaaataccactactaaaaacagaaggctataaatagaacgatatccttcgtttccaaagtcgatatgctagagtgatgtgaaaaaaataataaaagcgagatatttcatggcaaagcgatctcagggtaaacactgcacaccagtaagtattcttggggcaaatgggaaaagggttaaaatgaccagatctccagagatctcactcactatggtgaagacagcgccaagccatgagggctccgccccagtgattcaaatacctcccattacggacatgtttcaacatgagatttgggcggggacaaatatccaaactatatcaggatcccagcagactgggtgggtggaggttcagggatatctgggaaggactaagaatagctttttcttttagtagatcaggagtttcctcttacacacaaaaagctccaaatttaaactagcttaagaggaaagggtcattactggctgacaaaatgcgaagttttgtgcaagagtcagcaaagtttctctgtgatgggatatttaataaatattttggggccttgtagtgtttgttgccaactactcaactctgccctcatagtgcgaaaacaggcataaacgacatgtaaaggagcaggcatggctgcgagaaactttatttatggatactggaatttgaatttcatatacattttcatgtgtcacaaaatattattctttcccccccgcccccaaccatttaaaaatgtgaagcatttttagcctgtgtgctgtataagaacacagccgtgtttggcccagcggttatagtttgccaacccctgcttagagtctagctttattcagagcttaaatatgtcatcgaggtcccctctttatttaatcccttagttttgatgatcttttatgggttatattcttcaaagggaaaattctctccaaatggggctgccactggcagacgagcactgtcccatcttggcttgttcccccagtgacaagaagctgttttccccactacccttggcccaaaagccacagggagaaccaggattggcctagttttaggcagacacctatccctgaatcagtcatgtccccggatgatgcggttctctgcagcctgggcagtcaaggctggagataattctctgcttctccacggagtctgagaggccccgttccctaatggtaaaatgaggtccaattttgcaaaaggaggcacctggggaaacattctggacacacaaatctatagcttctaccgtcaatctgctatgatccttttatggttctgacgttgcaattttatttttgcatgtttctagagacatcaggaggggatcttttcgggatgtggcttcaaaaaggagcctgttggatggtctcttactagtggtcagcaaagaacagttcttttgtaaattgcactgcattaagagcattcctgtttccatctcattgatacctgccttgcgttctgttacctggaagcacaggtcaaggtagtcttcttgttccactgatttgatgggggtcaggatgctttcagaaaggaagtgagaagagtggcttagaacagggaaaatgtggccgggcgcagtggctcacgcctgtaatctcagcactttgggaggcctaggtgcgcagattacaaggtcaggagattgaggccaggctggccaatgtgatgtgagaccccatgtctactaaaaatacaaaaaattagccgggagtggtggtgttcgcctgtagtcccagttactcaggaggctgagccaggagaatcgcttgaacctcggaggtggaggttgcagtgagccgagatcgtgccgttgcactccagcctgagtgacaagagcaacactccatctcaaaaaaaaaaaaaaaaaaaaaaggacagggaaaatgtccaggaaggatgtggcttagctgaagatcagcttcagcttgatcccacgggaagctctggagggtgaattgtacagcagagttggtcctgactgagaccagggcctggctgacctatggcagtcagcgatgagccagtgtctgctggggaagagggcggcgtggacatagcctctcaagtggggcaggaaggggtagctgtgagatactagctaattcttacagcttctgggttcaccagcccggcaggagaatctgggttgaggaggcaacatgacaacgtgcctaccttcaccagagagactgctgtcaaaaatcactccatccatgcaaggaggaacgatgcagacacagaaattctctgctgtgagggccagcactgtagtatttactgacctgctccccactccacacctccaagtgcaggtgtacagactgacatcaaacctttcatcccgccctcggcctcatacctgctttccactctgtgacctatttacttcgatggagtcattttcaaataacttttgtttagtgaaactcaaggcttttcaggatgctgtgctaatgtcttccttttttaattgagtaaatatattatacacagctgggtaggttgtttccttgctggccttactgctacaatttgaaaacggatacagttttctttaactcacataggatgaatgtggcatttattcctggtttcctgtggctctcctcctttagaaaacgtatttacatggacgtttttgaagcacttcttaagacatcgaaaaattaaaaaagaaaaaaaaaaagaagaaaaatctcttttccctcccccaaacaatggttacatagtgacaacagtgggttgagctaaattcagctacgtcaaggaagagcaataaaaggagatggattgttctctaagcttcactttattggatattgtaattgacatatagttgtcatttataatcatctgtccattcctgtgaggtgggagcagtaaagttaattgtggcagctcatttgcattaatctcacctctgaagggtacagtaacccattaatatcacgtcatgatgaattatcacaaataacattgaacatattgattaatgatctctgagatttgtatctcgttaaaacattttgttagctctttaaacttttaagccaacaaccattgcgtgtaggaggggtttagagatcatctgagaggtggtggtgggtggtggtgtactttgtagggtcactggtttaaggggttggacaacccgttcccatctgattttcctcttcttcgggagccaagtactttttgttggtaacttccgtctactttttgcaggatagtggtttcttcaaaacagtggcttctttgattgtaaggtggctccgattctcaaatggaatgattttcttaagatttttaaaaattaccccttcaacaccttaagtgctggctttctgaacctcttgcccacctaggcatgcctgctactttgaagtggcaagagttatctttgtctattacatcagcattcctaaacttacatgttaacataaacatggagctcagaggaaatgtgttgtttgagatgaaccatcgtttcaaatgtcacttacttcttgttttataaagtatcattactcttttcttggacacagtctcatctttgaggtgtttgcagattttatctcctgtggacatttctacaaaatcaatcaacaaacttgagcagagaaatcatcatactagccacacacactctgcaggcattaataaaataatagtaaattctctttaaccaagtcctttgcagaatttcctggtagaagtttaaatgcaatagatgcagtaaagaaaagggttggcttaagagttgacttacaaagcttggtcctaacagctttttcctttatctgtttcaagagtcatacgatatttgatctttcaaacttacgtatttcttccattatgtttagtattagtttcgttttctcaagatacatatttaacaactagcaaaatgttggaagcggtctcctctgctgtctatttagggaaaatggaactgatctttctgaaataggcatgcatgtaatgatgatgtcattaatgcttggctagctggtggacttaaacccagagggcacttctgaaaaggggcaaagtgcatctgcttctgctttgtttatagactgtcagccttggatctgtcactccctcagaagggaaggattgaggccaggcaaggtggctcacatctataatcccagaactttgggaggcgaggtgggaggatcacttgaggccaggagttcgagactaccctgggcaacacagtgagaccctgtctctactaaaaaaagagaaaacaaaattaaccgggctgggtggcacccacctgtagtcctttggaggactacttgggaggctgaggcaggaggatcacttgagcccagaagttcaacattatagtgagccactgtactccagctgggtaacagagtgagaccctgtctctgaaaaataaaaactaaaaaaaaaattaagttagaagggagggattacgaccctcatgtgtatcaagaaacaagctccatgaagccccataggatggctcagcaccagaacgaggtctgactgttaagcaaagtcaagtgcatgatggctgaacattgctgggggaagattttgcaattatgcattgtttgtgcctttagccagtaggtaaggacagtggtaccattctgacggactctcggatgcttggttttatggagggatcttaaaacagtaatcggcccatatgtgcagcaacctttgcgcctaaatagctgaggacaaagtaggttgcttacttcaagagcccttccctttctcttctttgtcaggcctgtaatgttcctcacccactgagtatttaatatctgtgttttcacatcaaagaacaagctttctgtctcccaggatagtatcttgtaaagccagcctctttattacttcaccagttttaaggctttattacttgcgacctaaagcctgctagtgaattatgcatgttagaactcacagcaccgtctctgcccactcttttgccacctttttgggggtccaaaaagtacaaggcgagatcgacgtgtgttcattcccatccatggtattaatccttattcatttaaaaaaatctgctaacggaaatatttccattcagctcattaatcaattgtgattttcattcccttgttttgtaaaagctgttgcaataaatacttttttcacaaggcgaaaatccaagagatggatgcagccagcgtaattaattgcacccagttacaggagatcagcaagtttgtgagattcacatgctgctgtaccatatggttgcccagtgggcgaaaaatttgattaatgttttgaagtagatttttttcagcaaatattgcagccccagatgaggtgggggttgtcccccccttttactttctagtattgttagacttagctgaaggaaacaatcctctgatttaaagcttaataatactgtgattcagtgaaaacttaacatgcgataaaaattacatttctctcatctcttgtggatacagaaaaataatacatgatgtcttcgtttgtaattaaggaaaatgtgatcgttggattctaaaacttgattcttgattttttttttcccctaagaaatggaactgtggttttcactgatgcacttttggtatgatttataagtagtatatttgggcagactcttcatactcaaagcagtaaaaaataaaataaaataaaatacaatgaatccacaaacagcttcttcttcattatgtaccctatacctattagagcatcataaaatataactatatgagtatcatagaaaagttaaagctgtctctactctgttatgctaagatatattagtttcataaccactcaatatattcatagttaatttatcctttattttaaaaaaatgtcctgcagattttaaaatcaattttatagtttcttttctgtttttagttagaaagttcattttatcttagcagctccttgtcatactgggcacccattctcttaggatgctgcccttctgacttttttctccaatacctgggagggaattagccatttggtaatacaacgggacaagcttatggtaggtctgacctcagcattcagaaaaacaatgtgaaatttgtaatatgtgtcagaactggcaatcaacgccataaggacaataaaataaaatacatttctccactttagtaaatgaggcttcatgcttcctatggcataacttttttgttgttgttgttttttcttttctttgaaacggttttaaatttctaattgcctaagcaatctatgacactccttcaatcttaatgtctgttgaaatgaactagcatctcaagcagttggagcatcatctttaactagacatcaacctggttttgaatcctttgagttttggcaaatagaaaattcatccagggccacaaaaaatatctataattttgacccagttgtagtctagagagatacttagttcaaaaagaattgtgttatcgtcatcaagcaaaacaacagtatatgctatcatctctgagatgtcacacgattattgctttttttttccttttaaattttttctttgtgtctaaagcagtttaagagctctaagtgtgctctgttttctgatggcttaacaagggactggctcaatcaaaatagagaaggaaaggacggagaccaggccaaaacggccatctcctctgattttcgattcatgatataaatttttaaacaaaaaagttacagtgtttttggtactttcactaggcttctaattttttttcctaaacttaaaaaaatttttttaagatcaattatgtaataattagccacaaaggcacaagaactgtttcagtagtggcctgttttaatgttccattctgaagaaactggtacagcctttctttcctgagtttgagctgaaactctctctttcccttttatcaggtcgctcaaaacagatttttagagtgaagcagttttagggacaacatttaggagaaacatttccctaagattccctaacatttttttctttaatttagccatttctaatgaatattttttaactgtgcaatttaagtaatgatttttttaatgcctgctaccttcaagacacttcgtgtggtcacctccaattatagactaggtttttaaatgaaaaacggaaacacttttaaatttttatttaatatggccggtgaaacatgaacaatatatgatcagttggcaggagacagtgtgatgaattatttatgagtttacttttttttttttttttgctttaacagcacatacatatatgaaattcattaccaagtgataggacgggtaacccagaggttctgatgagggccaggacctcatggtcataaaagtaacattagacctattcctagtaatttgatctaggttggcctgatttttgttgtggtggcagtggtggctgtggttgtcaatttaatggaatgtatttggaaagagcaagcttcttcccaatgcagtgttttccctgcaaaggagaagaaatatatttcttgcctctctttccttagtcctgtgtgcttccccttgatttcaccaggacaattttataccaatcccttgtattttagaagagcctgatacatttgcaaggtctctctttatattcctgaattttgcatccctagacatcatcctttttgagagagaaaattccgagtgtcagttttcctttatcggaacctccttttatttgaactaaccacaatgggtcataatttataggcccagtcagcgcatcattgctcagatagagtcatttacctacaagtatccatcagttaggtgggggctgctagattttttaagtggaaaaaaatccaaacaggttcaggaagaagaagaaaaaatcatcctgggggcagaagaacaacaacaaaaaattttccttggggccttccaatttgagattgttgagtgttgccaagcaaaactaacacgcagtgggaaggttctgcttttctcacaaattctcggttaacacaaggcgtgccaacagctggtagagcgagagtcagggtgccaggctgaaatggagtggaaggcagccctggctggaagtcttgctgggaacctggagcgctgggaggtaaaactttacttggtgctggcagcgtcactatgccagtctgtttcttcccgagcttcaggccatgctgatgttcaagttgaataaatgagagctaatgattttttaaggcgtttttagtgaattgccgtgggaatgctaagttggcaagaataaaacctaggcgaggagagttgatttttgatgacccaaagaaggcatgtcctagagtggtttagtagagctcgaatagtctaagattgttccacatcaggaaaagtgtacagttatcagaattacttactaatgaaaaaaaggggaaaaaaagattattaggctgcagggtagtgggaaggaacagggtagcaactctacagtgacttggtctgagaaaccctgtaacttggatccagccagggaagtacttttcccaacaatcggttccgctgtcctgctgtgaccagtaacaggggaaaaaaataaaactcccctaaaggtaaatgattcacctcatgaacgaagggaagaataagagacctaagtttatatacacagattccaattgtaaaatcaaacctattttgttttctaaataaacaatatttgaaaatacaacattgcagtcttgttttcttttatactggctaggatggtctggtcctttagaggaggtcctgaataaaataatatgggctgtagagagaaacgccgtttgcttgataggtgtttttgtaaaggttttactggcctacagtgtcagtacattgcaaatttaagaatgttcactgacatttttagtagccacttaaaaaatttttctaagcaatgatgtcattgtattttacttataatcagaagtacatcagcccgtgaatttagttaaaggtttttaatgtcacttttattacatttttactgtgcattcatgtgcacacacacacttttaagcatttttgatttatatatccctctgcatattttgtgccttgtgatgtgtttaacgaatgacagtgtctttagtgcattgctacttggggtttctacactggaagtgtaatccgaggccttggaattggtcaaacaaaactcacttggcaacatttacttagagagcactctgcgagcactctgcgagcggacatgtcgatatcagctccctcctcgttcccccccccaccccccatcccatgtttatttgtaattaaagttaagatgcttgagaatggctttaccattaatctagaaacatagagttgtttcctggtgaatgatgtatgacagttttctttgtgcttcctctgaatagagagtagtttttgtggcattgttacagagaacagctttcctgtagggctcacaggctcaactgtttcaaactcctgttgttcggtaaatctgtcagaagggtctgcaagggaccgtatttatgaagagagtgtagagtggtcagtctaaaaagctccttagtgtagtactttgaattttaaattacacacataattcaaaggtaatgtaacttgccgtgtcggactttagtccattccgttaaatggagaaaaatgactgacgtgaagaatgacttattgattcttggtgggaaaatgacttctgtaatatgggaagtatggtaaaaggaatagcttaattatttagggagcacttttcaaaatgtgcttttacagcagtacaaattgtacgtatacaaatggtatgactaggttctttttttaaaaattctttcataggagaaagttatgagaaggcttatattatttcgttgctaaggcaaagtttaattttgcttaaattcctgtaagactaactaagaaaggtaggaggagtgatgagcagtttcttaaccctttaagaaatatgacttgttctaattgccttttcttatttacattatacttaggctggtgttaggatgccgtggctgccaagtttacacagtgcactttctctctctctttcttcttttggtttatgatgtttttcagtagtgtcatggaactcacttaatctgatttcatcaagtaaatatatgggaagttgagatgacatatttttatctgacatttgaagaaatattcataaaatagcagataaaatatttattttggccttttcattctgatctctcttttgactcgatgtgtattctttgcttaaggaccacagcctaatgttattttgactgcatttcacagtgttggcggcctttcagataaacagcatatttgtggttaattggctgaacatgttctataattataattatattaaaaccttaatgttcttgaacgtttgcccgcgaaggccactcacgtgaactaagttatgtttctgtcgttataactgagctggctggcggctgccattcagcaatccaggcaggactgggaacctgggaaaactgcagaggtttcttattatttcggtctgaaaccgctgtttggatagttttagaagttgaccatgaaaattgccttctggttgtaacttggatccccaggtttcaatctgtgggctaacgtttcttgggattttcagaaaggattggcttggctttttatcaaagttacacaacggctgtaaaaaataaataaaaaaaaagcaaaattagcactttatcaagtttggggcatatttccaaggccaccagggagcagggaaagtcaccaaaagaccgctccttgaaaccaggcaagaagccatctttgcagtgagctgagaggtctgatggccgccagctgagggagggaattccccttttgtgccttcgggattgatagagaagcccagtggacttagcatctgggaatcccagattgatcttttctggatattgggtcaaccataagatggtacctttccctgtgtaacaaagtcagattctgtgaaacacctgttttttgtatggcttatgagatgaggatgatttttaccttttttttttttttttttcccttgagacagtgtcattctattgtccaggctggagtgcagtggtgcaatctcagctcattaacctcaggtttttttacagaaaaagtttgccaccctctgatctacatgatgtccttcagtttctgtctctcaccagactgatggtgccatgagggcaggggcaactcctatcctaaggcgtggcccatagtaaggggtattggttagaagaatgaaagattgaatacgtcaaagtgatgagtacagagctgtctgtcattttcttatctttggcctaacaactgaacacattttatgaaatttgcaaatctgtttccaaacatgtttgaatggatttttatggtcttttaattaacccaataaaaatggtaacaacacagcaattttaagaaaataacagagccaagtattttttatagctatgcatgcaatccacattacacccacatgcagtatttctatggtccaaataagtatctgtcggacttagaatatttaaattaggatttagttgaaagattatgttctatatcttttttttttaaaaaaaaggaagaaaaataaagctcttcctaaatttatttacatgttggagcaattctggcactgctaaataaggcaggaaattccattaagtttaaatgtgctgcccttaccctaaagtgtttggagggcttcgtagaagagccaaatagattcacacagatcttatttgtagagctgaatgtgcacttcattaaaatactttgtaaggtattcaaggatgggctaggagggtgaggattccaaatcagaatcttcaagccagtgatccaggccaaaggtattctgccagagtgtgaggaaatttcacagcctcatggagacacctcccctccccacccttgttgaacagactctggaaaagtcaccatttcttgttggtcctttgctcttggagcattcttggcctgacctgtcaaccactttagcctccaaggtatctgagcctttctttcgcctctctacttagatcatattcttcctggattttggaatcaggctgggacacaagccacctcctcctccattctagctgtgtggctccaggcaagtggccacacctctttgagccactagttaactcagctgccaaacagggattatacatttacctcttggtgttgcaagaattaacaaggaggatatttgtaaatctccctgggagctggatggtgcttaataagcaggcattaagggttgattatctttgcactctctcctgccagattttgtaactgagtccaggcatctttagaaacagaaatggtccctgctcttctgtatcccctgggataacctagcatcatttcgctgggttacacatcctctcttctctcctgtatgtcgtccctctttcttacggtggttctaagctctatggatcacttgtcttctcctctgagcgggaactgggcaattggaggttctttcccctcccgtgctggtgggagaattgtttagtaggtcataaagtggaatctccatttcagtctgatccggtcaattctggtaggacttcatccaagcacaaagaaacctttgttttcattcaagacttccctaaaaggtggctgggtgcggtgcctcaggcctgtaatcccagcactttgagaggccgaggctggcagatcacgaggtcaggagttccagaccagactggccaacatggtgaaaccctgtctctactaaaaatacaaaaattagccaggtgtgttgtcacgtgactttaatcccagctgctcaggaggctgaggcaggagaattgcttgaaccctggtaggcagaggttgcagtgagccgatgtcatatcactgcactctagcctgggcgacagagtgagactctgtctcagaaaaaaaaaaaaaaaaaaaaaaaaaaaaaaaaggctttcctgaaaggtgattcacaggcctcttcggatcccttcgtgtttagcaatttggatttccacacagccttgctgtgccttctgcccatttgtcctctgctgctggtccctgggtgggacagctcccctttctccttgtctgggttgctcagatagagccataaggattctccctgcctcaagagctgacttccttccacgagttcctaaccacctgtccagttgattcttctctggacctgccttgacatctctgtgccaagcccagtgccggggttgcagatgcagaggcactggtgcatatttcttgagttgaagagcttgcaactgatgagccccttccactcagaaaaatgttgttcctggtcttgccactgcctggaacccaccaacacctcctctttccaatattgctggcttctacttgttctataagagccatgttctacaagttctgtattgtgtgtgagtccctctcaacaaaacaatttccctagtcatctcttatttatactccttgatgcagatttccattttactcttacctcattctatcataattatctatttgtgtgtgtatgtatgtccccactaggctgtgaggtctgtaaaaggatagtctaaatacagctatctattgcaaatcttataatgtgactccatgatgagatagttggatatagccttatgttcccagcaggaaggaagaaaggaaaggagggagggaggtaagggtgagagagagacaagaaaggaaaggaggaaggaaggatgggaaggagggaagaagagagtttggtcaacatttgttgattgtgaatgaacaaactaatgaacactaaatgaacaaatgaatgaatgaatggacaaatgaatgaatgtatgagtgggtcaagaacaagattcggccccaaggagatacgcgactttctactttgttttctatttggatttcacacaaaggctctaaggtctcctggtaggccatgctcagaagtctgggttgtcccctgcccaggacaggctcaccctggcctgtgtcctaggtattgtggggccgctgtaggaggatggtggttaaatcttggaggaaatccaggagtctcatgtccccttggcttctgtcagaaccagtacctctcatttattttgaggtcttggctgaagatgtatcatctacaaccctgcagatcagatgtgttagagcagagagagtggcgaggattaatctagactgaaatgtgctaatcaagctgtctcagatgccattttctggatagggaggaacagcagttggcgagtttaagagcaatatggaggaaccactggggattctatgcatgatcttaggggaagtagcattattatctccaacactggctgtttacattatcagaataagaatggttctccaaggccaggtgtggtggctcacgcctgtaatcctagcacttttggaggatgaggtgggtggatcacctgaagtcaggagttcaagaccagcctggccaacatggtgaaaccctgtctctactaaaatacaaaaattagccggacatgatggcaagtgcctgtaatctcagctactcaggaggctgagatgggagaatcgcttgaacccaggagatggtggttgcagtgagccaagatcgcaccactggactccggcctgggtggctgagaaagactcagtcttaaaaaacaaacaaacaaacaaacaaacaaacaaacaaaaacttgtctccaaatgagcagacaccagaatctcatggagggatttttcgaacacgtagcacagggcttcgcccccagcatttttattttcgaacttctggagtgcagcccaaagatctgcatttctagcaagttcccagatgatgttgatgatgatgcctgtttgggtatcacattagatgaagggctttgctaatttcagctgcagagtattgactcatggggtaggattcctgccatctgcagcttctttgggtcatcactagggtagaatcttattttctgagtatgaaaagcatcaaagttattttagtaaaatgcttttgctgtcattgctttaaaactagctcttcgaagtgggaaaaccaaaagttttattgaagcaatttgttgtaaatatgagttctgtatcacatttgggaaatttgtaaagccttactttgaatgtctttttcttcactctatctgtattgtttggtgctttctatataaatttataaattggatgtaccgccacagatgtcggttttctggtaataatacttttttacattaaaaaaaactcctgaaatgaaaatgtaacttagtcttattattgtaatctccccttgcctttttgcatggatcatttgtttgtgaactggttatttcaggaagggctcaaaggtaatttcatggtttatagcatttatattggcgccttcgatgagcaaaacatattgttttctaatacatgaaaccaggaattcatatatatatgtatatatattattattattattttcattttctaaaattacatgtagtacatgtatatcaacttcaagacattgagaacaaccatgtacagaaattatactctgtacacaggggaaatatgaaagttttgtaatgcaaaaaaataaaaaaaaatcaacatttgcaagcttatgagatgattttatttttaatgaatccaaatggtagcagggagctgctgttgtgtttgtgcattgtacagcaattcatatctaaaaataaagtaacatatggctttgttattatttagtttaggaattgatgcacctaaaggagttttgagagctctgggtctcgttcggttgttgtacatggcaaccaaataagagtagctggagcagagactttctcttcttcagattattaagatttgagcaattcattttttttggatggtgtttattaaagtcaagaaatcttttgcttatttgctaatgattctctcccctttctcttcttatatttttgaaggctgaattggtaaaattatctggcccaataaaaatatgtcctgggttggaaaagagcacaagtttctttttctagccctggagtgaggtggctctctggcctctgggttcgtttggtatcctggggagtcattgacacccacacactcctagtcacaagacctttccctcccatccagattgtgtttattttacggctctcgcacggagcatgcagctgtgtaaacctgagaatggtttctgcacagctttgatctttgcatggatcaacagttgcccttagtccctgaaccctgttccatggccccatatttcttggatttttccattttctagtaattatggcatcatgtagggagccttccaacagcatcccccacagctttgggtggagaatttggaaaaaatgccttaagtctgccatttgtagaaccatattaagtagtgatttccatttgatgccaaaaaaatatgccatttagtttcttcctaagaggcaatctgacaatttcgagtagactgctggagtctgacaaatttgaatgtattatggactgaataaatgtttattgaacaaatgccatttttttaactcttaaaatgttcagttcttccaccaaacatagatgacacaactgttggagacggagcaccggactgatgcagtgtagcattattttgtaatctacgaactgggagcctatggagacctatgcatggtggaatacaaaagtcatgacctgtctttatatcctagtatgggcaataaaaccctccctttaatagccttaaacatggtacaaggaaactgtgcaggagttccagggaaggtgccatttttccatatggagttgatatggtctgactgtgtgtccccacccaaatctcatcttgaattctaattgtaatccccatgtgctagggggagggacctcgtgggaggtgattgaatcatggagaccgttcccccgtgctgtgagtgagttctcatgagatctgatggttttgtgcggggcttttccccactttgctctgtacttctctgtttcttctccttcttgccaccaggtgaggaaggacatatttgcttctccttccatcatgaatgtaagttttctgaggcctctgcagccctgtagaactgtgaatcaattaaacctctttcctttataaaccacccagtcttgggtatttcttcttagcagcatgagaagggactaatacaggggtgatcacaaacagcctgcagactgggccatctttcttaggcaggatctcgagctaggagatgagaagagctctataggcaaaaagaatgacttggaaggccacatatggcagagtagctaagactttggggtttccagtttcagatagacatgggtttgtatcctggctctgcccctcaatgcctgtgtgatcctgggtagtttgcttaatccttatgagtcccggttttctcctgtaaattgggattaataatagtcacagctagctgggtgcagtggctcacacctgtaatccccgcagtttgggaggccgaggcgggcagatcacctgaggtcaggagttcgagaccagcctgaccaacatggagaaaccttgcctctactaaaaatataaaatttgccacgcttagtggcacatgcctgtaattccagctacttaggaggctgaggcaggagaatcgcttaaacctgggaggcggaggttgtggtgagccaagatcgcaccattgcactccagcctgggcaacaagagcgaaactctgtctcaaaaaaaaaaaaaaaaaattatgtccttctagattgtgaggattaagcaagaccatgcatttacattgtttaacactgtccctgagacatagtaaggcctcagtaactgttagctctcttattgctaccggacaagtgttcttattttcccttttcttcttcttccttttcctgttccttgcccttcctctttcgaagaaagtttacgccaaaaaggatgagctgggttgcagccagcattctggtttcacaggagcctaggagatacatggagaatattctgaggctaggttaaatagtttgtctccagtgtgggtgttagtcatattcttatcagtatctgaagaacccagaagactgactctcagaacggaaaactcttggctagaggattccgaaagctagcgtgaagtggaggctattactcagtgggtgccgtaacatgtctgtgtcacctggcacctttttattctctaatctcaggagtgagtgcttcctcctgccgtgcctggccacttctcaccttcagagtctttggtatgcataaattcttcatcacttcagtagagtgaaccctgattacctacatttattaatgaaaacaaccaagaatagttgagcccaaaagtacaaatcaatgtgctgaatcagtttatgatgtctccctaatttctgcacatctgttgagctgtgatttcaaattccattccatttcttttcttttcttttcttttttttttttttggagacagtgtcttgctctgtcacccagcctggagtgcagtggcgagattggcaagatcgtagctcactgcagcctccacttcctaagctcaagtgatcctcccacctcagcctcccaagtagctgggactacaaggttgtgccaccatgcccgcctaattttttgtatatttagtagagatggggttttgccatgttgcccaggctgttctcgaactcctgggctcaagtgttgtgccctgtttggcctcccaaagtgctgggattacaggtgtcagttaccgcactggcctggaaatcctatttcttgtcaagcaggacatcaaagttgagatctaagaatttggactaaaatttggggcaggttgtttccactactgtgtattgagagatggcagggaccatcttgccgagtccaagagattgtgaagtctaaaaggcttggccgcagtgttggttcatctgtaacagctgcctacaagggaatctttgagaaatacagattgctgcatcttataagaaggacagtgcttaaaacagaaagaattgagtagaaattaagacatagcttgatttttttccaacagaatcatgaagtctgttcaattttctttttaaaaagtaatttaatcttctagaagatatctacgtttattcaataatttcctaaggtagtcttcaaaacctaggagcctaggagatacatggagaatattctgaggctaggttaaatagtttgtctccaatatgggtgttagtcatattgtcatccgtatctgaagaacccagaagagtgaccctcggaaaggaaaattcttggctagaggattccgaaagctagcgtgaagtggaggccgttactcagtgggtgccataacatgtctgtgtcacctgccacctttttattctctaatctcaggagtgagtgattcctcctgccatgcctgtcctccctccctccctccttccctctcccctctcccttctcccctcttctctttcccctgtctccttctctccctcccttccctctcttcctttcgcatctgacatctccaaatagtttttcatgcaatggcattactaatggcttgactttttcgggaaatgattcattactttatgatttcaattcagtaaccattttcagctatgccataaatttaaatcctttaccatcaagataacgtttttttctcctgtcactgaaatattatgattggaaactatttttaaaagttgactctgtttgggacagctcttagggatttgtcctttataccagcatataacttgtaggttgtcagtgtctccaggggccatatgttcaccacctagactcaacagttgctaatgttttgccatgttttgtcagttcatctatctgtccatctctttgtccatccatccaactacccacttacccatccatccatacatttatccatccatctacccacccatccatccatccatccatccatgcatccatccatccatccatcatccatccatgcatgtaagttgcagacatcaacaaactttacccttaaggactttggctggcatctcctaaaactaaaggcattgctgtacgtaatcacaactatcatcattatcatgtctatgaaattggtaataatttgctaacataaaataatacctagtccataacaagatttactgaattattcacaaattgtcttttatagctttttgttttcaatcaggctgtaaagttcacacattacatttggtattgtatcttattagtctgtttattaaagagtttttttcagggatcagggttagagggaaggctcctttctggatactgtgtatactactaattttctttatcggctaccaaggttttctttatttttttcatacttttctttcattgaggaaacttattgttttgtacattttgttgtacctttatgaatctggttttgacttctggcccagctaagaagctggtttcctttggtgaaacatgggagaagagggaggaaaaatctgttaattagaattgtgggcgtgcactctgtttatctctaacagaataggcttcccacggctctgagctggaaaggaagattcaagtctcaggttaaaaaacaaaccctccaagacctcagggctgtttgcctgtgattagagtctaagaaagactgagaattggaaatcaggactgtctctggtcactgatggttcaactacagcacagatgcactgggtaacagacacaccgccaggcctcaggattacgttacctagggttaggactgagcctttcttccaccttcttggggttggagggcaggaatttaacatatcttagatcacagagtaaggcctcttctacccataagtttggtttatacatcaaagtaacattctaaaattagatgagggtgttttttttttttttctttttgagacagggtctcactctgttgcccaggctggagtgcgatggcacaatctcagctgattgtaacctccacctcccgggttcaagcgattctcctgcctcagcctctctagcagctgggactacaggcgcctgccaccatgcccggctaacttttgtatttttagtagagaaggggtatcgccatgttggccaggctggtctcgaactcctgacctcaggtgatctgcctgccttggcctcccaaagtgctggggttacagatgtgagccactgtgcccggccttagatgaggtttgtagatgtgtttttcatattcccaaagccatgaaatttgacaggtaaatatatcagttataaaagttttaggattaattatcaactaactcccagaagttgcctcagcctctctttttcagccttgtcttgccccagcccagagacaagccacagctataggttttatttctgaaggagaaaactcagtggaccattccactgcctcaggagatattgcctacctgcagacatgttttgtcttatccacacatgatgtaaaaacaaaataaaaatgctgagagaaatgccaattcagaggtttcatataaaaatatagctttcccattagacttgaaaattggaagaggaggtaacaattggccagtgctgagtagagggcatgtggtctctactttgccacaatctccaccataccttattgtctcccttctcagtcgaagcagctttacacactcctgctacttgccaagacactgtacacatttaagtttgctacctgttacttggcatatctcttggttcctaagagttttaggtattatgcaatttgccagctccctcagcccctttcctggctccaaacctttggctttggtttgatgttactgggttgctgcaggaaatttccctgtggacctcactactttatcaactgtaatggtcttgttgaagacaaggcttagaacatcatcagacccagagcctttctcagaggacctgggagaactctccatatggattttcatttgggaagatagatgctcttattggaacagctggttttccctttaaaacagggagtccagcagcttctaggatgcttagaatcagaattgttgctcactttttaaggtatagagtatttgtcttattcttaactacattttatatctttgcccttttttcccctactttaaataaaatctatctctaatttatgttacttaagcaatgacaaattctttttctgatagacaaagtaaagtataaataaataagacatccaagtaataatcagaagtattttttatgttggtctcattgtggtctttttaatcccaggcctgatgcgctttaggtaccagccttggttgaagaggagcttgaacagcctacacagacatgaaacttgagcaactgagctcatggacgttgcttttaatcaggatccagaactagggagttgagtgagcttggatttgagctccacttttcaaattttcaccacctgtgctctttcgtttttgttttttgtttttgtttgttggttggttttttgtttttttgagatggtgtttcgctctcgttgcccagtctggagtgcaatggcacaatctcggctcactgcaacctccacctcccggtttcaagcgattctcatgcctcagactcctgagtagctgggattacaggcatgcgccaccatgcccagctaattgtgtatttttagtagagacgggatttctgcatgttggtcaggctggcctcaaactcccgacctgagatgattcacttggccttggcctcccaaagtgctgggattacaggtgtgagccaccgtgcccggccagacccgtgctctttctcccaccactgccctgtgccaaccaccacccccactcctattctggaaagagccaagccgtcagctattgcttttgaatctatacgcaattctagcagcttcttttagagcccttttaaattagcatgaaatagttttactagccctgaggtttcagccaaggagctttaaaggagccagccctttgtttacttatttttcctcttctgaacatttggaaacatagcttcggtgctccttctccaagaaacctgagtcatgacctccccaaagtgtttccttcccgtggcctcttctcccgatcagctgtttgttatctgagggattcgttaataaccaggacatctgattctcatcattactcatcctctgctcactctcctttctaatgcataggcctttagccttttactttctacctttttgaatgctatacttttttgtaaaattttaattaggttaatgcattgacattgttcaacattcaaacgatggaaagggtgagtgtggaggtttggtttccccactttttccagccatgctgttgccttctgcagaggcttctagaattttcagatgaatgagaatcctttcagaaatagtctctgcaaactccagcacacccatagtgctagggtgggtcttagtaaaatgtctgcagggtaagcacactgttttgcactccacacaattcacttcacaatatttcatagagactttttcatattaatatataaagagatatatacgcgtgctgcttcacgataatccattgcagagctggtctgtaatttattcaagcattctttgttgatggatgttagggttgtatccattattttgctattatgaacaacaccataatgggcaaccttgtacacatttcctgtcaacatgtatcactgaatggaaaggatctattcctagaaaggatccattcctagaagaggaattctgtacaatatggccaactttctctctgttgaggttgaaccatttgacacatttcgctagcattgggaaaatccccattttcctcactatccatttttcttcctctctttccttcctcttttcccttcttcctctttttttttcttttctttccttccctttttccttttctttccttctttccttgccatttaaaacatactgataacttggcagcacagggcagtgattaaactcaggcactcaccccaccctacctgggaatctgaattctgtcttttctgctgctgtggattctcagtccccaagttgtgtaaatcaaagcttctcctgccacactagtgtgtattaggccaggacttcatagtgtgattcaaatcaccaactgaatttttttttcctttccttcccctttctgggggactacgtttttcatggagaccggggccctccagctgctgtgatgatcctcccttgccagggaggtgctgttaatagcaaatgccaagtgagctggtgttctgtccctccggcctccttgctcacaatagccaggaggaaaaagccatgtaacctctggatgagtcccttggccatttagaagtgaaatgaacatccaagaagaagcatagacaatgtggaggaagaactcttccaaatgatggcagggatatttggaatctttccccctgagttccctctggaagttaaagcccagatcccgtgaactgattaaaaagccccagaccattcccgttccagtcatcttgaaactgagcaagaccgtgtcatccatggagcttgaacataggagcactttaaaaaaaaaaagaatgaaaagcccctttcttgttttggtaatgatttaatgacagaaagtcacccacccaccacttgggtaccacgcagcccacattaaacaattagcccttgacagtggatagttcaagttagtttgaaatgagaaattgccggtgacctgaaacccatcattattaaccttgtggcacaacattgccataaccagtagccaactctcattttttctttttcttttttttggttggaagaaaggctcattgaggaaagttggctcagttcttttttgagtgaagtggtcagaccaccaagaattactttcctttgattgggaacaggttctaatacagatgtcctttacatgggcaatccacttttctcattgattccacaatcaattcgagctgtgtttatatatagacacctgcccacagagaccatgtggagaagcatttgcgtctcgctgcctgtcttccaaaggatttgccttctagtaattcatgtttttatagcttaactacatttatagtgaacgggtggcttcttcatccaaagaaagaacaaatgacaaaaagaaaaattttgatgatttgggaaccgcatttatggaataataacattcatgatacctctggataatgacaataattacagtatacgattctagaagggtgagtctagctgttcccagtgtgtttccatgggttgttatgtgttactggtcaggcgatcagggatttgctgaagattttctttcccatgtggcagtagatatttcagaaccctgcatcatggtgtccacagaagtccccagagttgtatgagagttcatctgggcacctttcccaaaggcaggccccctgtgcagcttcaactattcactctatttataatgttgttcctggatattgggcttgcttccacttgtggccaggagaggatatttcttactccagatcaaagagttgagacattgccttcccacaattcccagtgagcccaactccttaccacaattcccaccccatgccttccccaaattcctgatgagccctatgccttcccacaattccctgtgaattttgctccttcccacaaccccagtgagccccactctgtcccataattccctgtaaatctcactccttcccacaatccccactgagtcccattccttcccacaattccctgtaaatctcactccttcccacaatccccactgagccccactccttcccacaattcccagtgaaccccacttgtgtagtgtgtctgtgagtagtctgcccactctccttatgacaggtttccagtattatctgtttcataacccatttccaaccttctgggttttttccttcaacgtttcctgtgacagttctccattatatctttgttagataatagttagcaacccattaataacttccaactttttgagcctctaccatatcttgttttcactgggatttctacaccgtggctactttgtgggacctgacttatcaagaacttaagcagcatctgttagaaaaggtattttttttatgaagtaagtagggaactaactacctgttcactgctgcccgttcattgctagcacaatgccaagtgtcaaataaatgtttcttgaacaagtgaatagagtacgcttctaggcttctggaaacggtgaatgttgctttatgtggcaaaaagggactttggagatgtgatcaagttcaggatcttgaaatggggagatgaacctgaattaccgaagtgggccctaagtacaattataagtgttcttatgagagggaggcagaggggactgtgactacgaaagaggaggaaacagggagaagaggtgaagcaggtgtgaggcaacaatctggtggcttctagcccctgaaagaggtgagaaatggattatcatttggaggattcagaaggaaccagctgtgctgacaccttgatttttttaacccagtgaggttgattttgggcttttgacgtccagaatgataagagaataaatgtgttgttttaagacctaagatcatggttatttgttagagcagtgatcagaaactcatacaagtatgaatgctaagagtaaaggcacctgcctcccacatactggacccttaatattccttttcatgggaggttttgcagattgctgccctccttgctctccttactcttctccttttactgaaaagatatttactagatgtctagcatgttaaagactgtaccttaaaaaaaaatcacactctaatttagcacagtttcaattgtggttaagcaccatgccattcacacttcagaaccaagctcagatccatgtgtgacactctggaatgtggcagctgatggaggaagggggctgaagttgaatctgcagtagttgagttaaccttcccatggtgcctgcactagcagggactggactgagaccccagctttcccagtcaggccttcatttttctctcatggtgagagctttggaaataggcagtgcagtgtgggagtccttcccctagcatgttagtggccagcaccatgccacacagccacccagagctgcaagagagtctgcagaggtgattgccccttgctaggtgagtgtaaaccaaaaataaattctaagctccccaagcaactgaatggatccctgcctctgggccaaggggattccgaaataaacctgaaaaactagttcaggcagtgatgggaagagggggttggatatgactcattatacccttctttttttggaattcagtcacaactgaacagcattagcattaaaacagatcctaaggctgacaaaacagactctttatagcaataagataccaaatttcaaccctactctagtataggatcactttgcagatagcaggcatggaaagaaatcaaattattttaccccaaaatatatttctctggtatatttcgaaatggccctgcaaagctgtttcttgtctacattctgtagagaacatccttccctttccaggtcttttcctgatccaggagagattcactaggagtctggcacctttttagttttgataagagatatttaccatttattctctctgaggcctatttcctggaggcttcatctgcatcataagaaccttggtctttttgtggacttatcttaacccagatagtcctttctactgatgccaggtgtttagctaataacacttttaaccaattgccaatcagaagatccttgaatctacctgatacggtttggccgcatcgccacccaaaatcagacagtcctatctgttgatctcgggtgtttagctaataactcctttaaccaatttccaatcacagaatgcttgaatccatgtgatatggtttggctacatccccacccaaaatcagtcctttctattgatctcaggtgtttagttaataactcttgtaaccaattaccaatctgaaaatccttgaatccacctgatatggtttggctgcatccccaccccaaatctcatcttgaattgtaatccccacaatcccgacatgtcaagggagagaccaggtggatgtaattgaatcatatactcccgatagtgagttctcacgtgatccgatggttataaataagtgtttggtagtttctctgcgttcattctgcttcctgccgctttgtgaacctggtgctttgcttccactctgccctgattataagtttcttgaggcctccccagccatgctgaactgtgagtaaattaaacatcttgcctttataaattacccagtttcaggcagttcttggtagcaatgtgagaatgggctaatataccacgtatgacttggaagccctcatccccatcactttgagttgtccttcctttatggaccaaaccaatgtactccttacatatattgatagaagtgtgcctgtaacttttttcccctaaagtgtataaaatcaaggtgtaacccagccaccttgggcacacgttcccaggaccccttgagactgtcttaggctttgttcactcttgtttgggtcgggaataaacttctttaaatattttagagtttcactctttcaatcaacgtacgtgactacccagaattaaactggaatgctgttaataagagaaatgaaaggatgatgggagatgtgcacccagcagtgtctgtcttgtggtcctgaagtctaactctaatcctggctccactacctggaccatgacaggttgtttaattgttctagttagagtgttctcctatgtaaatagggataataattggatgtatggcaggatttgggggaggattaaattaggttatatgcgtgaagttcgtagagccagggtctgggcattaatacgcatttagttactgtcgctcctgtgatctgcacaattattgtcattatcttcccttcctcctccttccccctccttccccctctctttttccttttctttctatcatcatccatagctctcttgccccattgttttaaacccatctgtttttgttgctggtaactgtatccaaaagtaatacagaattttccgtaagaacatttattgtgtttccttctacccacgaattttcttatgctacacacacaacccactgaaatttcacctctattgtatgtggcttttctagaaacgtgtgcttctgggctttgtctcacacctcctggccagtgtttggcatgtgctcacacatgcacgcacacacagcctgcactatgtttgttgactgaatgaattaatatttcacagaataacaaacacatgctgattatactccttgggaagctaatttgttttcagctctgagagcaaggccaaatcaccagattgatgcctttggctgtgtatctaaaggacgtgccattgcagctaagtggacctgaatgtacagtaagacttagtggtcaccagaatgcatgccaccccggtgcttctgcatgcaaagggtgcgggccatgtgccagtcacagtggaaaaggcatgcttcgtgtcagcacatttggcatctctctgggatcggggatttataccccaaaaccttgctctagagatttggcttccattagcaagggtaaggcttgtaagaaaggagttttactcacctttgcttgctctcacagctgtgtcagcccattttcatctcttttcaatgttttaagccctgagagaacccagttcaattcccagcaagaaatgagcctctgtaacgcagccccagacccaccttcgagggtaggggcacccttgttgtcacgatgtacaggagccaggcttggcatcggagtggatgcttgggaagccccagagaaatagacgagtgagtgcaagagccagctgcctgcgtggcttagaggaagatttcaaacacctagtgcactgaaagtctgacttaatttgtgatttgtgaatagtctcccagaagctatggggtacagatgtgggacttgtgaaaaataccagacatcctgtgggttaaagaaaaagaaaggggggcggtgggtgaagtgtgagcaatttctggcagctttgtgggcatttattatgtctaggtggcacagtgtggttggactggttggtttcctatcagttgcattccctgtatgtcttcagccaatttttttggtaatccaaggcctgatgtatataaacaaattcctttcttgatcatctaagcaatgaacacttaacagagtcaagcttggagaattcagttcctaccacaaggtccggaatggaggatttataactgggagacagaaggtatgctgaaaggtactcaaactgtcacttccttcacccccaggagcactgaagcagacactgattcctctgcagttgttgggcttttgagctacttccctcctggggagatgcgtgttaactgtttaatgactggcaatgccgtaacagtgagcaagcaatgtgaccttacaaatacatgtgcagaaatgcagatgagtgggcctaaagaatccagactcaacttacttctagtggtaatggctgtaggagagatggggagtaggagaagaaaagccaaaggcagactttagtctggtttataatgctttaatatttttttgaaggaagaaaaatgttcattacttaacgtaataattatttttaaaaagcagcctggcgggggggtattcatttttctgtggctgccataacaaagttcttcaaacttagtgtcttgagacaagacatttattttcttaaagttctggaggtcagaggtctgacacaggcctccctgggctaaaatccaggtgtcttcagagctgtgttcttttggatactgtagaggagaatacatttcctggccttttccacgttacagagactgcccatgttcctcgatccatggctccttttcggtcaccttccagccagcaacattgggctgactccttcaatggccatgtctctggttctttgtcttttgcctcctcctcttacttttaaggacccttgtgatttcattggtctcagctggatagctatcaagggtcactttaaggtcagctgactagcaaacctaattctatctgcaaccttaattcatataacctggcgtagtctcgattttattttaattttttaattgaattcagctttacagtatcttttgtagggggtaattttagcttctttctccgttgaaaacttcaagtaaggaaacacttatattgctagtgagtggccagctggagttgtaggtctaattctttttttttttttaagacggagttgtgctcttgtcacctaggctggagtgcaatggcatgatttctgctcactgcaacctccacctcctgtgttcaagcagttctgcctcagcctcctgagtagctgggattacaggtgcctgccaccatgcccagctaacttttgaatttttagtagagatggggtttcaccacgttggctaggctggtgtcgaactcctgacctgaggtgatccacctaccttggcctcccaaagtgctgagattacaggcatgagccactgtgcctggctggttgtaggcctaattctagcaatctcagcaactgtaggatttctctgcattggaggaagcaagactgaaggtcgtctggctttatggacaatgtgcttagaagttcatgccataccttaggtccagtcttgtgactgaaccaaccagacaggcctaggctctgccctaagtggtcagcctccgaggtggtagcacgcagggcctcacttcccactgcctctgtctatgggcatgtgctgtgtgccattctctccccttatcagtgggttcccagctgcctggtgtacaggagggttaagtagatacctgttgagtgattgtgaatgttttcattcacgggggcagatttgtgtcctactaacaccagacatgtcctgttttcagattacttctttttcaacatctgagtacctataacatctaaagaataacaggaaaatccacctgggtggccaaagtcaatgtaatgggcagaaagggcatgtggtagacttggaaatcagacatcttagactccaacacagggctcttccacttgctagccatggaacctcagactgggatccttgacttccttatctataaaatatggcttataactcaccctgtattatagatctgctgggaacatgatagaacgtctgaacagtgctggcttatagcaagtgttcagagatgtgtttcgttgtttttcttttttctttttttgagatggagtttcactcttgttgcccaggctggagtacagtggtacgatcttagctcaccacaagctctgcctcccgtttaaagcaattctcctgccttggcccctggagtagctgagattacaggcatgtgccaccacacccagctaatttttgtgtttttagtagagacggggtttctccatgttggtcaggctggcctcaaactcctgacctcaggtgatctgcctgccttggcctcccaaggtgttgggattacgggcatgagccactgcgtcaggcctattgtttttcctacgtaccgtgattgcttgctttcttctctgtcgatgtccctgccatctaaatgctgagtccccttgtctacattttgaggctcttctattatggaagagggctagagaggccatcagaatttggtttcactagcctttgatccttcctgtttaaggagctcagcatttagcttcacttccctgtcattcatcagaattcattctcagattggaattgtccagtcttagagtgatttttgtccccagtgacacttcccttatatccgtgctgacacaggttcaggagaccaggtcgagtcgaaatcctggctgttccgctttctaacaagctgcttcatctttctgtgcctcacacatctataaaatggagctgggcatctgtctccttcagttatggtgagaattaaaataaaaaacacaaagcacttctaagaaagtacaggagaggccgggcacgatggctgacgcctggaatcccagcactttgggaggcagaggctggcagatcacgaggtcaggagatggagaccatcctggctaacacagtgaaaccccgtctctactaaaaatacaaaaaaaattagccaggcatggtggtgggcctgtagtctcagctactcgggaggctgaggcaggagaatggtgtgaacccaggacgcagaggttgcagtgagccgagatcgagccactgcactccagcctgagcaacagagtgagactctgtctcaaaaaaaaaaaaaaaaaagtacaggacatacgtaggacccctgaacatttatccccctgctgccagtacgttacagcaaccaccaagtccacctctatcaggatggtgccaatttgtggggtttttttttttttttgagtcggagttttgctcttgtcgcccaggctggagtgtaatggcgtgatactggctcactgcaacctctacctcctgggttcaagcgattcttctgcctcagccccctgagtagctgggactacaggcacaccccaccctgcaggggttttttttttttgttttttttttttttttttttctgtattttcagtagagacagggtttcttcatgttggcctggttggtctcaatgtcctgaccttaggcaagccacccgccttggcctcccaaagtgctgggattacaggcatgagccatcacgcctggtgaatggtgtcattttgatgtactgagccatctcagtttttccagcaaccttccctcacctttgtggtcagctagaaggtcagttaacacatgggatgggaattcttgccaatgtccttcgtaaaagaagaacttctccttcactcacatgtcctgatacttcctcagcatttcattctagcctttctgtctccatccaccatctatcaatcatctatcatctagctatctatcgatttctcttttttggctttaattttgtcactttttcttctgtctgctatagaaatagcaaattttcttatgtaagaaaactctgaacgcgaggccaaagtagaattttccctgaaacagctaccttttccttgaaattgttctatatctaaaatcactaggtgaggagtaatagaaatgtagacatgagaagtgaaactgttttttttccttgtaaaagcttcattgtgccctttagaggataactctgtagtttgatatgataaaaataattatatgattatgctgagtgaggtggctcaagcctgtaatcccagcacttggggaggccaaggccggcggatcacttgaggttaggagttcgagaccagcccggccaacatggtgagacccccatctctgctacagatataaaaattggctgggcatggtggggtgcagctgtaatcccagctgctcaggaggctgaggcaggcgaatcgcttgaacccgggaagcagaggttgtagtgagctgagatcatgccactgtactccagcctgggtgacagagcaagactgtctcaaaaaagaataaaaatgaataaaaattatgtgattagagaggggaaaacaatcatttcttgtgcgctaatgccactcagcaggtgcttacactgtctggttcatccttacaatgactccatgttatcgccattttcagatgggtaactcaggtagaaatatgattccattagtttaaaaaaaaatacatagaagataagaaaaatcaccaaaaattcccagccacagtagatgtatctgtatttaactactctcctcgtgttgaatatttatcaggtttctcgttttcttttgtttttgttgtaagtggcactgcaggccagttgcggtcactcaaacctgtaatcccagcactttgggaggctgaggtgggcggatcacttgaggtcaggagtttaagattagcctggcccacatggtgaaaccctgtctctactgaaaataaaaaaaaaatcaggcatgttagcatgcacctgtggtcccagctacttgggaggctgggtcaggagaatcgccttgaacctgggaggtggaggttgcattcagtcgagaccatgctagtgtactccagtctgggcaacagagccacatctccaaaaaggtggcactgcagcaaacagcatccacatgtgtgcacagaatattgttctgttgtgtacctcagatggctttgttaggttagattccctgaagtggaatggccagggaatttaaaaagggttttgctcttgtcacctgggctggggtgcaatggcgtgatcttggctcactgcaacctccgacccccctgggttcaagcgattctcctgcctcaggctcctgagtagctgggattacaggtgcctgccactatgcctgggtaattttggtatttttaatagagatgtggttttgcggtgttggccaggctgttctaaaactcctggcctcaggtgttctgcccgtctcggcctcccaaagtgctgggattataggcctgagccacggtgcctggccaagtctgttttttaaatctggaaaatgggacttgttaacttctgtattgtcttttctgctgctttatccaactttgcaatctataagcttctgttactggaaaatggtgatggtaaagtaattgctttcttatgttccatcacagagggtagactgctagctctagtatttttcaatgctgctttttaagtgatagatgtataccattcagtaccaaccctgcaccctgggacatgcctccttgctgaaactaccatttatctttgtgaattcattattcgtttttccaacaaacttttattgaacatctaataagacctggacatttggctgaatgctggaagtgcaaagatgaaggaaagttgctttttggaaggatattagaatccaaaggtgaagcctgcacagtaagtaggccagtggtgggataagggatccattggcccaggaaattggagggacttggagaaggaccatctcacccgtccaaagaatggaggagtaagggaaggcttctggaaagaagttgtgttgaggctgtgtttggaaaggtgaataggagttaggccagtgaggaatggggtgaacaactgcaggaacttgagtgatactttggggtgaattctctctctctctctgtctgtctctctctgtctctgtttctgtctctctcactcacattttaggtaaagcagtgtttcttccccaggggtgattgtgtttgttacagtgtgatggagactggatactgcatctagcagatagatgctgtcaatcatcctacaatgtgcaggaccgtgcccacacaaagaatgacccgtccccaaatgtcaacagtattcaggctgagaaaccatgtactaaggcacaggacaagcatcgggttggataatggcagagaaaagtaccttacctccttccagaacctgagagtgtgtgactgtgagtgtgtgtgtgtgtgcacacacttgcgtaaagtgagaaaaatctggtgttttttcgaagtctgcctcgtttaggctctggactcctgctctctgttgactctgtccagagagtaagcgactcagcaggtgtgcctccccatgggcccccttcacggtgtcctcaccttgatttattagagcattttattcccccaacagtgtttatgacatccaaggacttggtggaaccatgaggaaatgagagtggacagtgagactactatcattcattttcactccccgtaaacatcttctgtttctgttttagaagacattgctaatcccctcatgcactggctttgcgaatttctttttcagcctgggtttgaaagcaaagtggtagtgactttttcctgatagctgctgaaaaggttccacagtatttggaccgctgcctgcttctaccctggagcacaaaagatccaggcgtagaaattggttctaacaatatccttttagagaacaccaaggggatgtgagtcactttccctttgatttaaaggcactgcgtccctcaaattcagagttagagggtgacatgtagttgatctttacttcccgggggcagaggaccataattaaatggctgtggaaacccagaagcagcctacagaaactcttaggagccctccgtctgggaggaatttttttttttttttttggtatatctgtgtttacagttctagaaaagtgttggttttgagggcaatggagacaggaatgaggagaaaatgtataaaggagaggttgctgtgagccgagattgcgtcactgcacttcagcctgggcgacaagagcgcaattctgtcaaaaataatattattctgttgtttcctaattgttgatttgtggtccatatatttggttccttaactaaattggagttcttaaaacaaatgttaagaacacaacatttaggcacacagtacttggattccagtagctttggataaattaataaaatccttccattttctcagttgtagaatgggaatagtacccaccttataggcttgctgtggggagtaagtgggataataaatgttaagtgcttttagctgtactgtacatacataatttctgtaagtactggctattttaaaaattattttaacactattctgatataggaagttaaaaaatagcacagaggggatccctgtgatttttactcacttttctacaagcatgactccttatataactacagtacaggatccaaaccaggaaacatgcctgggtacaatgtgagtgtataattccaggtaggtaaaataatggcccttattaggatgtctgcgtcctaatccgcggaaactatggatatgctttgttacatggaagaggaaaattaagattgcagatgaaattcaagttactgatcctgcgaagttaaaatcaggagattacccagggttatctggttgggcacagtgtaattgccaggattcctaaaagggggagagagagtcggatgagtcaggcagtgagatggcagcatgagaaggacaccgccacacattgctggctttgaaaatggagggaggcgggcatgagccacagaaagtaggcagcctctagaaggtggaaaaggcaatgagatggattctaccgtagagctaccagaagggaacacaccttgctgatgtcgttttactattttcttatttatttttgagacagggttttgctctcgcccaagctggagtgcagtggcgctatcatggctcactgcgatcctcccacctcaacctcctaagtagctgggactacagtgtgtaccatcacgcccggctaacttttttgtatttttagtagaggtggggtttcatcatgttgcccaggctggtctcaaacccctgggctcaagcggtcctccctccttggcctcccaatctgctgagattacaggaccctgctgatgtcttaatcttagccccttcagatcccagttggtcttctgactccagagctataaaagaataaatgtgtgttatttcaagccgtgaatttcttattaatgtgtcacatagcaatggaaaaataaacgttctatgccatttttatcacatgcgtaggttcatttaaccaccgccactactaaaatacaggactgttccatctgcaccgaggtctctctgtgctaccccttgaagtcacacttgccaccctccgcccttagcctttctttcagcctgtgaggaagcaaaacttttactcttcaggcatcacctcacgcgtcttttctgcctgggaggcactttttccagttttcctggcgaaatagtcatcttttaagttctctgacaacccctctctgagcatctaatcccaatcagaattccctcctaatgtaaactctcattatatcttttaactttatttcttagcacttatcatgctgtatggataatggtatatttgggtgagagtatttgtttctctttctccctaagtaggctggaaactgcatgagggcaaaaacttagctttactcaatgttttctcagcttcatgtacgtgactgtatacagagtctgagccgagaaaaccttccttgcatgtacgagcaaatgagagtattcaaggtacagaactgaaattttctctgggtttttaagtggaagagtacacaagcattataagcaattttacctgcatttactcaacagacttttgttttttatccccttcggtgtaggttgtcatactaaattggttcagattctgtatctgggggtagttagacttctgtgaactccaagtagacggttgaacatgactgaacttgcacagtggacacattgtgcatttgtttttaagtccctagctgtttccagaaatagtttggttaattcatactgataaaataaatccccgtaagagcattattccccaaagtgggcttcctttgccaaacctaattatctggagaaggtattgaagaagtcaacttacctcttggccaaatgctttctagaattattcaaccaaagacagcaggctgcacctaggggaagccaaacatctggatgaagaatgaaatatccagatgttttcaagtatctggatgtttctaaccatctgtttctcttggttattgacaaatgatccagctgttttgcagaagatggtataccttgcctaacagaagagagaagtaacattcttagaaaactttgacatcatctcatctgtactaacacaggatttctgtctttaattgaagccatgacttgatcacaaaaatgaaaatagcttcatgtgtttctgaagctgttgtcttgctttgggcgccagactgcacaggattttaggttaattgtcttgtttacaattagagtctgcattgtttgtagcttgattctatttataatgtactcacaccttaaccaatagcctcacagatggcatatgagaatactcatactcagtgctgctaaaaacagcctgctgcctgaacaccagagtgtcttttaaagcgtagaaaagttgggtacataaaatttctgttgcaaaaaggaatgtataggccttaattgaaaatgtatctttctggaacaggagttttagaagctgagtaccacccactcccttgctccacaattctcttttgtttaaggcaacacgtaggttcttagttttttaaatatatatatatacgtatatatatacgtatatatatgcgtatatatatacgtatatatgcgtatatatatacgtatatatgcgtatatatatacgtatatatgcgtatatatatacgtatatatacgtatatatatatgtgtgtatatatatatataaaaatatatttaaataatgttaaggctagagtagaatgacatcatgggaaggcttattgaaacttggagtggattcgtagtctgccacgagaatccttgtctgatgtttgtgggtgtgtaggactgaatttgaagtccttaaatggatgtcctaacagtgaataaagacgtggggcttgaatttatgtattatcttattactctgtcattttcttgagtggtacaccagagtgcatggaaaagtaaatgattggaagccgcgtggtagttaagggtgatgatgtaggagtgagaacacaggcttggtgcctggcgtcagcacacacatcacaggccctccctgtcagtggctgtcgtctgttagtgtttccagcacagctctaaagagcgacgcttggaggctggggagagggggatggagaggcatatgattctgttgacatttagtgacatgcgctcttcccaaccaaacagatgcaaatggattttagttgtgagtggttgtttaacacctgcataagtgacagacctgcagagacaggttgtggatggaacgcaaattcaaatcagtgcatgagaacagcagctaaagtggacagacccaaatgttttgcctaaatatttggctcctagttgtacaaaaagccaaatggtttcaatttcatcctatataaaccagatgattgtgtatttacttctcacttgccctgccagggggatggttggtggggggaagacaaggacaaacaattcgaaagagcaaatgagccaaaatccatctggattttgttaatgctgattatatagtttcttctgttgtttttaatgtcttccaagccttctgtgtattagccagcattaaggggaaaaaatgacattttgactttgactccctttgtaatgtaatgcattgttatgtatttctgaagtttttcttaaggaaatagtatatgataataatgactagcactcactgagtgttcgtgatcgccaggatcaggccaaaggttttcacgcttgtgcctttttaaacttctcaacaacccagtgagatagatgttattagcccaatttaaggatggggaaagtggggattcacagatgaagtaacttgcccctagcatcgtacagtcagtgagtgtgagaggtacaattcaaacccaggtagacctgaattaaatcttctgaagcaactcttcatcaccaggtgtggctacctccaatgattactttgtttttatgattatcaacaaagttactctgtggagcaggggcaggcaaacattttctgtaagggagagacagtattttatgctttgcagtacagtcttttgcaactgttccactttgtcaccacagcacaggagcagccatggacgctacgtaagaaaatgagtatgggagtgtttcaattaaaattatgtatggacatggaaacttgaactttttatgattttcatgatcacaacttactctgatctctttcaaccatttaaaaatatgaaaaccattcttagtttacaagccctacaaacactggcattgggttaggtttggatgatgggccattgcactccagcctgggtgacagaatgagactctgtctcaaaaagaagaaaataaaacaggcgttccttacctacagcctgctatgatttggggttcttgtatttttttttgtttgtttgtttgagacggagtcttgctctgttgcccaggctggagtacagtggcacgatctcagctcactacatctctgcctcccgggttcacgccattctcctgcctcagcctcctgagtaggtgggactacaggcccccgccaccatgcccggctaatttttttatttttagtagaaacggggtttcaccatgttagccaggatggtctcgatctcctgacctcatgatctgtcagcctcagcctcctaaagtgctgggattacaggcgtgagccactgcgcccggccggggatcttgtattaatagtagggagacagtaagcaagcaaggctcagttaatgataaattgttatcaggagacccagcagtttctgctttttctaccctcctctttgagctctatttaaactaataggttactgggtttgaacatgccatgcagtgggaagaggcgggaaccccactgagctgtcctctaagtgaatcatgcccactatttggttgtgaggctgtggactttacttttcacgcatggcattgaaagaacagggaagggtggattccccatctcctcttcctctttggaatcaggaaaacatgtttctattctaaatgttctttgataaataagattgcatgttcctggctcctgtaacatatattttctttttcctttgtccggcatacttgactaattgtagagctttttgagcctaaaactggataggaacccagtgcatgcactcttaaggactcagaggcctgctcaaggttaagtgcagtatggtctgaataataagcatagatgcccctttactgagcagcagctgggtgctgggcactgtgctaggcatttttggatgcattttcctcctccaacttcactttcccctatgagattatttcctctgtgttagagacaagaaaaatcaatttacaggtagtttaagtgacttgttcaaggctacagtaagcttgaagtggcaaggatgggatttgaacgtctgtctgcttgattccaagaccgtggcctttgtcattcaggtcatgctgctttcctcaaggcaaggaactgaggttttctgttggcagtgaggtggtggcttcttgtttccctggtcttagatactgctcaactcacagttgaaatgtagaagtgaaaagtcagacagcagcaggtgttgctgggaatgtggagaagttggaaccctcacacaccattggtggggatgtaaaatggtacagctaacttggaaaacagtcggcggttcctccaatagtcaagagttcccatatgacctagcaattccactcctaggtacgtatcaaagagaaatgaaaacatggaccaagacttgtacatgaatgttaatagctgcattgttcttaatagccaataggtggaaaaaaccctaatgtccatcaatggacaaatggataaatatgttgtggtaaatgcgtgtaatggaatattccattttatattcataaaaatggacaaagtcctgaggcattctataatgtgagtgaacctggtaaacatgaggctaagtgaaagaagttagttacaaaagtccacatatggtgagattccgttctgtgatatgtccagaacagagaaatttagagatagaaaatagatgagtgatgactcagggctgggggagttgggggtgggcgggataggaggggtagaggtgaaggtgatgaaaatgttttgcaattgtctgtgttggttgcacaactctaaatgtactaaaaatcattgaattatacaattttaaatgggtgaatcgtatggtatgtcaattatatctcaataaagctgttaaaaaatctgaaagtgtcaattaatctttgctcccagagaaaaccactcagggcccgagctgctcatgggcacaaaaacccattcctcagattccttggccatgctggaagcctggcttgtgtgagagcctcaagtctctgtaacagcctgggagtgttggtcccgtcacagggctgtggcagcctttaaagctagaaggcactgctcagaggaactggttcctttgaatccttttccgtcaccatgcaaatgtttacaagctctaatcaggagaaatgaaaaatcacatgtctaattttaaatatgttgcctctgatcacaggtgttgttaaaacagctcttttatgactttataaatactcagatttattttgaagcaatgtttcattattcctatactatgattaaatattgagactattgcttttccaattgttctattgcagtatttaatgagtgcaattaaatggaaaaattgcctttttaactggtgatagtccattagtgtctctgtctcttcaggaaagaaaagaagtgaattattagaatgacaaatgaggcaaagttaccaccgtgatggagaggtgcgatttccctccacataatcttcagttagtgatctctgtaagagaatgtttttcaaaaggctaatagagaagtaatgagatcagaaggaggtcaacccggccttctccgtttggcagcttgattaatttatttctccttcttggagattgctgcaaggggcttttgtcaccctgtgtttttcatgggactgtaacctgagtgactgctgatatattagccttgcaggcaaggaagcaagtccgttgccctggaatggaaggcataggagttaagggtttgtttgcttttgcaacttgaacacactcattgggagctttggataatgacaacaatgatgatgattttaagagttaatcaaattaaaggctatgaaatgatgcccactgtggatcctgtgcctggtgctcagcacatacaacatcatttcattttcacagcccttgtgacatgatagggctcttttgcagatgaggaaatgcaggctcagagttatctagcattgtacccttaagcagaagggggaggtaggagtgaatctctgtctgcctctaaactcttgagctcccctccagaagtccagggctcttagaaactttgtactcaaccattaaattgttgccattgtgctgaggagcaaggaaactgggatcacacagctagatcacagtgggggaacctgaattatggggatgctcacaaaagggcaaaacacaacggttgctgtcatttgatgctttatgttaagtgtgcatatgctcagttgcagaaacctaaattgctaaattgcaaggctgtatatgatatgccaatttggcatattctgtctttttatattctgccacccctatcatacttaggaaaatgccaggttgtaatcattcactgggagaaacaaggggttgaacgttgttatcgcgcaaaggaagctgggcctagtaaaggaatgtaaatactaaaatgccagcatcactgttacttactgtgtttctctggatgtattacttaacctctctggctttatttctgcctgccctccccccgccccccccccccgcaatgcctcaatctgtggcagagttgttacattattgaaaaagaacataaagcatattttctggcatacagcatatgtttaatttataatttttgtttttatcattaaaagcaacagattgctgtattcttgcctgccactgacatggacttaattgtttcatttagacatttaagtgggcaatacacttaaaatgcagatataactttaattgtcaaaacatgcttattttaggaaatgtgtttctccagtaaagctcagtatctggggctttttcggttgtattctatatgaatcttgaatactgaagtttctcaccatggagatgacaaacacataaaatgtttactttgcaaactgaatttctcttgctgctttttctgaagttccccagaggctcatcatcatcaataccatcaattaatagtcatccttggcttcctcgatcctcagcactgcgctgggcactgccccccaggagcatccatgcacctcaaatcctgaccttgtgactttcaagtccctaagtgaccccacactgaagaatctggtgaaggccatccaagcccagagttcatttaagtggcagcgatgggaccaaattataggccaggtctgtcttatgaaagatgataaatggatgtgtcatatcgggaaagaaatcactctgtcatcatatgacaggctggcttgatttctttgcaccagtgtccctaaaagttgggatgggggtgtgaagcgtgccagctttcaaagccagttgtcactccattttgtgctgtacctccccagttatgaatctggggcatcttcactggactctccaagccccagtaccctcagtgtggaaggagaaagcatgacccactgggcaggacacagaaggcttctgtgagaatgaagctctatcatgcttgtagaacatggagcgctcagcaaatacaaatcacagcccatctcctccaatcatttggggtattaggattcccttcactccaactcccactggaaaacctctttgccatgacacagagattccacaatcttctatttttatttaaaaatttttttaaagagtgatctttggttttctcagtagatgctttcctctgaatagcaagcatatagatagtcttctccttcagacccccgaccatggctatattatttagtctacagtggttctttgtacaaagtgcttctgcaaagctcttagagcacccagagctggctttggaaagcaagacattaggaatgagctagcctgaatgagtcctgatttttttttttttttttttttttttttgagatgatcttcttctgttgcccaggctggagtacagttgtacaatcttggctcatggcaacctcaaacttctgggctcaagccagccgcccatctcagctacttagtagcttggattatgggtttgtaccaccttgcctggctaatttgtatttttagtagagatgacattttgccatgttggccaggctggtcttgaactcctggcctcatgtgattgccccaacctcagcctcccaaagtgttgggattataggtgtgagcctctgtacctgagttctgatttcttaaatttcacagtcccttacctgtaactcaaattcccgaaccttcaaaaaacaacaagtggcagcaaaacttgatttggaattgtcgtggtcttgtttataatcgtcatttttcttgtcatgtgatttgatgtttgggtatatgttaacacctcactagggatatttcatagcatatgattgatgtaagtcgtaaaaaatttagaatccttcaacacatacttggattttagatgaagaatcatagatttttatttctgtggctttggatgagctgtttaattttcatttcaagttgctggtaagatgatgatgataatagagataatcctgtaagaatgctgcaaagggttagtactttattcttgcaacaagtatttattgtaggcctgtattcaaaggagaataagataaataagatcgaatgtggaaattagatgaatccggagttagtgcaatgaaagttactaagagagaacagaaatactcttgataatgctgatgtgactggacttttgacaagcagtctgggacttctgctgaaaagtgctcttgaagccaagcaaaatcatttccacaccctcagcacctccagtttttcctggccttggtctcagggtggttgaccttttgccgatgtgtttttcttttttcttttcttttgttttcttttcttttctcttctcttcttttcttttctaacagtcttgctctgtcttccaggctggagtgcagtggtgcgatctcagctcactgcagcctctgccccctgggttgaagcgattctcctgcctcagcctcccgagtacctgggactacaggctcccatcaccatgacaggctgattttcttttttttcgtaggacgaggtttcagcatgttcgccaggctggtcttggattcctgatctcacatgattcaccaaccttggcctcccaaagtgctgggattacaggtgtgagctaccgcacccagcctgctgatatatttttaattatcataagaaacagttaaagtgaaattgcaaccccatggtatcggtggactgaacgtttggttctcatttccttgagatggtagtttcctcctctggctacttttgtccagccagttctcctctgtgggcatttggggaagggctctctgatagaaatatgaaatgatgagggatgcaaaaaacgtggtttgtttcttagaacaacctccaccacgaaggttccagacagagtgaaatttctgtatttgctgaccctgtcgccagtagcctggaataaacagcaaaaatagttcttgaggcttcgtggcaaatgtgacctacctttgtagttcttgggtaggtgtgtgactgtggcctatgaggccaagttgcaaggtctttggatgaactttgtggcatctggcaatgtccccagtgcaacctatgtaaaatatagcagtttcctgcacacgcttaagggaagaaaccgttgtggggaagcgtgctctgttattcttgccaatgtagccaacatatacatggggaggtctgttttatgttttatgtttgatggttttttctttttctttcttttttttttttttgagacagggccttgctttgtcaccctggctcaagtgcagtggtagaatcatagctcactgcagcctcaaactctttggctccagtgattctcccacctcaacctcccaagtagctgggactacaggcgtgtaccaccatgaccagctaatcttttagtttttgtagagacaagttcttgctatgttgcccacagtaacatagtaagtctcaaattcctggcctcaagcgatcctccagccttgtcctcccaaagtactggattacaggcatgagtcactgcctggtgctttctttttgtctttttctaataaccattgctatagatggttgtccttaacgcgtaaatgtttaaaatacctaaatgcctaaacgtttgaaaacattccttaaaaattgaagttatagcatactaacaagtgttcatttttataattgctgatttaacttaataaaaaccaataactataaatatccttaatgccactgaattgttcacttaaagtggttaaaatgataaattttgttacgtatattttaccacaaattaaagaaaattaatatttccaacaagccaaagctctatgtaaatgtcctaaattaatgtgtttaaagagaaaatttcaccagtgataattttttttttttttcccctgagaaagtcttgctctgttgccaggctatagtgcactggcgtgatctcagctcactacaatctctgcctcctgggttcaagcaattctcctgcctcagcctcccgagtaggtgagactacaggcgcatgccaccaccgccagctaatttttgtatttttagtggagacgaggtttcaccgtgttggccgggatgctctcgatcttttgacctcgtgatccgcccgccttggcctcccatagtgctgggattataggcgtgaaccaccgtgcccggcagggagtaacatttctatgcaactatatgtgggtgtatttttctgaacatgtcagtgaagtttaaatattcatctcacttctttcagtcaccctcaaaggggaatttaatttacgacttcatttgtactttcaaacttcctcctggaaacagaagaaaataaaattagatttttgtaagctgagatgatatgcatgttcttattttcaatacagttagtctctccactttatttttaaacacaacctcataatacaaataatctagtcttttctggagcagtctatttattcagacaggtggaagttgatgctaaagattggcgttaaattgagtaaaccattcatgtagtaaataagataatttgtttctgccccccaaaagattaaaatatagatttttttcaaagtctgtttttttaacacctacggtccctgaatatgttcgattgaggtttgtgtctgtaatttggaacggctttttgttgcaactaaaatattcatttgcagaaattatcactgagggtgttagcttcttcatgcttgcgtttcttgcatttgttactaaataaaatatttagaagtcacgtcgattttcaaaatgatagttaaggatgaaggtaatattggcatatttatttttatctgtgtaatttttgcaacttataaccccttcaggtccaaatgaaacaggcaaccaggtaataaaccaattacattctaatacagattacttcatgacagtgtcttattttccagtttatatgtaggtgagattctttggagaccgtcttcgtaatatagctagtttttgtccattcattttgctttgacttccttgtataggtacaaaggtgtaagtaggagagtctaccaggcagcacacagacgtggccctgtaaccacccttgtgtaaaatcagagtaatcctccctatccttgcttatttcactgggttcatgggtgatgactgtaaatgacacaggagacagggaaagagttttgttatcctgatacacacattcttaaatgcctctagctgtgtagacattggtttgtccatattaatagtattttacgaagtgccagttgtgtgcctgctttgtggcatatgcattggcattcattgctttatttaattcttccaacaacgtgtcagatgtctgttcaaattattcccccctttacagacacagaaactaagatttagagaggttatgcaatgtgccaacagggagaagttggagctggaatttgaaccaggctagctgactccaaagctgtgtcctcaagcagtacatcagagccgaggaaggtcaagtttggaacgccatttagctgctctcagggagtctgattactgtttctctgttgaggctcagctcaagccttccctgggccatgaaagacaacttaggtttgggtgtcctgtgtttgtaccttgttttgtgcccacctacatcctgggttatgtctttccccaccccaagccttttttgccatctctttttcccagaaagactggaaacttgcctaaagagacagaatcccagatcccagatggatctactattttagaatctctgcttccgcatttctaaaatccttcccagagaattatttgactagttaaagcttaagaaacaccccagtggattatgagtgccttctagccaagaatgggtatttcctctgtgcaatctgagggcacgggacactcctccagcggagtagcctgtgatttgtatgggctgcatgaattcctgcactaacaaggtaaaagaaggatgttaaagaaaacccgagatcttttgggtacatgctataaggtgaaaggcttattccatttgctcaagaacaaacatccatttgtccaccccaagtatttatatagttcaattaagcgggcaggtaaactgattttttgggtggttaatgatctgatgattttcctctctgtcattgtgattggatatgataatctgagagttgcccaaattagtgcctttactgtagttataataatgtcatgatgactgaggatcactgagtgtgccttttgctctgttaagtgtgcattcagaactttactaacatgggttccacaggaaatattagccccattttgcaaatgaagaggctgaggctcagaaatttaaaattgcttcatgtcgcacagttcagtgtaaagttgcaatgcaaactaagatgtttccgttgcttataatcttaactataataatcataaaccatgttctgttgctcagaacccttgtacttataatataaaacaatctttttaaccaagattcttcgcttgggtattctgagtagcatggaagagcattatacttttttttttttttttttttttttgagacagagtctagctctgtcacccaggcctggagtgcagtggtgtgatctcggcacactgcaaccttcgcctcccaggttcaggcgattctcctgcctcagcctcctgggtagctgggactacaggagcatactcccacacccaggtaatttttcatttttggtagagacggcgtttcaccgtgttggccaggcttgtctcaacccctgagctcaggtgatccgcctgccttggcctgccaaagtgctgggattacagacatgagccaccaaacctggtcaattttctatggtgtgtgttacattttttaaaattttattttaatgtttatatagaaaaagttgccttatcaaccattataatcatggtatttagtgagtgtaatctgttctgatgtaatacttagtttaactggtaaaaaatattttgacagaatttaagattagttctttttgctttgtccgtcaatgtgaaataatcagtatatcatatttatagaattctgctaaaacatgcatatatacataaacagatattcatcttaattgatgttaattgagatataggagtacttcattaagtctccagaatacatacttcataagcaggaggcatatatgtttgtatatatgtatgtacatagacttgatacacatgaaataaaatttcaaatggttcctctgttcagcaaacgtgacccaaagttttggcttatttggcgttttgttttcttgaagacatacttgaattttaaatagttaatccatttaagaagtttcatttaaggtactgttaaaaagaaaaaacacagaacaacacagtgagagcagaaaaggtatcatctcctccccctcttcttctcttttagaaaccttgcgtgatccactgatggtaaatatttcatgtactttgcatatcagcctgagttccttttgtgaagtcaggtaaatggaatgtaaatcccctcgtcctccagacagtaaaacggcattatttgatgttacatcgcataaagatgcagatttgattccccctttactcacactataaaaacaaagtttttaaagtggttagccatacctggaaatgtaaatgcattcgcctaatgtaatgccaaagaaaaattaagacaaatgataccacatcgctgccacaaactgcggctcgtacaaaattcactttagttattatgctgtgaatacgggctctcaccctcctccgtgaatgcacaatttatgttgaatgcaacatgaatcattttaatagaccaagcaaaaagtccccaaagtcgattttcaaattatgaaccttggaacagaatataacaacagcgaacaacaaatagttcagactttactctgagctatgagtgaaccattaaagatacagcaagcactttcggtgaggtgttacacaattcatagcctaatggcaaaaatatcagaaatggggtattttttaatgctgtttttccagccatcattctgttcaattattttcacatttgtgtaatcaagatattcccaaacagaacatagagttgtgtattgttgggaactaattatatgtattataaatccaagaattaatttaaatgacccagtttccacagagaaaaagccacattgtttttaaatagctaactaaacaaaatgctaacccatatgggagaaatttccaaagaattaaaaccacccaccaggaaaatgggaaagtctcccctccacacacacacacacgcacacacacacacacacacacacatacacacacacacacacacacacaaaatcaccaaatcacacctgaacaagaggaagaaaattaaactcattgaggagataccatctttttttaaaaaaaaaaaaaaggcagcaaaatgtgagatgggcgtttattatgagatacacgaagacagagaccagaggttccccaagtagcccctggacctgcagtgtcagcatcacctggtagcttgttagacatagaaattcttgggctttattccacacataatgaatcagaagcttgtggggtggggcctgcagtctgaggtttattttttctaaaactttaagttccagggtacatgtgtaagatgtgcaagtttgttacataggtaatcatctgccacggtggtttgctgcagagatcaacttatcacctggatatgaagcccagcgtccattagctgttgttgctgatgctcttcccaccacctgcaagccccagtgtgtgttatccgcctccaccgtgtgtccatgtgttctcatcatgcagctcccacttataaacgagagcatgcagtgtttggttttcagtttctgcataagtttgcctaggataacggcttccagctccatccatgtccctgcagaggacatgatctctttcctttttatgattatataatattccatggtatatatgtaccatattttcttcatcctatcatttatgagcatttggagtgattccgtgtccttgctattgtgaaataccatttgacccagcaatcccattactgggtatgtaaccaaaggaatagaaatgattgtattataaaggtacatgcacatgtatgttgactgcagcagttttcacagtagaaaagacatggaattcacccaatccgaattttaacaagtcttccatgtgattctgagacagactcatgttcgtgtggttctggctctgcagaactgaggtgggccccaaaacttgcgtttctaaaaggtactagctgagcatgatgactcacatttgtaatcccaccactttgtgaggccgaggcgggtggatcgcttgaggccaggagtttgagaccagccttgccaacatggtgaaactccatctctactaaaaatataaaaatttgccgggtgtagtggtgcacacctgtagtcccagctatttggaaggctggggcaggagaatcgcttgaacctgggaggcagatgttgcagtgagccgagatcaggccactgcactccaacctgggtgacagagccagagtctgtctcaaaaaacgaaaaacaaaaaaaaccaaaagactaaatgtataaaaggtacccaggtgatgttgatgctacttgtcttggccaatgaaatgaaaagcctacaggccaggcatggtggctcatgcctgtgatccacaactttgggaggctgaggcaggcagatcacctgaagtcaagaattcaaaaccagcctgaccaacatggtgaaaccccatccctactaaaaatacaaaaataacaccaaaaaaaaaaaaaaaaaccacaacaaattagccaggtgtggtgatgtggcctatagtcccagctatttgggaggctgaggcaggagaatctcttgaatccaggaggtgaacgttgcagtgagccaagatctcaccactgcactctagcctgaacttcagagagagactatgtctcaaaaaaaaaaaaaaaaaaaagcctacagttgacaggcagataacagagggagcaaaggagtcttgtggaagacaatagggagtgttgaggacctgtcaaacaacacagtccccatctgtactttgggaggtaaggacttcttagttccagctgcctgttgccatgggggaacatagacccagagctgccatcttttctaatttttttaaaaattagaggctaaaagttttggcttataaaaatggtatttcctgagtttttacaattatagtattaagatattcctaggtttttgtttgttttcgagacgaagtttcgctctcatttcccaggatggagtgcagtggtgcaatctcctccgcctcccagtttaagccattctcctgcctcagcctcctgagtagctgggattacaggcgcccgccaccatgcccggctaattttttgtattttttagtacagacggggtttcagcatgttggccaggctggtctcaaactcctgacctcacgtgatccacccgccttggcctcctaaagggttgggattacaggtgtcagctagtgcacctgaccctaggataatcttaattttaagtagctggtaactcataaatttttaaacactctgcagttcaaagaaaacatgtttgtggtaggtagccagtttataacctgtgtaagactgtgttattagcaaatccctcaatgtgttgaccaagagtgggtaggaatcctgcagacagaatcttttgaaggtggtttgtttttttattcctttataagtacagttgtagatttacaaagtaattgagtatatagtacataaggtcttgtgtacccaccgatcgcaattgagcatatagtacatgctgtcctgtgtacccactgatccctggtcctgcccctggtatgagggtattaacatcttgcattagtgtggcacatttgctacaattaataaaccaatatcgatacattattaactagtctatagtttacatgaggggctgctgcttgtgttgtacattctataggtttgttcaatgcataatgacaggtgtctgtcatttcattatggagtgaaaccattccaatttcatacagcgtagtttcacgcctctaaaagtcccctgaaagtgttattaaaagtactatctggccatgtcctcatttccccagcaaagtccttctgagaatttaggcgctttaggctagaggatctcagtgctcagaatgaaatatccctgtactccaagatgcctccagcaattataattgaatcttgaagctagagtttcttggctatcctatttcccttttgtttccaccatgaagaagtggagagccgtgtgacctcagtggtagagctgatgtagaagcgccctctctgttcctggcagtgcctgtcctgctaacctcgtgtctcttgctggggtcttcatcagtaagagacctcacaagatgctttatcaggtcacttggcaaccaagctgatgaggatagcagtttcttttgttcttttaaaacatatataaaattatttttatcaaacatgacagatcaaaagccttctggaaaggagagatggtaactaatttaggcagtgtcttttgctttcacatggtgtacccagtactattaatatgaatttatcacatggaaacaaacttttaaaaaaattaattttgtgaattaaataaagcagcatgcaaatttactatcgtattcagcaaccaaaattttatcacttgcctgatactgcctagtgagcaggtggaaatgtagacaccaacaccctcatggattcccagctgctgagagtttgaatagtatgtgaagtctgtagagacaaaattgttgttttccccagttgtaaagtgtgcaatattatccttgcaaaattgtctgtttattttttttgcccttttgggggacaaaatgtctttatgttaaattgttttattattgttatctttatggagttaagggcacataaaatattcttacagagagaaattctgtagtttccacaagtaaccagagaattgttcaaggcagagaattattttttcaatgcctattttctcctgaattttctgacggagttagagataggaaaataccataatctgctataaattcagttgaaaaatagaaatagtgagaaatccaggttgtgctctgtcgtaatttaagcctaatatgtgattgtctacatgtttacaagttaccgcctttttatttcttctctttttctgttttcttcttccatttttatgttttgctatgccattcattcattctattcttttcatttctttttctttttgtaaaaattgtacagagtttaaagttagtcaggtatgtctattaaatttttacgtaaaaagttaaagcagccctcagcatcaacttcttcttcatttctaactcatttagtgaattcagttggtctttatatatgtagctttaagtaattgcatgtaaactgttacttcttcattttctagtcttagatattatctgtaggtttttcaataagaaggaaatttagcttccttctactttggtgccccatgatgatgtgcatcttttttatttctgcatcatatccatatagtgatatcatgtataatgatgtttaagaagacagttttttttgtttaaattgttataaataagtaagtgtatgcaccactatgccatgtagcatatcaagattatttttctttcctgcaccttattttttccctggagttaatactcatctttttttagaaatttgctgagtttgtgatgtacctatcattcaacctcaaactttcatgtgattgtctaaatctcagttccttttattagaaaaaaaaaaaaaaacaactcccctggagcctttgtaccttctgcagtttggggttgttgtcctttttgcttggtgcacaggaatacttggtgatgttctttttaaaactgccctcacattgtatcctggaaagttcatttacctgtacccggagttggaacttctcttccacatcttttcctgtattggtttggttattgttttgtgggagcatgtcttgtagtagctttctgaaaaaggatgatagaatatgtgtgtgtgtctgtgtgtgtgtatttcaggtttcaaaatgtttctgttccatcctcattttattcattgttagggatagaattacagatttaaaatcaattttgcttcagagttttaaattctattttgtggctttctgtgttgttctcgggaagtacaaacccttgtgaccgctgttctctttcatttctatctgcttctctcttgggagtacaatgggaggcatatcatcaaccccttgctgctatccaaataggagactgttccctttcaagagaattttaggtattcagatcctagacctcccagatggcctcataagtatttttatcctctatttatctttgtctttgtgttactttcagggatagttcttctagtctttccatggatttggtgggggggggggggacgtttctatttcctttatgtttgataacattctattcttgtttcatggatgatgttactcttttaactctctgatgttaatgataattgttttaatttttcttttctgtttagtttctatcttctcaaaattgttttcatttcttttggtaattgtgtttgatgatagtctttttttttttttgagatggagtcttactgtgtcacctaggctggagtgcagtggtgtgatcctgcctaactgcaacctccacctcccaggttcaagtgactgtcctgccttagcctcccaagtcgctgggactacatgtgcgtgtcaccaagccgaactaatttatttttattttttgtatttttagtagagatgaagtgtttaccctgttggccaggctggtcatgaactcctgacctcaggtgatctgcccatctcagcctcccaatgtgctaggattacaggcatgaaccaccacacctagcctcttgataaagtctttccccaaatgttctgatctgtggatgtctgtttctatctaagtagaattcaaagttactgctgccaactcttagcacatggccacggccagttaactgtggactcctctgaaggatgatctggctggactattttttgggaaaaccactgtgtttgaatgtttgcatgtgtcctgttggcagaacaaatatcccacagaaggatcttcttatcttctgcttggggaaggtgtagctctgactgctagagttctagagccaagtgagggggagagttctgagtctctgcattcagtaggtaaacatttacaaagtctgtgttttcagtatcatgccactgttctcacctgtttatgttctcttctgataataaacttctgtcatttttctggagttatgaaatgatggtatcctgctgggctgagtggggagggattctcaagctgtacatagctgacacacaggtttctaaaaggttgtctttcaaccccattttcagaagtaccaggttccacattttctgagcctttgctggctctctgataggaattgtgttacttctcagctgtccccatggctagcttaagactcagctctcttaagtcacttcctagttgtccatctgctttccagcatccaactgtaatttttttttttttaagagaaatgaagtctcattttgtttcccaggctggtctcactgtaattcctgggctcaagttacctctcaccttggcctcccaaactgctgggattataggcatgaatcgctgtgcctggcctcaactttaaatttttatattgaataatctttgatttgtattgtcatgttgttttatagcagttactgctgttttagtgtgatttgggatgaaaattttaaaaaatcaatatgtataatccaccatctttgttccttttatttttatgttactcattcttttaagcttgtcttagacgtgagtattatgttttattttgctgggagaacaatttgggaaaatttgagcagcaaaccataagtttcttggtgtctgtgtacttggagctctgaatcactattgtcactgagggagtggacaggaagtgatgctgagataagtctagatgggataggtgggcaacatgcaggagaaacctcctgggaaaggtgagcaagagcacacaggtgagacatagcatcgagtgtggaaacctccatgggtggcaggtcagtgttgctgagggatgtggacatgtctgaggccaaatagatgagtccctattgggttttgcctctccacaatctagaggaatatttatggaaggttaacagggcatggtggtgcacacctgtaattctagcacattgggaggctgaggtgagaggattgcttgtcttacaggagttgaagactagccttggcaacatagcaagacctcatctctacttggaaaaaaaaaattagctgggcatggtggtgctcacctatagtaccaggtacttcggaggctgaggcagcagaatggcttgagcctgggagatcaaggctacagtgagctgcaattgtgccactgcactctaatttaggcagcagaatgagactatgtctcaagaaaatgttcaagaagaaatacaaactattgaaaaaggaaggctgaatgctttatcagaaaactgtatttggaggggacctttctggggtcttttagtcagggtacataagtgtcagctgctacgacaaacaacttgcaacgtctcattatcttcatacaacaaacgctgatttgttcctttcattacatatccagtgtgagttggctggaaggtccaccctacacaaccactcgtgaaggcagacttgaaggggactccactgtcttggagctacactctaaaacaaatagcctccaaagtcaaggactctgtaacaggatgaagcagcattttttatgggcaggtttgcacgtggcatttgttgcttccatcaacattccactggcgagagtgagtccctggcccctatgtaattatgagggaggctgagatgtgagaagcacatgggtgttgggagagcactaaaggtctctagcccagaagcatgacttccagccaagtgagacagggaagcccagaaaaatgtgtcacagaacttatggcatcagaatctgattcccaggcatgctttccaccatatgcatagacatttgcaccccagggatagcaccattactcccaaaaattgcaggtttgaaagggtacctaaaaacaagccaccagattgtcccattccactatcattctgccatcaacaccgaggtgtcggagtagcaggagagccacatatttcttagtgaggggacccagaatgatcccttttgtgctagaggatctgagttcatttcatgaaactgaagcatcttcttggagatataagctcaccttgggataggcccttgcagatgacaataaaggtattttggcacataaaaaaactgctcagcacaccttgtatttgtatttcctttgacgtgaaccatggccatccagtaggccacgcaacattcccactgccatgttggcttgtttttcttttgttttcttgtcaacataagcctcatgagacaacagcaggatgcaagattgtacaatgacaccatgactctgctttctgggtgtcctctgtgggctctcagcagtgtccccgatgtggagggtcttcttattctgtgtgtgtgccctctgctgttgaaagttgcctgtcacccatgatgctgtgctgattgagcaaactaatccataacccaccgccacgttcctcgcctacttgcttctaggcacattaaacggtcagtgcacaggtcctcatttttctcatgcttccatttccatattctcaatcaatcactgatggccagctgtcaacaggcaccatttttggtgggacctgaagatgtatatcccttgttttcagattcctcgcctctcatcatgtaaggtgatgctctgagctgggtcttaaagcttctgggcacagccccccttgagtcttcattatggcaaatctagtgcaggtgctgagaggcggtaactctttaaagggacaggatatggaaacgtggcttcatggacagtattttagtatatttctgtaaatagcacatgtgctagatagcagatttgtgtatggatatgcacccggctagggacctctttaatggtcattcatttgggagatgacctttggttcctaaactggtggacataccaaggactaaaggagtgacttgctctcagttctttgtcattcagctgctttaatattaatatgacacccgttttgggcttgaaaagttttccttctgctgagaaatgatgatggtgacaatgatgacaatgacgatgacccttggttggagcaatgtagtctaaatgtggttgcatcatcttctttcttcctttgccttcctcccttgctctttttctgcccctcatgccggctccttcctcccacatcaccccacatttttttttctttctcctcaccatcaagaaatgttccagaatgccattattcttcgtcaccacggtcaggtatatcatcctaagggcagagggtgaaggtgcgtaattagtgtttcaccagactgagcatcatcctcgggcaggtgcaggggagaatggctggtatttatgagtgaatggcagcgttttgacaggatgatgaataaatatgctgggcccagaggactccaggtgataagcatttctttgtggtctggtaagtgatagcacccattgcttaatttctctaaaatctgcatttgtcaattttgtatttttttatttgaaaggtatttgcttaaataaataggccatataaatctagctcccaatgtccattttcaaatgatttccagcaaggaagatggaattaccacgaggaacctgttctcttatgtttctgcttagatggctgggtctataccagggtttatttaaatgaacacaggaaatgccattcacctttaccatgaatgggaatctttgcctgtgactctatcgtgtgaattagcagagcttggctattattcccctacttcggtagatactggctgtacagaagggaaccccagtttcaatgagtacctatgtgctgggcacttagctggtttttacacacatacttcatttgaagggaaggaattgactgaaaagaattctccattccaacttcccaagtcagttgccatttggccctgataaagctgtactttctcacttgttccttatttaaaatagagaaaagtgcatcaagctcttgttaatctgtcaggccttcctaagatgtctgaagaagttagtttggtgaacatgggcttcagggtcagactgcttgtgttccattcttgatcctatcacttccttgctgcgggaactctggaaagtcacttaacctctctgagcaagcttccatttttccaggtgaaaacgggagtttagcctagtccccacttgataagatggttgtggaaagtattgtgcgtcatggacctaaagtacctaggagattgtcctggatgtcgttttctcataaagttgactatggctattggtggtactagtatgactgtcaagtcgatcaggtggctgaggagcagtacatgggggtatacagagtgcaggcctcagaactgcagaacatctgcacaatctccagcaagctaacctctctggacatcgtattcctcatctataaaagggagacttcaatcttatttaatggcaaaagtcacaattacttttgtaccaacgtaatagaattaagtaaaataaggctagacatgctggctcatacctttaatcccagcactttgcgaggccaaggtgggcagattacttgagcccaggtgttggagaccagcctgagcaccatggcaaaaccccatcgctaccaaaaaaaaaaaaaaaaaaaaaaaaaaaaaaaaaaaattttagtcgggtgtaatggcacacctgtagtcccatctactcgggaggctgaggtgggaagtttgaacctgggaagtcaaggctacagtgagctgtgatcctgtctctacacctcagtctgggtggcagagcaagaccctgtctcaaaaaaaaaaaaaaaaaaaaaaaagtaaaataaagcatgggaagtcccttatacagtttgtgatatgggtacacactcagtgaaatggccattaatactgctgttcttaactctgaaagcagagtgggccatttgaatgctcactttgatattttttaaaggaaaaatttgaggcattgacacatgccttttgcttacttgcttggattggtttgatcaactttgttgcggtctaatttatgtaaaataaattgcatccatttaaatatacaattcaatgagttttgacagatgcacatgcccatgaaaccaacacgaaaataaaaaaaatagaacatttacatcacctcaaaaagatttcaaatgccacttctgtggtgtatgactctgagtccagacagcctcagctccaggaaaaccctggtctgttttctgtcactattgatgaatttgcattttctagaattttagataagtgaagttttctagtacttgttctgcatctggtttctttcattccacataattaccttgggatgtacccatactgctgcctgtatcagtggcttactcattgtcattggtgagtagtactccattgtgtggagaaatcacattgttttaaaaatacctaattacctgctgatagacatttgggttcttcccagtttttagctgttgtaaatggatactaatgtgaacgaagccaccgtgaatattgatgcactagtctttgtgtggacatatatctgttttatcttgggggataatactctggagtggaatgggcagggtggtccgtatagggctatgtataactttttaagaggttggcaaatacttccctaaagtggtcatcccattttacattcttgccaacagtgtttaaggatccacttcctctacatccttaataatacttgatattattggtcttctaaattttctgtttgggtacatagtggtattttgttgtatatttttttttaattgtgaaatatgtgagtatgatgagtaatgattttgaacatgaaaactatgcttattgctcatatctatgttattttattatttactttttttgagatggagtctcgctctgttgcccagtctggagagcagtggtgtgatcttggtttactgcaacctctgcctactgggttcaagcgattttcctgcctcagtctcttgagtagctggtgttacagaagcctgctaccatgcctggctaatttttgtgttgttttatttttattttatttttttagcagagacagggtttcaccatgttgaccaggctggtttcaactcctgacctcaggtgatctgcctgcctcggcctcccaaagtgctgggattacaggtgtgagccacagcgcccggtggtcatatctctttcttgcgtttttgtgggggttggggtaataggtttattgagatataattcatataccacacagtttcatttttagtgtattgacaggtgtgcagtcatcgtcacaatcaagccatagcttcttttaaactttgtcttccttctctttctaattatctccttcccccgccccctccattctctttccatcctttaaatgtcagtgtcccccacaattctgttgttgaccctttctccctctggccaatgctccttcccctgtagatcatacccattcccaagatttcagtcatcaaatccattccaatatgactcctgtatccatatgtctagttccaagtatctgtccatggtgttggtcccaggttattcgcacctcatatgtctttggcacagcactcttgacagctcataaagtcacgctgttacccccacaatgtccccccacatatcattgctatccctcctcgacacccacacctcttgcatgttcctgagcttcttaggcgtgttgcatcttcctgaccttcccagtccgaagcccaaggagatacttgataaatattcgtctaataaataaatgaacttgtgttctccatattccttgaaaatatgcttcacttttatctttttaagaaattaattgcattactatcttattaaaggtcaagaaaaataattcatatcactcactattcatgagactgctaaatagttgccctggcaatttctgattataattttagaaatatttctaacctctggccttttttcttatctctacttaaagcttttctggaaggaattcattttccactttccttaatgttccttaaatgttgtacatatcttaaaagtggattcctcataaaacaatatggactatggtcttattctgtttaacggtatgaaggctcgcctgaaaggccaagagtaagattcttttaaaatcatgcccaagttttaaaggaatataaaactttctctttaaaaatatacctttctgcttccatcccctaacccacaaagctcaagtctagtttaattcaaacttggaaatagttcttttattattgctccctgcaatgggaacagagctgaggctcctaaggtctagagtcaacatgaaaatacctttgcttctgggccatagctgtgtttcttcttaacaaggcagaagcccagaagagacttcatgtactgtgactgtaataaagagggttgtaagtagagaagctggaatttgaaaggttacgtacaagtcaagctgcctctgtaatgtcacttatatccaggaaagagtggcaaagaaccatcccagcagatagcttgagggtgggaagggggataggttgttgataatatggaataggagaaaaaagatcatagagccaaagagctcgatacatatactgatgcggtgtttattttattttagttttttgagacagggtctctgtcgctcaggctggattgagtgcagtgaatcttggctcactgtagcttttgcctcttgagctcaggcaatcctcctgcctcagccccaccagtagctgggactagaggcacatgccactacacccagttaattactacattttctgtagagacgggctttccccatgttgcccaggctggtctctaactcctgagctcaagagatccacccgcctctgcctcccaaagtgctaggattacaggtgtcagccacagtgccatgccctgatgtgatgcttaaattcagaaattgggaaggagggtcaggtagctataagcaaaatacaagagaaatataagagaaagaaagacttgtatctgttgttagtgagtttttgtggtggtgatacattaatggaggcaacagagggtcagaaatcagggtggaaaatagcccagcagaggggaaaagaggaagtctgaacgagggccacattgcagatagaggccggtgtactggtctgctcaggctgccataacaaaataccacaggctggataacttgaacaacaaaaatacattttctcatagttgtggagcctagaattccaaggtcaaggttccggcacagttgatgtcttctgaggtctacctcgtctgcttgcagacagccgccttcccaccgtgttctcacgtgacctagccgctgtgtgcacgcatccctggtttcttttcctgtgttcagatgtcctcttctttgaaggacaccactcagattgcaataggacctgccctgatagcctcattttttacataatcacctctttataggccgtacctccaaatacagtcacattctgaggtagtacgggttaggtcttcagcatatgaattttggggaaacagaatccagctaacaacagttggggatgaggctataacgaataccactgcctaatgtttgcacggggatatcatgcttttcagagaccatctgcatccttatctcacttaatccttgccccaccctttagaagaagccaggaggaggtcctagtcagctgatgtgagattacatggccctgactgtcttgcctggtgctgcaggccaccttcacagccttgccataccttttcccgtttatccatggattggtatgagccctaatggtgcacccttccgacaatccttcatccttcccagacgtttcatcagccaggtgaaatttgcaattgtttcagtgattgaaattatgcttggagtgcaggtgtcaccgatgaaacagcaatgccttgcggtgacaaattcagtgtagaaataattttagcaagcccagtgattggaaaacaatgactcaactttgagctatattgattttgtatttctgggctcagcttttgactcagtctcattccccagaaataatccctgttaacatttcggtttgtgttatggaagtgttctctcttctatgaattacctaatgcccataccatacatatgcctgcatttgtacactcttaagccaaataacatcgtactgtgtattattctctagtagcctgctttttattgaacttaatgataaatggcaaacatttgaccatgtcacttaagtttcttaccgtgatctccaacagctaggcaatattctgtcatatgggtttaccatacttttctcaatccacaatctcatcagagtcccaatagttgcctgatatgtctccatcagttgtgaggtatgtttcaagtgatttattactagaaattcttagcgagctgaagtttgtaaattttctcaagctactttattgatatataacacagatacataaactttgcccattcaaaatgtacaattcagtgctttcagtatattcagagagttttgcagctgtcaccacagtcaagtttagaatattttcattttcccaaaaagaaacccttgactggcatccttttccccacttccttttctctccactcccaacctctctcccagctccaggtaaccactcatctactttctgtctctatatagatttgcctattctagacttttcatataaataaatcagatactgtgtggccctttgtgtctcgatccttacacttagcatcatgttttcaagggtcattcatgttgtagcatgtatcagtacttctttttttagggctgagtaatattccatttacggatatgccacatttcatctatgcattcagttcacggacatgtaggttgtttccacattttggctattgtgcataatgcttccaggtacacttgtctacacatttttgtgtggatataggtttaccttttttggggtatgctcctaagagtgcaatttctggatcacgtggaactccttgtttaaccttttgaggagccaccagattgttctccacagcagccacacccatctacattctaaccagcagtgtaggaaggttccgatttctccatatcttcaccagcactcgctgtcatttttctttttagtcttgtcattttattgggtatgaagcggtattgcattgtgattttgatttggattttcttgatggcttaggatattgaacatctcttcatatgattattggatggatgatttttttcagcggttatcaggtcacacctgtaatcatgcccacctcattttcttacagtgcagtgtgtgcttttaggcacataccaagagcttacagagatccttctggttcagaggaaagattcacatccccaacaaacactgctccccgattacaatatagagaggctaaattatagtccatatcacttttcctttaaatccctttacttttttgtgctacaagagtttcagaataataattccgcagaaaaaagtactgattgtccagcagttgtgtcaggtagaaaactgggatgcccgactgcattggtttagccagaactatggccatgaaaccttgcctggcccccagggatggggtgaggggggatatcatatacgctttaggtggggcagaggggtggtctgcccctgtgcaggcaggaatgttcaggaagcaggctgcctctgtttctactctaaatatttaacattcacggatggcatggatcctgactaagcggagcagatgctggctctatattgcacatagctcctgaatatcagccctgcgtggctatgcatgtgttttttgttagtttttgagacagagtctcggtctcttgcccaggctggaatgcagtggcacgatgttggctcactgcaaaccctgcctcccaggttcaagcgattctcctctcccagcctcccgagtctctgggattacagacgtgtatcaccaggcccagctaatttttatatttttactcgagacgtagtttcaccatgttggccaggctggtctcaaactcgtgaccttaggtgatatgcgcccctcagcctcccaaagtgctgggattataggcatgagccaccacgcccagcagtatgtttgtttttcttcaaacctagatcaagagtcaaacactcaaatgtttggtgggagcagttgatgatccagagctttggagtcagcgagacagtagagagtggtggagatggtggcgcacaagagggtcagtgccccatctcaaggaacagctgcacctcggcctatgcgattgtgaaaatgtgagcatatgcaggccagaccttggcttctctgtcttcatttttcacaggagccagaagtttggatgtgcaatgtgaaatctcacaaattaaacatgttacataactgtattttgtttcctatctctgctgtaataaattttctcaatgttagtgacttagaaccacacaaaagttacactttacagttttggaggtcagtggtccaaaataggtctcagtgggctaaaatcgatgtgtcagcaggacaccatttctttctgtaggttctagaagagaacccacttccttgctgtttccagcttccagggactgcccaaatcctttggctcatggccccttcctctatcttcaaagccagggatggctgctcaagtccttctcaaactgccctgttcctggttctctctcttctgcttctgcttttaaggaaccttgtaacttcagggagtctaccctgataatctgggataatctgcctgtttgaaggtcagccaattagcaatcttaatgccatctacaaccttaattaccatttgctatgtaacatatttatagatatcagggattagttcatgaacatattggggtagagggcattccacatacagcagtacctataatgtatatgcttcttaaagaatgcatgagtcttaaatttattttatgtccttggagtgtatagcagagttagatagatccttctggattggcggttgattgaatattggctgtacaaagaaactggataggagtatagagaaaagatcaatcatagcactagcttatagtttattttattctttaatgattttttaaaaatatttctctcacttacttgaaaagcagtcttagaaattaactggaatgggtaatttattcgtctttcttcttttgtaaaataatggcagtttgtaactcagatttttgtatgaggaataaataaaatactgtctgttttcctttgatctttctatttgtggtccagccagccagctaactatgcattcctttttctgccttttcatcataacacctatcttagcaactcttcattgctgctttgcaaagaggatttgagattgtttatgtaggggcccgtgtataatacctcaagagaaaaagacacagatgaggctattaggattaagggaaaatcaagtaaatcgagaggtaaagcactgtgcagaaatattggccagaagctatgaacagatgccacagctgggctgaagagttacctgtgagccttccaggggtgtaagccaagagaaagacagttcaccaaatctatcgattaatagaaatcatccagcagcagtgccactgtaagatgttcaatacgtagcacctttctgtcccttctcctctagccagttgggacaggattagcaagccaaagactttctgaaataatccttagctatattcttggtattcaccaaggaatttaccaatatgcaaagacttggggataattagtattatctttgccattacctgcagtaatattatgaagattagagatgtaactctgtcctgaagaactgcagtctgtggctcaccttggagaagaacttaagaacttattgaagtgagcaggctcacctgcctttgctcagagccacatcacctgcaggcaggatctgcaaggtcagcagttagcgtcaagttgcacagcctgggcttgggtggcgttcgctttacccttgcccttgatgtggtgccgagttgtcaggattctcgtaaaattcctgggtgatggcttcttctgttctctttatttccttaagtgaacatctgtctaattgttcacctccatcgctttcgtgctttcctcatgctttctctctttccagacaataaactttattttcttcataagaattcagtctacgcaagggtattaggcagcttgtttgcaccttttaattcctggatgttttccagaaaggctgtttgcagtagttccagtgggttcatctgtgaatcaggaaagacaatgcagctttgtgttttggtttttatcagttaccttctgtttgtaaacatctgtttggaaacgtttgctggtgcccaccccagcacccccccacccctgccagaaataaagggattaatctctttttgcttggcatagggagaagacagtgtctgctgatgtgcttaacttttttttttttttggtcaggtgtgtaggtatgtgactgaaacccatagactttgcacatattgtcaaatgactttccagagggactcaggcactttatttaattaatgccaatgaagcccgttaatccgctcattactgcagtttaattttgatgctggtttttgatgatgtattgaaaacttgtataaactggcaattacaactggaaaacatttctagtttagaagagacccttatttttcatatgcttagaaatatccagcaagccacttttaaaggctttttatcacattttattcttaagctttctgaattccttattatattttgcctgataaatagttggattttgttttttggttcaatgtaagaatattcttaaactaggtaaactgttttgtttgtcattatgttctctcattctgttaaattttgttttctatttttcatgtttttgggtttttctagatggcctgtctttaacacttcttgatatttttgattaaattttcatatatcatcaaaaacagagatgacagccaggggtggtggtgcatgcctataatcccaacacttttggaggccaaggtgaggagaccacctgaggtcaggaattcaagactactgggcaacatggtgaagctctgtctatcctaaaaatgcaaaaattagccgggagtggtggtgcatgtctgtagtcacagctacttgggaggctgaggcaggcgaactgcttgaacctgggaggtggaggttgcagtgagctgagatggagccactgcactccagcctgggtcacagagggagactctgtctcaaaagaaaagaaaagtagagaggatagtataatgaggttcctgtctgccagtcactctatagtaactattaggaaacccctttttttctctgaagtcattgctcctgtgtgtgtgtgtgtctgtatataaaaaaaaagtatgtatacatatacgtatatgtatgtgtatagataaaaatgcgtgtatggtgctgggcgcagtggctcacgcctgtaatcccagcactttgggaggctgaggcgggcgaatcacgaggtcaggagatcgagaccatcctggctaacacggtgaaaccgtgtctctactaaaagtacaaaaaattagcctggcgtggtggcgggcacctgtagtcccagctactcgggaggctgagaccgaagaattacttgatgaaacatggcagacaacgtagaccagcagcaaactaccaacactgtggaggatcccctggatcttaggctcagcccagaggagcgaatttgtgtgaaaatgagaaacgaccgagagcttcgaggcagattacatacttatgatcaacatttaaatatgatcttgggagacgtggaagaaactgtgactactatagaaattgatgaggaaacatatgaagagacatatgaatcaacaaaacagaatattccagtgttctttctccggggagatggcattttcctggttgcccctccactgagagttggctgaaacaaagaatttgtcctgtacggaaaacaggagactttgtacagtggcctctctaaatgtgcaagatattcaaaagagaaacccgcatacatttggatattaagaaataattctggggattcttccactcctgaaatgagttgatttgcagataattcacaacttcttaagctaaatggtattttcgtttttctcaagctcttccaataaatatgaccaccaagatttttttttcctaaaaaaaaaaaaaaaaaaaaaagaagaatcgattgaacccgggaggtggaggttgcagtgagccaaggtcatgccactgcactccagcttgggcgacagagcgagactctgtctcaaaataaataaataaaaatgcatatatgtatatttgtgtgaatcatatacacatatataaaatatatgtatcatatacatatatatcacatttctttttctagtgtgtgtgtaccttgatttatgtctcacatattcaaaatactcaacttgtttaaaataagagcacaacctatttaagtagtaaagattcaaagccttcttctaaaatgcttaactttcctgtggatttgtggacccgtgggaaaatctcagtccccaggcaggaaggaaggagatatgacacatctctagtttgttgtaagtcgcctaccctagacctcatctccagtgctctgaatgtggagaggtaggtgcagggcagtgggacagagaggtgcactttgaaagactatcacatggaaacaaaagttccggctgggcacggtggctcacgcctgtaatccaagcactttgggaggccaaggcgagtggatcacgaggtcagcagttgaagaccagcctggccagcatggtgaaaccccgtctctactaaaaatagaaaaaattagccgggcatagtggcatgagcctgtaatcccagcgactcgggaggctgaggcaggagaatttcttgaacctgggaggtggaggttgaagtgagctgagatggcaccattgcactccagcctggcagacagagtgagactccatctcaaaaaacaaacaaaaaaaagttccaatacacaatatgttatatgagatcttcacccaatcaaggattaaatggccaattcctaaatgatgcctacctttttatggccatgtatacctttgcctcagtactactggcatttgctgacatccatttatcaagatacagggatggatttctagaaggcccaggcaggggtgctggccaggagacaccaggcatagaccttcctttctcagagccttcgtggcccctagtttgaatctttgagtcactgcagtaaagttcctgatgtttgagagtactccttatgaagggagtcatatgagttgctagctgggttctctggatggtggtgtcatgccaacatgggagccactagcacaaagaacatgctaggttctgttgagacctgactttgggaatagcataggtacttacctttctcagcaccacacaaacacactccagaatgcaaaggaacctgcactgtgccatcttgcttctccctgcatagccacttctctttccagtggtgtttgtattttggttcattcaatcaatgaatgattgattgaatcaaccacttggtcccttcaatctgtaaccttcctgcaacactgtctttgtgatgttatcataaccttgatttttgagggatagaattgggcataatcagagaaaacgtggtctgggacacatttgtgggctattctatgctaaacatttccatatcattaatgttcaacacagctttgtggtgttggagataggattatcattgttaggatggttattatcaatactagctgtgattattgatcacttccacatgccaggcacagtgctgggtgctacatatttattacctaatttatagcttgctgcactcttgctgggtatgtgtaattattcccatttcacccgatccctgggagtttggtgaattaatcacccagcatccaaatagctaaccagtagcagagctgggattcaaactcagttaggctgacttctgtgcctgttttcttgcctaagcggtggacgcattgagtaggagaaggccagttattcctctttgtcactgatacaactggggacctgttgccggagatgtggagctgtgcattagggctgggtagaacacacataatgaaccatatgcacgagaactttttcatctttctgcatacacttggaactagttctttgtttttgtaaaagcatcatgcactaggtaaaatgtttaataacacagagaaatctaattgtcaagtatcttctcaacacacattaatcaacaattctcctatcgaaagataacctcttgtatttacaaaaaaaagaagaaaaagtgctgtcatcagtaaattcattcatgtatgttatacactcacatacaaaacgtatctatttgattaaattagaactctgctaatgaattactttccttgattgcacagtaataaagtcaatgttgtaaatataataattatagccaagtgcagtggcttacacctgtaatcccggcactttgggaggctgaggtgggcagatcacttgaggtcaggagtttgagaccagcctggccaacatggtgaaaccctgtctctactaaaaatacaaaaattagctgggtgtggtggcacatgcctgtaatcccagctactcaggaagctgaggactgagaatcgcttgaacctgggaagtggagtttgcagtgagccgagatagttctactgcactccagcctgagcaacagagcaagactccgtgtcaaaaaataaataatatgtgtgtgtgtgtgtgtgtgtgtatgtacatgaattatatacaaatgagggaaaatatacaaatgagttgaatatatacaaatgagggaaaaattgttccttgtgtcaggaacaattactgtgaattttgtgtagctctttctgactttttaaaattcaaatatatttcataaagttgaaatcacactgtggtcttttttttttttttttttaaccagacatatagtggccatgtttctatgtcaatacatactgtttggcagtacagttgtactgacttgacattatagcttcataacttagtaaattaatcccttattgctgggcacagattctgttttccattttttcagtcatgagcaacgttgctggtttacctgggctaaataagaagtttaaatgcaaatagataatgcttgagaaagcttcttcccatatatactctttctgtagcagtgtctgagtgtctgtaccttcctataccttcaccatatcatgtatttgtcattttatagtgagttgtattacttgctaggtgagctggtatctcctctgataacacaaagaaggcctgggtttgcttggcaatttgttccaatattcttttcagttttaaataagttttgaacaaaaagttttagcattttacataaaaacctctaaagctctcaggctaattagtaatgtagcatatacaaattaagtttttttctgctgtgcttaattcttattaacacactaatcatgagagcccccaaattgctgtaaggagcacatttagaaaacatataaaggatcgatagttggtacttaagaaatcgttgaaacaccttttcttttttaatctatcttagagctgaaagataaaaagacttaaaatgagttagaatatgagtttttcagcatcttatagcttatgagttaaagcaagatttaaaaaatacatttaacatactaaatatttcaaaagctacagagataccgtaacatttaaaaaaataaattttcattgtggaaatcaactgccacaaaaacacaaccttttacgagacaacgtgatgtgcatgagaagccctgatgttgagaagctcataattcggtgtgagaaacacacaaggcatgatgccattcccatctgggatgaacagggaagacttcctgggagaggtgactatggacttaattttgttttgacacagcaaaaacatgaggaatgaattttgtgacttggaagattgttagttttctgtggagggaacaacactcatcttgcaaatttgccttcactattcaatcattagaaaataattttaaatgagcttagcagttctcagaattttggatttcaggaaacaaactttttaaaaacaaaacaaaaaggaggataccaatttaagcttgtcaaaaagattttcccccaaaagaaaaacacattaaaaacaacgacaaaaatcaacaaaaactaacactattcccccatcaacaatcaatattactttctaaaagcaagggcgttttgacaccagatattgtgaggacatccacctgctctaagggacagccatttcactggtgttctgtcaatttttattttgaactaattttagactcacatagaagttggagaagtaggctgggcacagtggctcatgcctgtaatcccagcactttgggaggccgaagcgggctgatcccttgaggccaggagttcaagaccagcctggtcaaatagtgaaatcctgtctctactaaaaatacaaaaattagcctggcatggcagcgcacacctgtaatcccagatacttgggaggctgagacatgagaatcacttgaagctgggagctggaggctgcagtgagccaagcggagtgccactgcactccagtctgggcgacagagtgagactctgtctcaaaaaaaaaaaaaagttgcagaaatagcaatatttcacagtacctctactttcttgtaattttagcagtttacctaatcatggtataataatcaaaactagaaaatagacaatggtgctaaatattaactatacttgttactcaaatttcaccactaaagcagtgtcatctttttattccaggatctagtccaggatgccacattatatttaattgttgtatctccttggtgcctttagtgctttttttttttgagacacggtctcactctgtcacccaggctggagcacagtggtacgatcatgggttactgcagcctccacctcctaggctcaagcgatcctcccacctcagtctcctgagtatctgggactatacgcatgcaccaccatgcctggctaatttttgcatttgttttatcaaggcagggtttcatcatgttgcacaggctggttttgagctcctgggctcaagaaatctgcttacctcggcttcccaaagtgctgggattacaggcatgagccactgcacctggcttggagcattcagtctttgatagttgcttacttatttccttctttctgatcttgagaccttgatttgtccagtattttctcatcattagctgagtgtaagcattttttggcaagaacattataaaaatgatgtggtgtctttcttagtatattatctcaggtagaacataatgttgatctgtctcatccctggtaatgttaaccttgatcacttggttaaggtgatgtctgctgagtttttccaatgtaatgttattaatttttcctttgaaattcataattatttgaagggagatgttttgagatgatgctggcagccccgttttccttaaactttcacatgctgactttctattgttggatcttgcctgcagcagtgtttaccatgatgcttggctagtggtgactatgtatttcccttactctttttatagtcagtaattggaattcttctgaagaaagagctatcccttctcccccatttctttcttttcttttctttttgttgagacaaagtttcactcctgtcgcccaggctggagtgtaatggtgcgatatcggctccctgcaacctctgcctcctgtgttcaggcgattctcccgtctcagcctcccaaggagctgggattacaggtccatgccaccatgcccagctaatttttatatttttagtagagatggggtttcaccactttgaccaggctggtctcaaactcctcttctctggtgatcctcccacctcggactcccaaagtgctgggattacaggtgtgagctacagcgcctggcccctcccccgtttatttctgattcaattactttatattagcgtagattcacaggtatttcctttttttttttttgatttattaatacctccatttattctgttgctgaaaccattccagctttttctggttggcttctatgaaggacgctattttaatggggtgatttttttcttctcactacattcttcctcactccccactttttatgtccggtggccataggctggtgagaacttgattttgaacagttgaaggtctgctgttagggacgtgctaatctagggaattgtactgaactcgtgggagcatgttagtatcagatgtgtgccttgtccgtcttgcttgtaggaagaacaagagacgagacacagcaaggtgatgatgggtatgtgaagcaggataaagaaaaaaacaggacaggcattacaggcttaagcctgtaatcccagcactttggaaggccaatgcgggtggatcacctgatgataggagttcaagaccagcctcaccaacatggtgaaaccctatccctattaaaaatacaaaaattaacaggcgtggtggcaggcatctgttgttccaggtactcgggaggctgaggcagcagaattgcctgaactcgggaggtggaggtagcagtgagctgagatggcaccactgcactccagcctgggcaatggagcaagactctatctaccccccaccctgcaaaaaaagaaaagaaaggaaaaaaaatcctggtgcttgtaggagaggcatttatttcttttaggactggacggggcttggagggtttccaggaaacagcctcaacctaaaaatagtagacacagttcatgaagaacttactatgtgtccagtagataaatataccacaagcattatcttctttaatcatctcacaatcttatgaaggagatactagtattttgcttgcaaagatgagggaagtgagtttccgaagttgctaaatgcgtaaaggaggtggtggtgtcagaatgttatcctgctcagatggttgcatgggacagtgtccagaggaaggcctctgattccttccccagcattaggcaatattcaagtcttcagttccatgtgtaggggagaagactttccttctgctccctaatgacagtggtacccacacccgtattccaccataaaatcttttttattcagtattaggaaaaaagaaacatctttccgtccagtggtcactgtgtgtgtatgtgtttgtgtgtgtgtgtgtgtatgtgtctgtgtgttcaccgtgctgtgtgaattgtggctttaaatgtattcctgtcaattccatatatttttaaaatgttgcttttagagtatgtgcaagtttggggcatttttgagggcttttttttttgacggggtcttaatatgtcacccaggctgcagtgcagtggcgcgatgacagcccactccagccccaaactcccaagctccagtgattttcctttctcagaccccaaagtagctgggaccacaggtgcacaccaccacttccagctgattatttaaaaaaaaattttgtagtgacagtgtcttgctgtgtttcccaggctgtccttgaactcctgggctcaactgatcttcccagcttggcctcccaaagtgctgggaatacaggtgtgagccactgtcccaggccagttttaactcagaatgatttcataagaaatccacatctgagagtcccagaaggtaagatattcccctttcttctaaatatacttgaccaccaccattcaggttcttctattaaccttcctatatttgccaaccctcaacctgttagaaacaagaaatgggactctggagtagatgttagcaacatcatgagctcaaacccctccagcttacagcggagacagtgaggtcctgtaggatgaggttggagagcaggaacttgcccgaggtcatgtgcagagttcgaggcagggcctggatgggaagcccagcatggagaccccaggccgtctctccgccatcttgttgtgatgcttccggaagaatgcctgtcactcttgctgacatccgactgaccaagtgggcaagaggaattcttcaaaacaatttaataaatgcttacattttctcttggccccgtgccacatccccccactcagtcttgttttcaaggttgaaggttccttcagagctagtgaccttgcccttcctggcctgtggatgtcgctctctatccgtaaccctcctttccagcgaccctgtttgcagcaaagactataattttattttgggtttggatatactgattacattttagcttctggtatattttcttacctgtcacagccattaaatttattttaatagttactctactctcctgatagccactaaagggggaattggatattgtctatcaattggttggtctctgaactaaggctgtatctaattacaaggcattgtatcggttctgatttattaaccatttacttggctttggagaaggcagcatttttagtagtactgttgagcctgcatgtagcttttccaggagggcagggtgcccggaatatctgatcttacagttattactttgtgtcatatataattttgttttctccctgcaacaaataaatctttgggactccggaagaaaaaaaaatgggaaagaaaaaaaaaatttgtggttacagtataataaaaataaactgtttgtcgtgactgcagctgacatttatcagcctgtttgtgggtgctctttctctataatacagaacataatttgtcactttgtaaatacattccagtctaaatccctgccagcatctgttagtgtttgaaggattaatgtgctaccctgtgtatgtctgcacttccagggaacagtgtagcatctgattacagatcgtgggagagcaggagggaacaaggtgttttctgtgctttttcctacatgcagtcgttttggcctttttctgatttttcttgtctttatcccattctgtctaggtacctggaatttcattctttacaaagatgttcctggtccccaacctttcttctgtctgtgatagtcacagctgaagtcatagtattttctgtgtactatgggttgagctgtgggtaattctttggggccggttagacttgggttcaaattctttctccaactagtttatgagcttaagttatgtgatttccatttcttcacttgcaaaatgaagatgctaatacctacttcttgaagatgctgaggttgagggaagaaataaatgttaatgcaaagtgcccagtttagtgcctgccaagagtaactggtgggtctgtgtcaccttctgacattatcagtgtgattgtctccaacgcatccatggaagtgaaaccgctggaggaagctaatgccgtgagccagctgttggttatgtttttgttttgtttttcttttttacttgctggatagtgggttctgtttattgagaaatatttacatccgtctaaatcaggtgcttgctagggttcttggcacacagagcatcccaccaataaactgtggttcccaacaaggcttgcaactgaatctgggcaacaatgaacatgacttcaataatgacaaaaagattcagattcctgctggaaggtccatatgtgctgtccccagtaggattctggaattccctgaatcatagtgttgcttgtaattctttccacattatgaagtggctctatagactgcctaccaccttgtatctactgctgtcgtttagattaggaacagattgccagatgtggaagaaatagcctcattagtaacttttctgtaagcaatctccttatttcttgttttttgttcttttgttttttgtgtgtgcttctgcgtgcccctcctctatggctccccccaccaaatttctgtgtcttcatttgcaactctcttttctccagtaaagaggaaagtgtatagttctcctttccttacagaaacattattttgttattgttgttttggtttgggtttctgaagtataaatgcatatgaactggacagaagtattatgcccatgtgccaggtggccaagatggggcttgtgatttgaagcttcttttcctagattcaggaaagtatcactggttaatcagggaatacatctttcggcccattggaaaatgtctgttcttagcaccctaaatgcccaggtattagcatacttgggaaatgtctagaaacccctatttcaatttactgaccatttttggtaaattcctagagatgccaaaatgcatttcaaaaagctttcatgttcaagaagacttgtggaatgatagaaaacatttaacgctgttatgtacgaagtgaaatactgttaaacttttagattatttaatagaagacacattttacaaggcaaagtgtttagatatgctccctcctatgcctatccacacatccttaactcttcacgttgtttgagactgttaggctgtttttttattgtatatttcatcaaatagtgggtgataaaacaacagacactctaaggaatggcatgacattctcctttcttctcctgcattcattggaacctgaatgtagtattaattataagactgttagacttcaggggactacactcttattctaaaatagtggtcaactaactgtgcccttcagacagaattcctgcccagcacctggctttgtaattaaagttttactggaacagaggaataccagttaatttatatctcgtctgttgccacttttgctttcatgctattaaagctgagtatttgggagatacttgaaaaatctaaaatgcttactatctggccctttagagaaaaggttttccaatctctgttctagaggattcgtggtcatttggaaagaaaagtatgttaagacaaaatgagcaggtggttggattagtattttctttctacacatatagaaactgttcctatcatacgtgactcagttttcaaacttgcttaatccaaagcctggggggtggatgtaggagagaagttgaaattagctggggttttttttttgtatcacaaaagttacattttttttttttttttttttttttttttaagacgtagtcttgctctgttgcccaggctggagtgcagtggtgtgatttcagctcacagcaagctctgcctcccaggtttacgccattctcctgcctcagcctcctaagtagctggtactacaggtgcctgccaccacgcccggctaattttttatatttttagtagagacagggtttcaccatgttagccactttggtctcaatctcctgacctcgtgattcaactgcctcgccctcccaaagtgctgggattacaggcgtgagccaccgcacccagccgaaaagttataattttaatggtctaaatcaaatttgttcaacctgcagcctgtgggcacatgtggcccaggacagctttgcagcccaacacaaatgtataaacttgcttaaaacatgatgagatattttttgccatttttttttcaactcatcagctatcattagggttagtgtattaatattttatgcacagcccaagataattctttgtccagtgtcacccagggaagccaaaagattggacaccctgggaataaaacagaaaaaaggtgtaaaaggcttcgagttcatggacagaacaacatttttgtaagtaaagtatttacggatgtggcccctttgtaatctcctgggctcagggataatttccaggctggggagaaggttgtgtcatggagacagcagtactgttttggaaggagaattgacttgtcacaatggacggagaactaccatcccatttgggccaacctcttttttttttttctttttgtttcgagatggagtctcgctctgtcaccaggctggagtgcagtggtgcaatctcagctcactgcaacctctgcctcccgagttcaagctattcttctgtctcagcctcctgagtagctgtgattacaggtgcgtgacaccacaccccgctaatttttgtatttttagtggagacgggatttcaccatgttggtcaggctggtgtcaaactcctgatcttaggtgatctgcctgcctcagcctcccaaagtgctgggattacaggtgtgagcctctgtgcccggcttctgccagcttctcattatgatttttgagcagatttcgctgctttttctgcctttgttgtgtttataaactagaagtaattatgtcaactttgtaagggctcagtagcgtagaataaggccatgtctgtaatctccccttctgtgaacagaggttatgttctcaaaagccttcaattaacatgagtggaatggattttctaaatttatatggaggagaaagttgtaggtcctatatgagtgatgacaggtgatacttaagttaactggaacatatggcccttagccacaatttccccacatgcccttctgggggatgctttgtagacctgatatcccagaaaggagtgtggactcataaagtcactgctgtcctttggttttcctgatgtaccaaatgtagtaaggcctcttttcaatgtggtaaaagctctgggccaccccataaggctgcaagcgctagaagctcttcccatagagaacatctatatcctcaaaccaaggagaaaaaggaagctgctgttcataaatattgaagaggcagggagagcttgcactgaggccagggtgtattaacatgcatgccatcgtgaagtggcttctaatggacatttgtaaggtggtgtcccctcccttcccctcccccctctaatgctgcctgggttgctctttgcaacacgtgcagtctgcaacttagctggcttttagcaaaattacccatcgcgattcatttgtcccattgggccatgggataggtgactacagagccagattcgaatgtggccctgtgccggtgcccaaaccagcaggctgcacgtgtgcactgacagaatggtacatcccaccactgctctgtgtctgtgtgcgactgtcagttgctctctactgctcctcatagacttcctgtctgcctttctctgcatttctcagtctccccatctccccttcttatctaatccccttccttcctctctcaactcttccttcctctatcctttttctttcccttttttttttaactattcttctttagagtttgttttctcattgaacttgtgatgtacacattaaaggaaaactcattaatgtggaaaattaggagcatcatagctaatgtatgctcagggcttactgtgtgctagacattattctgagtttacacagtgatgtcagatttctcctctgtcacagtaagttccaaaagatagtgaagaatattgcagtgaaaacactgaaactcacatatttcatactcaggggtatcttttaagtgtgaagcaagagaaaaaaacgtggaaaaaaaaagactcaggaaatgctttccatttagctttcttgactaagttagtggaagacttattccagattataaagagaagaaccaaaataaagagtttaagaatgaaggggtatgcagcaactggtagggtcgagtctcctcaggcacaacatgcaaccaaggaggggcagctcactcggcctgcgctggccacacaagtgcacctgccacagtattgaggggctggactgatttctcattaatgtctgggcaaaactcaaagaggcaaacattttcattacatactgttatccatcctattgtgggaccaatttctccagaaaggtctctctcggtgggaggattaataaacaccatcagaaatccaattaaacccaattgttaaaatccaacaaatacgttgcttgtggatacagttgtgtatagtaatgtgtatggtgatggcctatcatataggaatgatagaggcagcacagtgctgtaatggaaaccataagggcacgcacaatggctcatgcctgtaatcccagcactttgggaggccgaggcgggaggatcacataaggccaggagtttgagaccagcctggccaacatggtgaaaccccatctctactaaaactacaaaaatagccaggtgtcctggtgcatgtctgtaatcccagctacctgggaggctgaagcatcagaatcgcttcagcttgggagctggagcttgcagccagccaagatcacaccactgctctctatcctgggagacagagcaagactgtctccaaaaaaaaaaaaaaaaaaaagggcatggatctagatgccagacaatctgggtgcatatctttgctccaaaagcaaagattgtaaactctctttacaatctggggcaagttagctaatctctgcttcagtttgctccttagcaagatgggatgatattaccacttacctcagagagttgttaaatgggtaaattcatatgtaagtgttcttagagcagagttcagtacatagtaagtactgtgtaagaattggccatcattaatattattcattggataaatatcaaattcaaaataccgtttacattgggaaagggaaaaaggagagaaatatatgagagacgtatgctgggggtatctacgatgtttttttttttgatttttttatgtcattttaaatgtttctattcttctgttctgttcttaaagtatgcctgtaattattaggatataattatggattctgtcttatttattttttaatcttcttattgtgtctatcttttgtctttctccatattctgggagaaacatctaagtttccattccttataactgattatttttcttgggatcaattctggtcttcaccatctgccaatgtgagttttagtttctctataaacttttaaactttaaactttttttcttttttttttgggggggggggggcaatgcattcttaacccccttccagtttttctcagcctattcttgtttgtttttgttttctatttctgtttcattgagatgcatacaaaatggaagatggccaacatttctaaaaattttgtttcctgacatagagaacgtttagaggtcaggttgctctgagactgtgttgtgatttcttttttttttttttttacttgtttgtcctttcttttattatctcttgctgttatcctcacttttttctttgctgttcttcatcctttaattagcattcaaactaatcgttattagagtgtgtaacatgatctttgacatacctaggtaattttacttaagtatatgagttaagttgatacgcacagttcctcagcatgaatgtcattgttttgcaaattttagctgaaggtgacatcactgtactaaaattttcttgtgcatccacttcctagctatgactctctacagatggatataacttttttaagatgaaaaccatttattttcaatttctagtttaactgcctcacagtaaaaaagtgtactttttgtgatggcaggaatttgaagtatgttgaaactgcctttgtgatctggctcatggttaacttcaataacgtatgaaaagaatccatatttttatgtgtagtgttctgtagctcttttagttggtttatactcttttaatggtctgttgaccattttatctaaatattccattttgtcttttacttatttctattataaatggttaatctcttctactaagattgttaaatccatctttttgtttatggctgtgttatttggcacatgcaagttcatgattgttatatattcttgcttaattatttttccctttatgcatcatccatttttatctttagtgtttagtgttttttatttttattttgcctaaaattttatttttatgttaatatttgctatactagctattctgctttcaaaatgttcctgatgtttttctttatctttatcatttatcttttatctttaacatttttatatttctctcttttaatcatgtgtgttaggtaggcaaggatagctgctaggacaaaatattttctgatgttttaatagcttaacacaatggtaatttatttccagcttatgtaacagtgcttattgggcgctcagttgaggctggaaatagacatgtgagtgttttatggactaggccttgaagaagtgtacctcccttagatttatattccactggccaactctaagtctcacggctatgcctaattgtgaaggagactgggcaatgaatctagttgagtgccctgcaaactaaggcacagggatttttgtgaacagctggtagtctccattacagttctcacatctggacaacaagtaccttttgctcccttattctcacacagagaacatattcacttttcttccaaaggcagagtctcaaaatcccatttaattctttgattctgtgcaaattctagggtgtccttcatgcttagatatggttccttatggtcctgtgggtttcagaaaggcagcccattcatgccgtctacccccctgctgctctatataatagaaggtggagtagagacagaatatcagtagcaaaatctccattttcaaaagaaaagaatgagaaacatgttgctccatgacagtcaatgatagaatcacgctggggaggtaaagaaccttgtagtaagagagcattctttatccaggtctgaaatctgctctctggagggaagtgccctgtccattatcctccatggtcccatctgaactggatctagagaagggttactctccttaggggaattagcagctgtcagcccacttcctgctggtgcatggttgaggctccgtttttttgtttttagcagttataggcttttaaggtcagattaatctttatttaatttcttaataatcttataggattcagatgtatttgtttcccattaattcatgagtagtggccacaccagtctttcctagacttgaatctcaagttgctttatttttctaatttgttatcatcatgcctctctttcagcacagtagcagctactatgaggctatttggaataatgagcttggtttgaaaagtagcatcattaatctgatatatgctactgggctgaattatttgaattcataatgggctattgtctctcaaagacttttgcaggcttattttatgctttttggactccagaatcaattgactttttcaactctgtaatgtcctaactttcatttctgcttgcacactggacaatgctttttttcaggaacacatctctttcttgtaatatctttgtaaaagcagcgtggagcagccagcacacaatgacattttagctcttccctagagcttcagactcaataggtactagatctaccttatgagttatggcagagcacaattttaccaaaagtctttcagtgtaaagacacagatccacatgggtgtctctgattgacagttggctttgtctatttggtgagtaggatatccaagctcatttcatttagtggctgtattgtcccctaggaacttattataacttaacgtttatctcatggaaggttgaagtatggggaacccaattcatatgagaaatagcccaggagttacattctcttctgctcagtgaccattagtggaaatgtaaatatctcacctcaatgcagtgtgggttaggaaatgtggctttctgtctagtcaacctctttttcctatgctgtggaaagaggagaagtattctgagggacagctagttctatctgcagtgtatcttttttaaacagcatagaactattttttttttttaattctagtcttggtttctgcctttcaatgtgtgaatttaagttcatgtttcttttgatgactgataaatttgaaataatttctgtatttcattgtgttttcttcactaccaagtttttcttatttttaaacttttctgagcatatatatgtatattttttgagacagagtctcagtgtcacccaggctggaatgcagtggcttgatctcggctcactgcaaactctgcctcctgagttcaagcaatcctcccacctcagcctcccaagtagctgcattaaatacgtgtgccaccaggcccggccaatttttgtatttttagtagagatggaatttcaccatgttggccaggctggtcttgaactcctgacctcaagtggtctgcccgccttggcctcccacagtgtggggattataggcgtgagccattatgcctggccaccaggcatattttggaattgatagaatttctttttatctgagttactccatacatcattttttctccctgttgctcatttggaagctaatgattctttcctccctttcttcctttctgtctttctctgttttcctctctccctgttagtcttgaaagtcttacgtacatgtttaaattttttcttagagtatcaagttatttaatgtctatcattctaatcaacaaagccagaccatgcatgatttaatggatcagtgaaatccttccccccataaaacaaacttcacttgttagtgttgttttagttgcttcttaaattcattttcagtataatttatttggtcctgtagctactccaaatgacgcacaaaatttggctaaactgatgactctttttgtgtttatggtgttttgagtcctcaactttttctgtcttgaatttttttttttttttttttttttttttttttttttttttaaggcagagtttctgtctgtcgcccaggctggagtgcagtggcgcgatcttggctcactgcaagctccgcctcctcggttcatgccattctcctgcctcagcctcccgagtagctggaactacaggtgcccgccaccaggcctggctaattttttttgtattattagtagagatggggtttcaccgtgttagccaggatggtcttgatctcctgaccttgtggtccgtctgcctcggcctcccaaagtgctaagattacaggcacgagtctccgcacccggccctgtttttgcatttttagtagagacgggttttcaccaggttggccagcctggtctcaaactgttgaccttaggtgatctgcctacctcggcctcccaaagtgctgggataacaggcgtgagccactgcgcctgtctacattttctgtctttactggtattatggtgggaacccataaaccactgcgaggcagataccattttaagcaggaaaccttatttttttccgaagcacatttaaaaatattttccagtttatctattaaacatcctcctttgcttctggagatcctctgaaagatttatctctttcgattcatctgtaaagtaaaaataaccgtcgtcgtcatttctcaagcgtgacgatactgttacacgtttactgcatattctgcataccaagcacatatccgtcacacgcagtgtggccaacttccgagaggccggcattcagccaaacagcctgaagaaccaggagaaatgcctgagtttccaaatggcttatggtaagttgttgctgccactatgagtagcctacttgcatttctatttaatggcttttccccatatttgatggtatgttaaacagtcaatcattcattttctaaattaaagcctgtcctgaaaacgtgctcagtgctattgactgtgcatcaggtattagagacacagatatgaaactgtactttttaatttacgataaatgtcagtgtgaattattggttgttttgcttttctttcatagtctccgtaggcttcttgggaatggaaattggtataacctttttggaggaccctcagtaaaaagctatcaaaatttaaaatgtgggtatctcttgacctagtgagtctacttccaggaattcatcttaaagaaaaaaattatagtttcctaagtatttgtattgcagcattgctttcagtggccaacaaaacaaaacaaaacaaaattggaaacaacataaaataatattaccggagaaacaatgagtaacatgtataggatttttttttttttttttttgacggagtcttgctctgttgcccaggctcgagtgcagtggcatgatgttggctcactgcaactccgcatcctggtttcaagtggttcttctgcctcagccttccaattagcggggactaccagcgcatgtcaccatgcctggctaatttttgtatttttgtagagatggggtttcaccatcatggccaggctgttctcgaactcctgacctcaagtgatccacccgcttcagcctcccaaagtgctgggattacaggcatgagccaccacgcccagccgcttctcgtagatactacccaggaattttcacagtaacttcaaggaagagattgttctgtaatttctgtttttactgataaggaagctcacgcttagagaatgtaagtaaaaagttcacaaagctagtgaagtatgtgggggcggtttttaatgaatgattgaacattctttagtggaactacaatactatgtttttaggaaaagttgcacgatgtttttacatgggtagaaaatatactctggaaggatttgaaccaggctgtccctgttcttatcttggggcagtaggactttggggcacgttttcactttatatgttatcaacttctgtattatttgtaatacaatgaaccagttttatttttgcaactaacagtaagtataaatagctgatgaccacttggggtgaaccgaagtgcctatgacaaaccacacgcaggcatcctcgggactattgaggccagataatcctttgttatgggggctgttctgttcgttgtaagatattgagtagcatccctgacctctgccccctggatgccagttcactttccaacaagttgcaacaagcagaaatgtctgtagacattagcagatgtctgctagcagttagaatggcctctggttgagaatcagagcagactctgctcacactgggctatcagggtatagttctctccctcccaacagctggaactgagaccatctccctccatttgaggatcattccgatttcccaagtccaccgtgtggaatgtaaaatcctttgaaccagaacagacaaatcttgtttttgtctttttattgaatttaaccactattgacttgcgacttgcggcaatcaccagatcccagatctctgtgtttggagctacacgtctttctgaatcgaggaggtggggcactgatttttcttttatcactgacttccccgaagtgggaagttccagtgcttaacaagtttcattaagaacacagctattaaatattcagaatatacagactgttgctgttgagaatgtaattatgcagtaaattagctgatgtccagtacgttgccttttaagcagatctttgatgtatgcagtacttgcataagatatagggcatgtttattaagagtcttcaactgtgtataaaactagagcagtcaaaagtaatggtgtctgctgaaggattctttatcatatgaatttacctttagtcatctattatttatttcagctattttatatgccattataataaatattatgacagagaaagcttttacgcttcaacttattgtactcctctttacttgcctgcaatccttcaggaaaatgtaaccacgctttacctatagttaacgtaaatcatcacttacattagaatgaaaaattcactatgaaaaaaagctcttacttcaatagcaaggcataaatgcacaatcatgttgactgccaacctcctgtgtcattcactgtccttccttaaactgtttttaagctgcaaagtgaatatattgcatagagggaaataggaaggttttggattattttcgctctcttattagtttctggcaggataagcattttttatccggattgcaaaatattgccaattactgtctaagcatttttaatagttttgctttccatggcacgcaactcatatactaaattaaataagctgttatctggtgcaatttctccttgaatagacttagaattacctatagatattgacacggttattttataaattgagttccagcaacacaaggcaaaaattttggcctgtatgtaatgaaggaagagttgtcatcattttcttattagggatgtttgtgtattttggcagggggaggtaggaaggggacctgatggagggccctggagtgaaggttgatgctggatggttgatttgaaggttaggaatggcaaactcagcctctgttcttcaagaatccccctgcgtccccccgccctgccccctgcctaaaaaaaaggaaatccagggctttgctagggatcatttttggtgtggttctgtgttttaaaatgtggaatcatctccaaaagtgtttgtttattaaaagcaaagtgataaaatgtgtcaagtcagtgaagagactctcaaactcccctttcctgcgaatcctatcagaaagaacatttatgagggcatacttttcatctttaggcttggcaaagatgggtcaaactccccatcagactggcacatggtgctgtttcaggtttgactaagagagaaaagaatcactagtcaatgaaagcaactgtgtccccatgcattttccagtgaagatgcgatcacccattgccaccgttaccattacttaaataatattagaggaattagtgttatgaagtcccacatatgatattgatgaattattaaaccagttgagttagatttctattgtagttcagtgaataatgtcatgtcaatactgtgctcaacgccagtgtctcttgctgttgtaaatgtgacagctcctatttaaggttttagaacataaaatcaggactgagagtatgtaaagcggaagggtgagagacatcagcataatgcaattaaggcccattggattagaatttgcaggatgccattagcaataagctctgagtgtagattattgccgtgcttacattttctccttcagcggtaacacttctcttgtaaattctaactgggtaaaataaatatgatataaaacagacacaaataagaatatatagatgatgttaatttcttcagagcttcccggtgttacgtcttcaagaatatgacgacaggggaacagcccagtgtggcagtcatgtgacgacatgagcattggaaccagccacatctcagttggcaacacgtatctgtgtcttactagcttggccactgtcacgtcactcagcctctgttttctcatctgtaaaatggggaaaattatagatgcttcagaagatatttgctatcactattaaatgaaaacaagcatgtcatcagtgcttattatttttgttgcttttatgatcaataaatacatgcaaattagagctttttaaatgagattctggaaataagtttttccgtatgtgtaagggaggggtagatacactgccatccaatcagcatcaatgggtaccttgaagtgagatcacaaaatagctaattccctgtaaacagcaacccttctctctgcagttgcacatgagtagtcccccagttaaaagagaatttcctccagatacaatggaggccacgttcaacacagccatctagtgtacctgggcttcttccacctccagccactgtaccgacgtgttcctttatttcacccacatagtgatgatgcttccaacacagcataacaaagagctgctgctttgtgctgctagatttgccaaaagtctgtgccagggattcttttgttggaggtaagtggagaacgcaaggcccacatgcacaagatgggagtattttgaagcatgctccgtaagacccaacatgtgggcagcagaccaactacttgggttcactatggcgagaaatgggataggagagcgaactcactgataccctcccagctaattcctaggcaatctgcaattaacaatgattgtaaagtaataatttgtggttttgaaaactaggtttgatcactggaattattcctgtcctatgttctaaaggcctgttgccttgagatgttttttctcctcccattattggtaagcataatgtaggcatgagacgttgcctttgaagtgtcggaaggatggagaggagaaaagaaaacggagattgaatctggaaaacgcattcatctttagaggcagtgttaatgagtacatgaatttagtcctgtaaatgttttctcccttatttgggacatggtgtattgaaggtgtctgttaactgtgctaccaatgagtgcccctgtatccgagggaaactggagaagtgtacttgggctaccgggttaccaagagcaggacagcatgaggcagttacagatctgatggtttttcttggtctttgtctcagctgccatgagggcttctaaggggcaaggagggttgggggatgagaggacaggtacatagtgtggacataatggaatatggaatagcaattgaaatcttgcgttgggctgaatcatggctttgcagttattatcttgatgcggctgtgcatgagccttttgaacctcagcttctccatctgtgaaataggtggataatgactgcaccctgcgaagatgctatagggataaataactgctgtggggcaaggactgaaatggttgttgttttgagatggcttttatcattgggccagtgacgacccattcagccgtatcagtgaagagtgaagcactgcactctttaaggatagggctgaatggtttatcacccattcagcggtgaccaccacatcttatgcattgtgatgatcacgatgataaaacaatacataatcacaatataaggatctagagttatgaactactgatcaggtatcatgttctgctccaactgctttagatacattgcctgacttcccgatagggcaggtgctgttattactcccacttcacagaggagcaaactaaatatacaagaagcagtaacttgcccagccccaaaccaccccctgaaaaaagaaaacaagggagacccacagttattaatatgcattattattggaaaacaatggtcatcacattttagcagtggccttcaaaataatgataatagcatatattgagagcccattgtgtggcttgtaccttatattcactctatctaatcttcactctaaccatagaaggcaatactattatgctcattcataattaaggcaattgaagcccagatccttccagtagctttcctgaagtcaagttgccagtgcattggacatactgggctgtagttccagggcagcctggctctggtgtctttgctgcaatgacaatatctccccatttctctgtttaaataccacacactccccatatggtttctttggtttcaggcagtatcgcatcagagtcacatatggctaatttatagtcataaaatgatactagagatcactgttgcataacaacaagaaacccctttgattccacacttacagactcttgagtcactaacacaggtttcagtatatataaagaatagatgaagaagacttagtgtattaaggtggcagtgaactgtgctactgatgagtgccactatattcaagggaaatgggagacatgcacctgggttgtttgattatgaccttctggctgagccctggatgttgggagcaagtgggcttctgagctacatagaagttgcctgatgcttcacatgtgggatgccacctgtgtggctctgttttaaaatgatgggtaggtagagtctgtatacataatttaaaatacattaacatttctgttttgcctgagataagcttgtactggtgtgatcagaaggaagaatgaagatttggggaaggaaaattttgagagccattttacagcatttcaagattcagtgatctcagaacctcttttggttaaacaagcatgggaggatggatgattggatggatggatgaatggataggtaggtgggaagataaatggatagacatataggtaggaaggaatgagggatatatggaaggctagcagtttattttacggtggtgggatttttttcttttccttttttactcagacagtcttgttctgttgcccaggctggagtgcagtggcacgatcatgtctcacggcagcctcgactttccaggttcaagtgatcttcctgccgcagcctcctgtgtagcaggtgcatgctgctatgcccagccagttatattttagatgcttttttatatggcccatattcatatgtctttgtgacttttttttataatggatgtgagtgtgaagtaggagttggcctgaaacaagcccagagaggtagacagggaccaagtcatggactgagttagttgttgttgttcctcactttctgtttttatttctcctctttctggacacatagcacgttgcaccttctagaagctaggcacagccacatgactttgtcaaggaaatgtgagcagaagcaacaccagtcactattaagtggaagtctttgagatgccacgtgtaactcaccacattgccttccacatgccgtagaggctggcagtgttacagacaacagaggctccatccacctggtccctgagtggccacggtgagctgggcccactgacctacaatgagtgtgaagtgtgagcaagtcataattctgggttattctaattaatggagatttgggggttgttccttactgaagcacatcctgattgatgcagaggatcttgtgagccatgctaaggaattcagcccacgtcttactgaccactctgacgtactaaagggttggttttgccaatgaagagagcaggctctgactgaacgaggcctgaacttttcatgttctagatggcatgtgctaattctaacacttcttaatgaaagtcatggtttgcttggtggtgatggaacagttctatgtcttgaatgtggtgatggttatatgaatacatacacatgataaaatgtcttagaattatgcacaaaggtacagcaaagaaaataaacgcatctcaagttgtgttagttccttctcacactgctatataaacatacctgagactgtgtaatttataaagaaagcaggtttaattggctcattgttctgtgttcatgttctgcttctggataggccttaggaaacttccaatcatggcgaagaggaagcaggcaaatcttagcaggagcaggaggacgaatagggggaggtgatatgctcttgtaaacaagcagatcttaggcatactggatcacgagacagcactagggggatggcactaagctgtttttaaccagccccatgatccaatcacctcccaccaggccccacctccagtattggggattacaatttaatatgagatttgggtagggacacagagccaaaccacatcaggtgacatcccagtaatgactgtggtctagtaaattgtgttgtgttgatgttgattttcaggttttgccattgtattgtatgtatgtaagatgtatatatgggggaagctggatgatgggtatagggtgttctctgtaccagtttggccatgttttgtgaatctataattagtttcaaataaaagttaacaaccagaagatcatgagctaaaccaataaagtgaattatggtcagttgcagattcactgccagacctgggaggaaatctcaccttggcagatcgagtctcttgtcctcgcctaacaatcagcagttcacctctcgaaaaggggttccgtttgcaatctgtcagccactaccttcttatttagagcatgtcccactacaaacatttctataaagttactaagtttgttagacaattagaattgcaaacccccaacacacacataaacacatatgcacaccctaatttaaaggctgcattttccatcccctggacttactgtattgcctccagtttctctccatttctcaggattggtagcagaaatgggaaacctgatacctagggcaagagaattgcctgaataacagtgtgtggacttgaatcactatccccaggagcctagtaacccacagcttgtggattagtctgttgaactacttgatggcttgtgacccctttttcccttagagttatatgttctgattttcttcttattgatagtggcagctctgtgctttattttgaagggaagcaggggaaccaaaagaaaacttagcagttgtaagttacttacagagaagactgggctagttggctgtgctatcatttttgttgaaatactgctttggggtcgccatctgggaatgttcttcctgttttatgggggaaatacatacatgcgtttttataatatgtagcctgcatatcccttggggtttccactgggggcttggctgagcagagcaatttctttaccaccccctccacagcataatgaatggctgcctttcctcttgtgatacattcacatttctgtaagattctgcacgtggcagtgagtgtcatgctccaagtaaaacgaggcagggaccagaggacttaggatgaggatgaaaggtcactttgtttgctgactctgaatgtcaggtagttgtgtttatgaggcatcagcgtctctgtggggtattgaaacatttacactttgaaaatatttttaatcatcagataaatatcagttactcagacagcttatgagggttctgctcctcatctggaggtacacacctttcacggggtgtgacttcaccacatgccttcaatattcttggtggcagttgccctctttataggggggatgtggcgtcaccttatagcagaccctctagctctgttatttcctgaacgtaggaaactaacaacccacgtgtgggcgttttccccttttcctagatcaggttcatgtttctcctcctcgttccaaaatctgcacactttggcatctgccactgttacccaagaccaggaatttaaatctgtgtttgccagtttgcctccaccactgatgtgctgttggggtttggggacataatttcatcactttctaccacctttccttaaaactaggctttgtgccaggtgcggtggctcacgcctgtaatcctagcactttcggaggccggggtgggtggatcacaaggtcaagagattgagaccatcctggccaacatggtgaaaccccgtctgtactgaaaatacaaaaataagctgggtgtgttggcacgcacctgtagtcccagctagtcgggaggctgaggcaggagaatcgcttgagcccaggaagtggaggttgcagtgagccaagatggtgccactgcacttcagcctgggcgacagagtgagactccatctaaacacacacacacacacacacacacacaaaagcacagggctttgttagcaggcatgacttggattctttaggatccttccctcagtaatctggtctgatgtggccttcagggaggatctttggacatcattgccatccatctgtccactgtgctggactataacccacccagactaccatttattgccaagtggcatcgggacaagagttttacacaagaaacatcttctctgctagttaaattaattagataatttgtcttccagacaggatgttaggaacttatgaacatgtatcgttacaaacctatgagtagatgactaatattcatcttttacagataaggaaactgaggctcaacagtgttaaatggtccagaatgagtgtgttttctagctgtcactgcctgatgtttactgctcaaagcttaggacttggattagagcccaggacttggcagccaagataaaccagctgcaattacgctgaacgtctcagcccagctcctgtccatccctgaacaggacacttagggtagaggatgttctcagcagtgccatttgcatcccccttcatagccttacaggtatcatgttatcctccttaatcttacttaagcatcacagtctagactagaattcccaagtcaaccgtttgttttacgggactcttcttatttgaataggcaggtggccctgtgttcttgggttttttgtcctttcaaggagctaggtctaagaagtgatagtatttaatctcgcactccgaagcgcacccagatttaaaagttgggagtggcccatacacagaaggctagtgggaggggcaacccggagatttgtccttgcagaatgatgccatgaagaacatggccaatggaacaccattgcttcaaatcccgacctctccagttctcctggtttcttgctaggcgggaacttgggcttctttatcagtgactggggtcagttcttgtactcaatttcctatctctgtgatctcttgtaagatgctgcattgtcaaatggagaaaacattgtctttgagttgttaggagccttgagtgagatggtatgcaaatgtccagcccgtggcaggccctaagtacacagtagccattattaccattattattcctatcaccagcatgtattccacctgttgatagagttttctgggtttactaagccagggtgttgcctttgggatcgaggtccgtcagaatccattggtataaacgagtctttctgcttttgtactttctataaaggagttgtctttgatttttgatgcaggtttaatggagatatttcagaacctggatggcagcttttgaaattaagatattgtccattgcatctttccatgatcgaggcgttgtcgtgcattcccctccttacagcgttttaggatgcagattgagaggagataacgttagcccgaagcgcctttgcagcctcttttgcgcggctgaaacacagcacaacccacccccccgccccaccccccagcctgtaggtttagcagaatcccagcctcacatcctccccgaacttggcagtaaaagccctgttcttccattcattccgatgatttatattctctctgggcgtcttatattaaacaggggaattccgacatgttccataacacatttactgtaacttgataccatgaactacacttgctgttatttatcatttctttttattttctctcattgcagcataaagccaaggtagaagcaatgaccctggacctcgctctgctccgtagcgtgcagcattttgctgaagcattcaaggccaagaatgtgtgagtgttccagtggagggttatagatcataatttcttgctattgtaatatctttatcagatgaacacaattgggagaatgcaaggctgttgtgttgtcttggcgtccaaacaggaggctcatttatattggccctgttaaggtgaaccgtattttcttgactcacagtcaccttcattatgagatgtgtcatcaatctaataacagcttcccacataccaaaagagaagacactattaaagcactagtaaaagtggctaataaaagcttggcaatagtaagatgcatcctgattataagattttttgtagtgcatttcagaatggagtaagagtatatttaaattgcattcaggaacaagtaaactcagttatccagtatggcagggaggttgacaatccaagcacccaaaagacctctagtttctaaagccttcgatgatttgatgtggtacatggatgtggttccaaaaaacatggactcacattccttttatttattttttttcatccttttcagtctttcaaaattccagttggagaaagccttagttagggcctagcatattttgatcctatcatatgctagcatccctttctaacagagaaggttgtaggagaaagggagagaagcggaagggggtggggagacagagagacagacaggaggcctcaaaccctgaaacactgagctaaggaaagtgatcatggcaagctacactaattacaatactttgtttccaagtgtttatttttactcatatttagggcaggcaatcctggtttctcgttgaacatagaggtttgaatttcattaataaataacttcatttattttttttcagtgacttgattcaaacatgaggattaagttaataatagcacaggttgtgcgaaggataagataattacacaagaggcaccagaaccactgaatgtggagagctctcataaatgacaagctgcctttgggttaggctctgttgggaacattagttctgcagtgttgcaagcagatgaaggatgtgagggaagggatcttaaaccagatattcaaatggccctgtggggagctgacaccacactgctgtctagtgtccaattctccttgcatggctgtgtcacccaggttggaacgtagtgcacaatctcgccttaatgcaacgtcccactgtgggcccaagtgattttcctgtcccagcctcctgagtagctgggactacagatgcctgccaccatggcctgctaatttttgtatttttagtagacatagggtttcaccatattggtcagactggtctcaaactcctggcctcaggtgatccacccgcctcagcctctgaaaatgctgggattacacacatgaaccactgcgcccagccgctctactttattagatttaaaaagtttgctctcagctgggtgcagtggcttatgcctgtaatcccagcagtttgggaggccaaggcggggagggtcatgaggtcaagagatcaagaccatcctggccaacattgtgaaaccccatctctactaaagatacaaaaaattagctgggtgtagtggtgcacacctctagtcctagctacttgggaggctgaggcaggaaaatcgcttgaacctgggaggcagaggttgcagtgagccaagatggcaccactgcactccagcctggcgacagattgagactccgtctcaaaaaaaaaaaaaaaaaaaaaaaaaaaaaaaagtttgtactcagcctggcgtggtggctcacgcctgtaatcccagcactttgtgaggccgaggtgggcggatcacctgaagtcaggagttcgagaccagcctgggcaacaaggtaaaaccccgtctctactaaaaatgcaaaattaactgggcggggaggcacatgcctgtaatcccagctacttgggaggctgaggcaggagaatggcttgaacccgggaggtggaggttgcagtgagctgagactgaaccagtgcactccagcccgggtgacaagagcaaaactctgtctcaaaaaaaaaaaaaaaaattgactcaggctcttgctggagtatgtcagtgtcccaagtcactgaggtctacattagagtcagtcttagtgagagttgcaacatcgcctaagcgcagaccccaagctggcttgtaggaacagtgagataacatcccccagccagccagatctgagagagccctcctgtgtgtgtcctttgcagcgcttggctgttagtagcttccaccctttgccagaactatcaagaggcacctcaacaggctgcaacactagcattcaagacatttgttcgctgatttgcttcgtcattcatttatccacccgttccttcacttcacacacatttcaggagcacctctaaagccccagacattcttctgggctctgagaagagagtggtggccctggaagccacagtaaccgcacacaagctgtcacctcagttgtcagctattatggatggctgactcctcaaactcatctgtctgtggttgtttgggagggaatgataatgacaagaacagcagcggagtcagcagctcatttactgagggcttatgggccatacgtggaaaatattttgcatgtatgttttgattcaattctcaaagcagtccttgggagtagatgctattaatatctctactatacagataaggaaagtgaggctagagaggatatataatttatccaaggcatgtggaatgtgggtagaggggccgatttagcctcttcacggctccaacttgaccaccgtactatactgtgtttcattttagtttattttttatttattttttgagacagggtctcgctgtgttgcccaggctgaagtgcagtggtgcaatctctgttcattgcaacctctggccttgggttcaagcgattctcatgcctcatcctccagagtagctgggattacaggtgcaggttaccacacacagctaatttttgtattttctgtagagatgaggtttcaccatgttggccaggctagtcaactcctgacctcaagtgatctctccaccttggcctcccaaactgctggaattacaggcgtgagccaccctgcccgaccctttcattttaaatgtgatagaaacagactcagagaatgtgagtgactttcgcagggtcacttagcaggttggtgacgggcatggggtttcactccagtctgcctcttgttcttttcctcatagcatgtgagatctcacaattcactgccgctgaataactttgtccagttcctctgtcagaatgtgttggaagtgagcagctttgctgaagagagccaactgttacataataggatcatcttccacgtcttaactggaccattagtttttaaccattaagtagttgggaaatcatcaagttcaagtgccttttgtaatcaccaagctcaaaaccttggaggaaactctcacccattttgccctaatcccagattttagcacaggactttggaattttagaaagtacttctaggttgagaaacaagggtgattttccatatagagacctctgtagcacaaccctctttgtatgtgtcccatgagagtacaggattttacatggcttagagaaatactgtggtggtgaaaatatgcataaaaaagcgagagattttacttttgaaatgctgccaaagtgaaatctctcttggataggcagatgacagtttagtacttgcaggtctttcgattctgacaactgtcagaagtgaatttaagtgctggtgactaggctgccagagaaacacatgtaactctattcttatcaccccccatcttcagacattaaaattttcttgtgtgtaaaacataatgacaaatgaaagaaaggctgccagttcagaaccaatctcttttcacgctgttgcattgaggagaggaaaaaatcccttaaatttgaattccatgtggatgctcttatttaatatgccgtttcaaagcctgtatgtgatcaagccagagtattatcaggctctgagttcctgtgtgtattcccttggtccatgctccatctcaagtgtttctccacactgggataggcagcatattgtgtagtcttagagcagaaaaggtagaaacagattcttagtacaaacactggtgagaaaagcagcatattgtactgtggaaccacccgccgtctgccttctgtgggagatggggatcagcctcttcctggatctcttctttttattcgggtgctgggaggtgaggctgcaaaggaggctgttgtagagggagccctcctaaccatgattatgtaaacaatagctgctaggcaacttgttgtttgttttatgcaaggcagtgtgctaagcacttacatacatgtattctgtctgtagtttgttataagagtcctgcacacttaaccatgattatccctactttgcaaattacaaggttgcagtgcagagagcctaagacactttctcaacttgagcaagtaggagatccagaatttgaacccaaatctctctgaatccaaaacgactttttgttactttgcacacttcagtcataggaatttcagtgtggatttctgtattggttatgtattgccgagtaagaaatgactctggccaggcacggtggctcacacatgtaatcccagcacctggggaggccgcagtgggtggattgcttgaggccaggagtttgagaacagcctggccaacatggcaaaaccccgtctgtactaaaaatacaaaaattagccgggcatggtgatgcatacctgaagtcccagctactcaggaggctgaggcatgagaattgcttgagctctggggtgggcagaggttgcagtgagccgagatcatgcctgggggacagtgagactctgtctcaaacaaattactccaaaatttagtggctaaaaaacaacgtaaaacaagaaacatttcttttgtgcctcctcttttcctccctccctctttctcatagttaatttgtttgaatcaggattcaaataaggtcgatgcatttttaatctataggttttgtctcctttttttttttttccttaaaaaaatttcttttaatgcaacagatttaagggaccagggtgttctctagagcaggggtccatgacctctaggccacaaaccaatagcggagccgtggcctgttataaattgggtggcatggcagggagtgagtggtgggcaagcataggaagctgcgtctgtgcttagagccgctctctgtcactctcattagtgcctcaggtcctccccctgtcagatcagcaacagcattagtctcataggaccgtgatccctattgtgagccacacatgcaagggatctaggctgcatgctccttacgaaaatctaatgcctgatgatctgtcactgcctcccatcaccttcaagatgggattgtctagttctaggaaaacaagctcagggctcccaccgattgtacattatggtgagttggataactatttcattatatattacaacgtaataataatagaaataaagtgcacaataaatgtcatctgcttgaatcgtcccaaagccacccccactcctttgagtctatggaaaaattgtcttccagaaaaccacttgctggtgccaaaaaaatttggaaacctctgctctagagatttctgcagtctgtactttggtgattgcatctctgtggtgtcttttaacatactcttctgtctcctgagtttcctgtgaaagggtagataactcaagagactcaatcaacttcgtgtttaatgttttcgtaagaatacttcagaggcagtggtgtaatcgtccaagagtacacacaggcctgattgccaaagccagttttcttcaggcccagcacgtcctgacctcctcactcctctgcccactctctgtttactcactcccattttcattcattgattctgttattctccactaagttttctgggtggtcagcccaggaagcctcagcctgcttccagatagttctcctcagagttagcggtagcagcggtcgtcggccagtgtgtctcgggtcaaattattttgggcattactggaaagttccaaaccaaagcctgtggtaagttccacccaaactggcttgtgagggatatttttgtttaaactgcattcctggagaggagccagacttcctactgcctggcagcagtggtgtccataggagtatgaagagctgggaccctttctaatcactcagaccaaatattggggttttctgaaatggactgagaaataacagtatgtttttatgaggctttgcacattttccttcctagcagtagctgcttagtctactgaaaagtgcatattttgaacagggcctagaagagttaacagctcctagagagaggtgctctgtaatactttttcttcttcaaaaaatggtttatggctgggcgcaatggttcatgcctataatcccagcgcttttgggaggccaaggtgagaggattgcttaagcccagaaacgtgagaccagcctgggcaacgtagtgagacgctgtctctatattacaaaattttttaaaaaacggtttgtaggtccttaagtccctgataaaatagagaactgaattgcaatcctggaacttaaaaagttggtgacgacacctgagatatttattacttagattgcagttactggtcagcttgtataatactgaccaagggttttgattcttcctggaattgataggaaattcatattaaaataattacccaagtccaaacatttttagaactgcatttttgatcatggatttttatgtctcttctgaactttctgtcaccggtataatttaaagaaattatacttaagctttgtctcacttagaagataatatagaacagtggtgtttttttaattaaaaaaaaggttaaaataacggttttgtatccttgctttacttcttaaacatatgggaggaaaaaaaatctttaacaagtttatttattttcattttctgctaaattactttcagaacttgaatctactaatcccagatataatattcttggattcatattccaaattttgctgtctcaaatccatctagggaagtgggtgggctataaattataaataaattccaaattttgtgggatgaattaccctgaagaccaacgtgtaaattacatattaatctttctttttctccctagctcggttttaagaataatgttttagccaacatatctgcattactcttggctcaatatgagaaatccatttttggtttgcctaacagaagatcatcttgctttgcttctctacacagtatgaaaacccaaagaaaagaaaaacagaggcagttttttgctctaatgaatgctctaaatctagctcttaattatgattttttaaggaaaattttgaaaagtctacaagttaaatttttttttctatcccatacattttccatcctaaggcattgaaaaagcacactgtgaaatacttagtgtatctagaaacatcagggaagaatgcttccctcctaagcaaaattttgccttctgaaactttttcagcattcagtctttttatataatacttagaaaaatatttctgaaatagatcatacactctcttcccaaaaacatcaaagtatgaccgtaaagggcagaggtaggtaaacttcttgtaaggggccagagagtgaatatttgagaattttcagactattaagatctctgttgcaactgcttgcttttgccgtggtagcctgaaagcagccatagatagtatggaaatggatgatcatggcagtgttgcaataaaactttacaaaacagacaatgggccagattggccaggggccatagtatgctacccctgggcaacaacctgtatgccctggagtagtgtaaagaacgtgggtgttgggggtcaactgacgcttccagctctaccacttactggctgtgtggctttgggcaaactactgaaaatctctcagcgtcactttccaagtgtgtgtaatgtgtattttcacagtgctttgcaggttgttgattattgaaaatagccataatgcatgaaattaccagacacatctcactttatggagcctggggctattggtaatatgcatttctttctcatcttgatcgtaaaatgatcttagaaaggtttctgagaatatatagagtttaagacagcaataagacaactaattaattaaacaggaaaaggggatgttgtgctcagagaggaagtgtgggtctcataagggctttcacaatcgtttgagaggacacgtgtgatgtctcatgcctgttatcccagcactttgggaggccaaggcaggcaggttgcttgagttccggagtttgagaccagcctcggtaatttggcaaaaccttgtctctacaaaaattacagaaattagttgggtgtggtggtgcacacctgtagtcccagctgcttgggaggctgacgagtaaggatcacttgagccagcatggtggaggctgccatgatcatgctactgcactccagcctgggcaacagagccagaacctgtcttgtaaagaaaaggaaaaagagagagaagggcagaaagaaagaagggaaggaagaaaggaaaattgggcccaggaatgatctttacaatgcctgacaaccaagagaagaagggaaatgagcttcacattgcctgcaagctctagggtgacaagagccaagagaaattattgttactgtagtgatgttccactgaggatcataaagtactttattactctactgagtatggttttttgttttgttttttctttttctttttctttttcttttttgctattcttttgttattcttgatttatgctgatggaaagccatggacccaaggatgcttcacagttttctttcggagtaaatgcttagattccattttctttgacatgactatgtctgttcctcttgattttaggcatctttttcagatgagttgccataaaagcagcctgctctggataagtgaggtacagcaggacacactgcaaatactaggaatccttaagtacagtggaaccccagagcactctacctgctttctttctcacctccttaaaaactttttttgccctcacctcatcatttattcagcagtcacaacagtgccaagaacttggctagagattggaaataaagcttatgccttctctcatatctcctgtaccttatttctttcttacagtagttgtgatgcttagcagttttttgataactttttatgatgccaaccttcaaaaacctgcccctggtggagagaataattattacatcaattaggggtcacttagcatgacatttgtcggaaaaaaaaaagttagtgagcctttttgccatattaaaagtcatcactgccaagacataaatgaaaatgtgttcgaattaaccacaccaatgttcacaaaataaacatttttgatttcccaacagaatcctaggtttaactatcactatcatctttcatgaaatcaaagtcatatatgtaaattgaacacaactttcccttccatagagagtaaaaaccacgctttggagggtagatacaattaccccagggttgtcttttcccactcctcacaatcccaccagtgcacatgcaaggtgatgtccttcctttagctatagcaaataatgttaattattgttggtgttaaataatgattatgtaaagcactagactagacattcgtcggcaaagtttttctgcaaagaatcagatagtaaatatttttgctctcatcagccagacagtctctgcggcaaccattcaagcattgttgaatacattgttgagtgttacatgagactattgtaatataaaagtagcctgggacaacacataaataactgggtgtggctgtgtcctaataaaactttatttacaaagaacaggaagtggcttggatttggtatctggcctggcagctgtggtttactactccttggacggtggcccagagaccctttaaatgaaattcattttactagcaccctttttcatcatgagaaatatattctgtttttcttagaaaatgggttatgttaggtctggtcaaggtaaataagtgttgagagtcgatgttgtgtgcatagttaatttcaattctttgaagaaactcccccatgatatttcacggctgagagaagaggaaagagtttaagtggaacagtgtgctttgctgagctttggaaatattaccatatagggaagcaggtcaataagacaactaagtgctgtttcaataacgaagatactgaagcgctaattggagtatggaaccatataatgatgataataattgctaatatttatcagctatttatcatgtgtcatgtacagctaagcacttacataccatcccattttatccttataatgactctaagagtgggttaaaaaatggcagaagaatggcagtgtttaatggttcagcctggtgcaatgattaaccacattttacagactaagaaattaagaacctcaaccaagttcatgctagctggtacgcagtaaggctagaacttcgtccaaaatctcttcttctgttgagctcagcttgcatagtagcttggagaatcagaaagatctgtctcatttgggaaatataccatgtaaaaaacattgtttctaaaggagatttgtcccatgagtaaaatagatgatggacagccactgcctagtgggacaattagaaaggtcagttcaaggttggaggagatgcttctttcagccaattttcctttttctcaggatcacctcaggtgatccgcccacctcaacctcccaaactgctgggattataggcgtgagccaccgctcctggcctttcagccaattttctatcaccaaagggaaatcgttttgctggaatatgtgtaaaggaggttaaagtcagaagagattctcgtccgctcagttaaggtactcagactattttccaaccaatcaagagggtgctgcttcatggagttcgtttaagctgaagcggcagctgttgactgtcatttgcatcatctttatacatttactgtgaatgtcactgtccatttccactttctttctacttgtcttcaaattgatgcttatcaagtagacagaagaagaccaaggggtcgttttgctatttatacctccaaattgatggcgtgatcactctcaagtgcaaacccagccctgacactgtcctgtttggcaatgtcctgctatctgacctgcaaatagctacacttcctgctgtggcccacccaggcctctgggatctgatcccttctcccatgtcacctgtggccatgtcttccccaacccaggcttctctgctccgctgcttatgttctggatcctgactctgagcctttgcttgtgtggctcctctcccacttgtccatcatcatgtcagttatgtaagcatagattccaaagtgacaatgagggtagttaggatggcaagaggagaaaaaccaagctggattcatggattgcttgtgtcacgtcctctacagagcctcccttctacctgctcttacccgggcaccacagttgatgagttattttttggaccatcagcaacacacccaatcattgtacatggaatacttcggggatgcttttttctatattgattttacttcattaaactgagctccagaggagcagaaactttggctaatacatcttggtcttagcttgtaatatctgtgctacaacttattaagatggtgacgctggcaaattccttaatctttctaattcttaatttcatcagcaaagatgggaaaggatactaacaccactctgggttgttgagaggattcaataactgaatatttataaagcgtagtacctgatacttaataaaaaagtgaattttaacctgtgtcatcattgtcatcgtctttatcatcctttgcaattattacatttactgccttctagtacaaggaaggggatgggtggctggctggctaggtggatagaaggatggaagaggtaagtacaaggaaggggatgagtggctggctggctagatggatagaaagatggaacaggtaagtataaggaaggggataggtggctggctggctagatggatggaaggggtggaaggggatgcaagaggtaagtacaaggaaggggatgggtggctggctggctagatggatagaaggttggaagacaggaaggatggaacggaagaagagggaagaacaaaaatggaaacacatagtactgttaggtgaactgaacttctaaggtgccgattctcagtgatagaatcttgagttgatacctccttgggtggcatggagcctatacctttgtagatcttgggaaacaacttctaaagtaatcatagttgtatgtaatcgtagttacaacaatagttattttaggcacataacccaaaggttttcttacaaggaatctatgaaccttaagagtgagggcttctgttaagagtaagggcttccctggagtggacatggatcatgggactgagccagcttggcattgttgggttgaacagggagcgacacctctcagcccagtctatcaagcctgctctttgacctgcagtgagaccacccacgcagacatcaatgcagcaaatccccggcgtcagggtttcaacatttggttactctcagagaactctcgatttatataagacttggaaaaagggtttgagtttctgtggtttacaattatatttcccaacttggcccatgaatccagcttggtttttctcctcttagcatcctaaccaccctcattgtcactttggaatctacacttacataattgacatgttgagaagctgtgctaaaaccacactgaaatcacattttaataacatgggaaccatcttttcccagtaaattgttgagaagctaattcttgtcagcctaaaaacttgaatatacatttgaataaatcagcggtgctacaccgtggcagcctgctgaaaatccccaaggaagattatatttttagttgagctacttgtcactgcactgtgtttttaatattgtgagtcctttcttgtcttcatttttgaagaatctattgcataccttgtcattcagaaaaacataaacgggacctctcaattagcggtaaagttcgtcagtttaacttttaagcttaaactcctgttatagttcggtcacttactcgtcatcaaaaagatatttgagctgatattatgcaataatttataaccaaaaacaggaggaaaaggtctctgtttgtctcagaagtacaagttatgcataaggtgacaaattacacagctttgggaaatgggtcttaatggaatgcaccaggctaatagaaaagcagtgcctcgatttcccacctcagatctgaaaactcctgagagactgacagggcggttccccagcttggctgtgtgaggaatcagctgggaatcgaacactgcagtctggctgtcacccccaggattctaatgtaattgttctgcattgtggatcgatggatggatggatgaatggctggacagaaggaagacttggaaaaaatctttgagtttctgtggtttacaattttatttcccaacttggcccatgaatccagcttggtttttctcctcttaccatcctaaggagggagggagggaggaaaagggggaaggaagcaggtagaaagggaacagggaagggaggactggaggaaggaaagcagggatcattctggagtgtacactgggcatttgattttaaagcaaatccaagagatcattaaatttgtatcaatgaatacactgttacccctcaatcaacactacaattcatatatcagaatagcactttgttacttgtttctgagatagggctggctctgtcacccagactggtgtgcagtggcacgatcacagctcactatggcctcagccaccagggttcaagtgatccttccactcagcctcctgagtagttgggactacatgcctgcaccatcatgcctggctaatttttatttttgtagagacgaggtctccttgtgttgtccaggctggtctcaaacttctggaatcaagtgatcctcctgcccctgcctcccaaaatactgggattacaggcatgagccatgtccagctgccttgtttttttctttgaagagaatgatagaccttccataggaaaaatgttaaatatgtgtgtgcagaaataaagatttcaaatatttttgcaagatattttttctaataccacttttttctacattttccataatttagtgaagatagtaaattaacaaagtggaaaagactgaatattttaagaaaagccaagtttaaaaattttgaacctaatatttcttaaagtagctaaaattcagatattgagaataaattcaacttgacatggcaaaattctaataggctgaaataatgttttggtctagaactatgtagctttgtgtagcccatcaattgtctaaaaaaagagtaacctattttgatgaaactcgctgtatcttgtaacctgtatcctgtcttggtattgtgggagtatatatgatttaggggaaagagtctggagagaccttaagtctgctttagggaaagggtgaggaaccccactgaaggctacttaacgcattttgagaatgtcagtaaagatttctcagagcccagggattttttttttaattgagacataatttacatacaatacaattccttttttcttttttttgagacggagtcttgctctgtcgcccaggctggagtgtgatggtgtgatcttggctcactgcaacctctgcctcctgggttcaagtgattctcctgcctcagcctactgagtagctgggattacaggtgtgcgccaccacgcttggctaatttttgtatttttagtagacacggggtttcaccatgttggttaagctggtctcaaactcctgacctctagatccgcctgcctctgtaatcccaaagtgctgggattacaggcgtgagcccctatgcccagccaaaattcattattttaagctgtacaattgagtgatttttattacgttcacaaagttacgttaccattaccacttttgaattgcagaacaatttcatcactccaaaaagaaatctcataacaattagcagttattttccatcgctacttcctccagtcccaaggcaatcagcagtctgctttctatctctacctgtttgcctattctggacatttcatatgagtggagttagataatacatggccttttgtgactggctttcacttagcataatgttctagaggttcatttatgttattgcaaaaatcagtacttcatttctttttatggctgaaaaaaattccattatgtagatgtgccatatttgtttatctggttgtcagtcggatatttctgttgttcctactttttggctactgtaaaagatgctgctatgaacattattgtgattattataccttatttgtaaacatcatgggtggggggttgcagtaaacatgttggaaagtagggttggaggtccgtagaaattgggggcttcagcacttcccccaagctcaacaccaaccccctttctgagcccctcttgaaggagagttccctgggacgtgcctggtattggtacaatcagtcaggaagcatttttcctggggagaaacttacaagtccacgatcaaagccaacaagagacaaggtgttacatgactcattttcggtttaagaagtgacaggctgattctaagttgggttcaattattttgttaaagcgttttgcttatttgacttctcctgacctcggaaataattctaaccaatcagtgctggctcccattggccctggggtctggttgctttacagctggtgacagggggaccactccactaccacatgtgaattaatcctcaactccagagccaagtgccattctccagcaaggttgtatttcttcattagctattcccagggcccagaaagtcccagaggatgtcagagtacattaatttttatcataacatggaatctttcaggtctgaatggcagcacacggctgtcaggggcttctgaactctattacagctccatatatctctaggcaaaacagaggaaagagtcgtcattggcaagggagatgtacaaaatgcatgagatgttttattttttgagtgacttgaccacgtgcttaagcacattccccaaacaatttttttcttattgtttgtaagttgtaagttgtaaattcacctctgccaccacctattaaagcccactccctgcattaaaactgtataaagtgtatttaaataaactctctttgcatgatgtgaatgaaatcgtcatctggtacttaaaactattctataaagttattaaaaaattaatgttcccttcccatgatttttctgcagaatttatgcatccatgatactgcagaagttcataaataatggcttgtattgctgctttagtattgctttatgcctacgaaatataatgttaatttgtagcaatgctaatgtgttttcaggaaggctctttgtttattgcctttattttccccacttaccaagtgggtaaaatgctttgagggttgcattttatgtattcaggaggcccaggtattattttaatagaagcactattgacaaataccagtcatcccccctgtgccaggccctggatgaggcactgcttcgcatgggggctccccagattgtcccacaaggaaagcatagtcaaagacaaagttttcagttgtaagagtaaatgtgttctgcctaggcattgtcaagtaatttactgccagctctagcccttcactcaagtttcctggatacttttgacttcttagccatggatgtgtttgaaggctgcatggaccttcacttacttgcactgcaggtcagcctaattgcatgagctctgtggaccacagagcagggttttccaaagttcaccaagacaaatattgtattatcttaacatatattcattttttaaaactgaaaatcagaagagcaactccacctagcagaagtcttttgcaaagggcgaggcgaggctaaaaagtatagaagagttcgtttccagtgcaattttataaacacagatggtccttaaattaagcaaatggtacctaaatgactgtgttgtggataatggtaacagagggagggactcgggggttttttaaaaagtactgattgtatgcagtgttttaaacagataactgtgatcttagtgtgatgaaagatgctgggagatttcaccagtggtatcttattatttttcggggattttgtaattcaacaaaattctgttgtatgccaagcataaccctaggtgtgagagcacaaggtgacttcagataccacctctatccttcaggggtttggggcccattattatgacttaatccattttgggcgtgagaagctgagggtcacagaaagaaccaattccctctttaaataatgccaccccaaccctcctcatctgccaggtctttcccttcttctatttgtatgaataatagtcactttctcttgtggagttcgctaaattctactttggcctatcaaatttctttcatatcacaactaaatttcttaaggacgggactatggttcatttgtcagacgaacaaatgggaatttgccaagagacacttgggttaatttacgtcttttccatccaagggcactatgttgaagtgaggctagtaggtcatgagtgtggttgaagttactttttcttactttcccgaccagcccccatccttactgcacttaaagttgattgtccattttattaaatgtccccaggaagccagaacacagggcagtaaagtgctgaatgcaaagggcaggagaaaaatggaaacaaccagaactgtaacaccaaggaatgagacctgcatgtcagatatcatgcccattgcactaagtgccattggggcacaattatcaaatggatgcattttccctagaaaaccatcttggagagcatgtggatgtacttctattttacatttccccctatttacaatcaatgagattgagattttgttgctgggactgctgatgatgggatgggaaaatataatcaaggtaatggacatgaggcaaaaatttaaggaaatgacaaaaacaagagtatttccattttcagttaagtgtatgtactgatgttctggaattcactataagaagttgcaaatggtgcatgaaatgaaaaattcctggtggtctccaggggacacagccggtgctgtgctccactctgggtaactgttttggattattttctctattccaactgaaataaaaaaaaattaattaaatgtggctaggttatcttgacagcagaatccattcccagttaattattattttaatacttgatggtgtctgtcaaattgtcgacatgtgacggtcctttcaaatttaaaggaatagctgatggtcactggccacccaagctgatactgattttatatgttgatgtttctcattttatttgctctttccttgaatatttattcaggacattctctaccagacatattgagtaagggcaacagaaacaatacataagtatcttataaatgtggaaaacaatgtatatgtgttttttatctctcaatgattggtgggtaccatatccccaaagtagaatgagcatttgagaaaacaggaaatatcctcttttaggcaccatctctgtcaaggctgatgctgggctttttatatattttctctaattcttgtggctgtcaaacaaggtgggcattatcattccctttataggggacacagctgtggctcagaggggtttattcactttcctgagggccacacacataatgagaggcagacacaggtgacgaagtgagttttccctgtcacgccatcttatctgtcacatacctctctgacatgctaaaattgcactaaacaaaagaattctcttatgcacatatcatgcaaaagatattctttaactggggatcatgtttctcattccatcaatagaatgactaacattttctgagggtgtctcacgtgaaagtaaatcgctcatgtttgttctttttaaaagatgcccttcgtattgtgtatcttgcagtcttgctttctcaaacttaagccaactatatcgtcatttttgcaaaatcactgcgtcagtttactattatttaatgtttattgctaccaattttaagaaatcctttataggactatttgtgaaattgattttgtgaggatgatgatataatttccattacattacagcatataaatataaatatatatatatatatatatatatatatatatatatatatatatatatatattttattatttttttttgagacggagtcttgctctgtcaccaggctggagtgcagtggtgcaatctcggctcactgtaacctccgccgcccgggttcaagcgattcccctgccttagcctcctgagtagctgggactacaggcatgtgctaccacacccagctaattttttgtattttagtagagatggtttcaccatgttggcgaggatggtctcagtctcctgacctcgtgatccgcctgccttggccttccaaagtgctgggatatacattttttttttttttttgagagatggagtgtcactctgttgccgaggctggagtgtagtggcgcaatctcggctcactgcaacctcctcctccggggttcaagcgattctcctgcctcagcctccccagtagctgggattacagtcgtgtgccaccacgcctggttagtttttgtatttttagtagagatgggtttcactgtgttggctaaggtggtctcaaactcatgacctcaagtgatccgcccgcttcagcctcccaaagtgctgggattacaggcgtcagccactgtgcccggccggatagaaataatttttataaactccttggatgctacctaaaatcatcttgttttgctagtggcacatgctgcattttgggcagctgtggccttggtggattgctgaagtagatttgaccttacctggactgaggcagctgttgaagggaattgctgtgttcagtgtatactgccatccatgatttcatgaaaccagctctagctatttaagcaggggtcaaacttagaattctacattatttttttcccttttctgggaggaaagacagttgaacaccagcaaagactaagaagtttcttagaagactgtgggtccttgggccctttctattgaatttcagagtatttccaaatactatgaagtcttgcagcttagttgagaaatgccccagatggtgtgacattctgcttccaggagggattggaaagtatttccttttacataacattccactcagctcattcctttgctgtgtctgaaattgaatcccccaaagccacaattatcttaacattcagaagagtgtttatttaatctgcaaaatcttgcctcacttttggggagcatgttaacaatttcacttacaaatcttctgtgtaactcaaccccatggtggtgtctactgctgctcctagactctttaaagcacctttctcatctcaggtttgaaatgatatgtctcattcttgggttccttgagtcgtaatgggtttgtcttgtctccacagcataaatgactctttcttgatcaactagaaccacatcaacttcttccctccagcttcagtgatatattgtgaaacatggctattcaacgtcctgtagaccaaatgccataagaaaaatagcattgattcaaacgtatccatccagatacctaaaaaagttttacttcttaccacatcttgagtctgggcaaacacgcacttcctatggacattgattactgtctactgtagagataacatttgcacatacagattatggcacatggtagaaagtgttaagtaatgtaggaatggacatatcccaagcaaaattggaagccaagtcccctgtccctgctcaagttggtatgactggtgtatggtgccttaatgggtacttaaagtccaggtgagagtggcaggaggcagccaaatgcctaggtagataggagccggtccctgttgaaaccccacttccaagttgaagacagtttaaagactgaaagccaagctacaagttaaatcctcggaccagattgagaacttgtcttcttacttggtgcactcttctgattgatccccacctttcacctattttacatattcctgcccttccctaactggtttcctatgctgtcatgcccacctttgagtgttgccttcactttaaccttctgtgcatgctcacaaagtaattagcatgtaccctccattctgagttaatataaggccccagacccagccacatggggcaactttactgccttcaggtaggggaaccacccccaccacattccctctccactgagagttttccttttagttaataaattcggctccactcactctccattgtctgcatgcctaattcttcctggttgtgagacaagcagttggacctagctgagctaaggagcagaaagactgtatcacagggaacttgtgtaacagcttgatctcctgtcctacgtagctatctattggtaagaagttgaaggaacttgtgtcattccgttgtgcctgtcgtcttgaccttgtaaaaggtcttgggtaagcatgcaagaagttttgaagagggagatacagctaatttgcagataaagagcaagggaagaattcctggagaaaggaagagtttcctgagtcacctttgggaggtaggaagggtttgacatgtaggctgggcatctgggaacgagtgagggattctgtgagccccatctcagtggaccactcaaggaaggtgggtaagccctgggtataagtgtgtaagcagggaacagaaagtactgtgatttaaaatatgttaatttttctactgtacagatgagagccagcttggagatgggctgtagctcaagcatcttacctacctctgatttcttaatgccacgttataaggctgctgcttatagctcttgaagtcactccaaaaacagatgagtgagaccctgttgctaaagtcccactgggtgtagattattcacagatgtatacacagtggctcactccaggtaggatgtgatcagtgcttttagaaatacagaaagtcctattggtttaaaaaaaatttttttttgtaatgaattgagttttaaagctagcactgtacaataaaagggtgaatttcactatgaattatgacaaacacagtcatagagctgccatcatcactgtcaagatacagaacagtgccatcaccccccaaatgtcctctgtgccttactgtagtcatacctgctcctgacacctagcccctgggaaccattgatcttttttctgtccctagttgtttgtcttctctgcaatgttacataaacagaaatattctgggtgtcgcttttggagtttggattccttcccatagcataatgcatgcagtatttgtctgtttctgctaaattacccccaagacctagcgacttaaaacagcaaacatacactatctcactctgttagttttccattgctgttgtaataaattaccacaaacttatgtgcttaaaacccaaagctattatctgacagctctgtaggttaaagatttgtcatggttctcattgggctaaaattaaggtgtcggtatggctctgctgctttctagagactccagggagaatatttttccttgccttttccagcttctaaaggtcacccacaacatcttcaaaaccagcactgttgcatctctgaccttagccctgtagtcccatttccctctagccacaatcgggaaaggatctcaggactgttgtgatgacactgtgcttacctagattatctagcatgagctccctgtctcaaggtgatagagtttgcatgtttttctcctgcacatgccatgttgaaacataatccctagtgttggcggtgggtgtgctgggaggtatttggatcatgggggtggaaccctcatgcatgacttacggccatccctttggtgataagtgagttcacatgatatctggcaccttccttcctctgttgctcttgccctcaccatgttagctgcctactccccttttgccttccgccatgactgtaagcctcctgaggcctcaccggaagccaagcacatgcttcttgtagagtctgcagaatcggagccaattaaatctcttttcattataaattatccagcctcagttacttctttattgcagtgcaagaatagcttaacacacaaggtcttacccttgatcacggtctgcagcatgtcttttaccatgtaaggtaatatgttcagtggctgtgggggttaggatgtggacttctttgggggacttttatttttcccagttactatttttgtgactcaggaatttagggacagtttggctggttgtttctggctcagggtctttcttgggctgcaatcaagatgtcagctgggggctgggcatggtggctcactcctgttatcacagcactttgggaggtcgaggtgagtggaccatttgaggttaggagtttgagaccaacctggccaacatggtgaaacgccatactaaaagtacaaaaattagttgggcatggtggcacatgcatgtaatcccagttagttggggggctaaggctggagaacagcttcaaaacaggaggcggaggttgtggtcaactgagatcacaccactgcactccagcctgggtgaaagagcaaggccccacctcaaaaaaaaaaaaaaaaaaaaaaagttagctggggccaaggtcatctcaagtcttgactatgaaaggacctaacatcatgcatggctgttggcagaggtcacttcctcatgagcattaaactgaaagctataattcctgactattgaccagaggcgaacctcagttccctgccatgtgggcctcttcatggggcagttgataacacagcagttagcttccattggattgagtaagcaagagagcaagaacaggagtgatacagaagccagcatctttttgtaaaccaatctcagaagaattgtccatgattttttctatattctgttagttagaaacaaattcctaggtctcacccacccttgaggtgaggggattacacaaaagtatgaaaaccaggaagcagggagcattgggagtcatttggaccctgcctaggacagtgcgtttgagatccatgttattctatccattagtagtagtttgcttctttttaatgttgagtaatatgccattgtgtgtttatatattgctaatggattttaaagagggctaatcaacgtgttgattagagggaaattttcttcagtgaaataatatttgagcaaaaccttgaagaacaattaggaatttgacagagggaatggcacgaataaagacccagacttaatcaagtgaggggcgtactcatccatggggcagtggatgattcacctgcctggagcttaaggagaagggggtgtagttgtggctgttgctcagaaggacctgaatgtcaggatgcatttgtgtttaatttagcagacatttaggaaccattaaaagtttttgagaatgggtaggtaagattagaatagtattttaataagtttaactaggctttaaccagtattcataaaaagtcaagtgggagaatgtagaggtgacaagaccaggtgtgggctattgcagtgactacacctaaaaggaacagagctagaaacatggagtgacatgaagtcattgtcttaggttggtgatcctagcagctgagcctgggatggggattcttgttcctatgatcgattaggggactgttcccagaggagagcggagagggaagcaggctttggtttctactggaaatctgtttccgcccgattccatggggagctctggagaaggaattgtatcaccgagttggtcctccttgtcaacagagcatgtgtgtgggggtgatgacttcccagatgtgagggtgccctccagcaatggacagttatctggaggagttcatgctccagaggtagtgcctacctctgtggagaagtaggggatggcacggtattttaggggttcctaatgagcctagagatactgacattgaccagtcatggagactaaaggagaagatgggatagcacattgttttcctaagtatttgtaatcaggtgactggtttgcaaatatcagccattacagaaataaagggtatcaggacggggaggagatgtgaggagagaagatgaagagtttagatttaggcatgttgaccctgaatttgtgggaaggtatccaggaagataagactgacaggtgggaatgagattctggaacttggaaagaatatagtggctagagctaagggtttgaagtcttcatggcgattttgttcggagtcatggatttggaagaaactgctgcagggaagattttagagatggaatgaaaagagattggtgatggaacaatgggcaaaagaggaagggttggaggagacaaaaaatggagtggtagtggcattgggaggtccaagagtggatggtatcacagaagccaagacaggaaagtgagccagaagtgagggaggagcaggatcctctgcaacagggcagtctagtcttagcagagaggaggttgctgaatttattgattgagaagccactcctcgccaggcagttttgagaggttctggatggtgatagaatggaattcattcagctgatgatgagaagtagatttgggtcagggaaggagactgaatggagatgaatatttcaaaactatagaccataaatgggaagagagagacgagtgcaacctgcctaggtcaagtgaatgtccttttttctcttcccagcccttgtcttttttaccctctttgttttctgcatttctttccttctgttctgatttttccttacctgatggtcagaaagatctgattgagctgacgcgtagcaagaatgagccagtggagaggaaaatgtaaccacctaatgggttctcctttcctgctagctggacagagctgatttatcaagacgggggtactgcaaatagagaaagaatttaatccacacagagccagctgtatgggaaaccagagttgtactactcaaatcaatctccccgagaattcagggatcggagtctttaaggagaaatgtggtggatagggagccagtgagtgatctgggagtgctgattgtctcacgtgtccatgtgaagagaccaccaaacagggtttgtgtgaacaacaaggctgtttatttcacctgggtgcaggtgggctgagtctgaaaaaggagtcagcaaagggtgatgggattgtcattagttcttagaggttttggcataggcggtagagttaggagcaatgtttttggggcagcgggtggatctcacaaagtacattctcaagggtggggagaattacaaagaaccttcttaaaggtggtggagattacaaagtacgttgatcagttaggtagggacagaagcaaatcacaatgggggaatgtcatcagttaaggctattttcacttcttttgtggatcttcagttgcttcaggccatctggatgcatacgagcaggtcactggggatatgatggcttagcctgggctcagaggcctgacactgatttgttggcttgaagatgaaatcacagggaatcaaaggtgccctcctgtgctgactcagttcctgggtgggggccaaaggactggttggcaggtctgcatggggccaccgtgttgtcagaaatgcaaaaatctggctggtgcaatggcttacccctgtaatcccagtactttgggaggctgaggttgtcaggcctctgagcccaagctgagccgtcataacccctgtgacctgcacatatacatccagatggcctgaagcaactgaagaactacaaaagaagtgaaatagccagttcttgccttaactgatgacattccatcagtgtgatttgttcctgccccaccctaactgatcagttgaccttgtgacattcctcttcctgaggcagtgagtctcaggagctcccccaccgagcaccttgtgacccccgcccctgcctgcaagacaaaaccccctttaactgtaattttccactacccacccaaatcctgtaaaactgccctacacctatttccctttgctgacccctttttcaaactccgtctgcctgcactcaggtgattaaaaagctttattgctcacacaaagcctgtttggtggtctcttcacatggacacgtgtaacagaggtgggcagatcacttgaggtcaggagttcaagaccagcctggccaacgtggtgaaaccctgcatctactaaaaatacaaaaattagctgggcatggtgctgtgcacctgtaatcccagctactcaggaggttgaggcacgaggatcacttaaacccaggaggaggagattgcagtgagccaattgcgccactgcactccagcctgcaatgcagagtgaaactgtcttaaaacaaacaaacaaacaaaaagcaaaaatctgaaaagacatctcaaaagccaatcttaggttctacaacagtgatgttatctgcatgaataattgagaaagttgcaaatcttgtgacctgaggaataacggctggtaattatttaaaactcaagcccctctcatcctaacgtggtggcctttcattcattttacaggaacagtttagttttgggggaaagctgttatttaaactataaacgaaatttctcccaaagttagcttggcccatgcccaggaatgaccaaagacagctaaccagttaccggaaacgggtcccaatctagaccccaagagagagttgttggatcttgggcaagaaagaatttggggtgagtctataaaattaaagtaactttataaagaaagtaaaagaataaaagaatggctactccataggcagagcagcaactttggctgttggactaaggatatttatagttaattattgattagctataatatattttaatataatatatataattataatacaatattatatataatatatattttatgtaactataaacaaggggtagattactcatgagttttcacggaaaggggtaggcagttcccggaagtgagggttcttcccctttttagaccatatagggtaacttcttgatgttgccatggcatgtgtacactgtcatggtgctggtgggagtgtctcttagcgtgctaatggattcatattagggtataatgagtagtaaggatgaccaaatgtcgttgccatctttgttttggtgggttttggccggcttctttactgcaacctattttatcagcaaggtctttatgacctgtatcttgtgctgacctcctatgttatcctgtaacttagaatgcctgacctcgtgggaatgcagcccagtaggtctcaatcttattttacccagcccctattcaaaatggagtcactctggtttgaatgcttctgacaaacctctgagactaaggacaagatggagtctgttaggttagttttaatttcctcagttattatttcacaaagggggtttcagaaagatagaaaatgctagaaagagacggggtagtcagtggtagggatcttgaggggttaaaaaagggaaggagctggtccctttgcagtaggaagtgccacctcactccactcttgccagaaagcctggctctgtcataaggaatcttggcccattgtcactctcattgatgacaacccccgcccccaccactaccaccttaactactgaggggatgtcctctggcccagaaggaatgcattggctctagttgaaggggttgctggtttgtaaatagcatccccacagtcagcagacacagagaatgccatggggccactcatcagaaaggtggaggggctttatctgtgggtagatgagagccatgtagaacctgcatgctgccttccattggaatctcaggctctaaacaaggaggacaaccttttctgcccttaatcacctctcacagatgagaatccacccaagaagaagaaaaaaaatcagccccttaaaatgctgactagtaacatcagtttttggaaggatactatttttgtttccattctgtctttatagtttgaacttttccttttcatagtctgtaaatattcatcatctcagagccttttgaattgcaatggcttttagtcaaaactgagcgcaatgtgccatttgaataataagaacctcattaaagtgaggcaaaagtaattcttttccttttgtacaagccaattaagtgtctttacaattaaaacaaagtcaagcactttatagtttcatattccacaagcctgtttttaattaatagaggtgacaagttttaggtacaggatacatattttgcctctggagttgtgcaattaacattaatgaagggtattaaaatttggtgagagaggaaagggttttcccaggtcctctgtgggttcttgcctccaggcctgtctttggtagcaagttccttggtttgctgaggtttgcattttcttgagagaatgtacaggcaagaataaaagtaactagaagagacattgttgttattgagaagtatgaagttaaaattcccaatgtccaggcctgtcttaaaattaggtaaacactgcagaaactatctttgaggaatttaattttgtcttgtggataaaagtgaaggataaagaggagaaataacaattatctaagctggcaggccagcaagatactggggctttacttctcacaaccatgggaggagtatatttagtttacaggggaggacacagattcacaggggtgaactaactggccatgagtcaggtaaggaaaataacatggctgagctacagtttctctaagaagttggttctgtccatttcagggagcttatgtaagacagaaggtattgtgcagtagccttgaagtcaggtgaccctttgggggtgtgtgtgtgtttgcttctttatattagcttttttttcattttgagacagggtgttgctcttcctcagttgcccaggctggagatcagtggggtgattacagctcactgcagccacaacctcccaggttcaagagatcctcccacctcagcttcccaagtagctgagactacaggtgcatgccactggctatttttatttttttctttttagttttgagtttttaattttttgtagagatgaggtcttgctatgttgtccaggttggtcttgaacccctgagtccaaaagatgctgctgtcttggcctcccactgtgctgagattacaggcatgagccaccatatctggcctatgttagctatttctgaaacttcatttctgtctgtaaatggcaatcataatatatgtcacgtagggttcttaaatacaaaaagctcttaaaaagtgcctaacccatagttagtactcaaaaaaggaaaaaaaagtattaatagccctggaaaagtgagcaaaatatttcagatgcaacctgaaaggagttcaaatgtaagtctctcttcactttgcccatctttccctcttccccgcaaggtttttagcagtggtcctgtcttactacaatatatgaattatccctgctacaaattagtagattctgctttgatttgaagcagagtctaatgagtgttacaggtaggctcggtgcttcaaaggatttctgcctatctcttcacagagtagctgggctattgagggactgtgtattgacaattgtagtgggcaccctatgtggaaaacaggtgttgtcaaataactgcaactgaccccaaccacaccatgacttttcaggttttaggtaggggatgggtgggaaaacagatgaggcaacagaatgaattattccttaataagatccagattaccgagtgataataagatttgcatgaatacttcaaacaacaacagtgattaaatacgtttttctagttaaaaaattaatgagtgctttccagcaagcgcttaaagaattaatactggccgggaacggtggctcacgcctgtaatcccaacactttgggaggctgaggtgggtggatcacgaggtcaggaggtcaagaccatcctggctaacatggtgaaaccccgtctctactaaaaatacaaaaacaagattagtggggcgtggtggcgggcacctgtaggcccagctacttgggaggctgaggcaggagaatggcgtgaacccgggaggtggagcttgcagtgagccgagattgcaccactgcactccagcctgggcaggagacagagtaagactccatctcagaaaaaaaaaaaaagaattaatatcaattttccacaaactcttttaaaaaaacagaagaggaggaaacactttccatctgacactgtgaagccactattactctgacaacagaggcagacaaagatatcacaagaaaaggaaactttaggtcactttcacttataaatagagatgcaacaattttgtacaaaatgctagcaagccaaatgcagccacatatacaaagaattgtatattatgactaagtggaatttatccaaacaattcacggttggttttatattaaaaaatcagtcaatataatataacataatagtagaataaaagatcctctcaatacatacataaaaacatgttttaaaaaggtccagcacgctttcttgatgaaaacttttagtaaacttggaacaaagtggcattttctcaactcaataaagggcatctgcaaaaaacccacaaatgacatcataattaatgctgaaagattgagtaccgtccccttaggatcaagaaataagacaaggatattcactctcatcactttaatattctactagaaatcctagctagggaaattgggcaaaaaacaaaaaagcaaaagaatggaaaaaaaagatccagattgaaaagaagtaaaactatctttatttgcaaatgaaatcaccttatctgtagaaaatcctagaaaggtacttaaaaaatattaaaatgaacaggttcagccaggataaaagtaggataaaagtttaatatgcgtaagtcaattgtatttctatatactagcaatgaaggcatcccatgttcatgtatcagaagatttaatattgtatagctgaccaaactctgcaaattgtgtacaaatttagtgcaatctctattaaaatttcagttgacttttttacagaaattgaaaagctgatcctacattttgtatatgaatgcaaaggaacctgaataaccaaaacaagcttgaaaaagaagagtgttggagggcttccatttctcaatttcaaaactttctataaatccttagtaataaagacagtgtcatattggcataagaatagatctatagataataaaatagacttgagagtccagaaatgaatccatgcatattgtgaattgattttcagcaaggatgccaagacaattcaaaatagtcttttcaacagtgatgctagaaccactggatagccccatgcaaaagaatgagattagatcacacttgcataaactacacagcaaaaaatagcaaaaaaaaaaaaaaaaaaaaaaaaagggtcagagacttaaatgtaagagctaaaactatacaactcttagaagcaaacataggggtatatttttctgattttggcttagacaatgatttcttggatacaaccctgacagcacaagtgacaaaagaaaaaaagatatccagaatgatccagaatgaaaagtgtttgtgctgcaaatgataccatcacgaaagtgtacagatgacctacagaatgggggaaatacttacaaattaaatattaaataagggatttgtatctagaataaagaacttttacaattcaataatgaaaactcatttaaaaaatgagcataagatctaaatagatattcctccaaatatgatacacaaattgccaatgaatacataaaagatgttcaatctcattagggaaatgcaaatgaaagccacaatgagattccacttattgctaggatggctaaaataaaaaagtcagataacaaatacttacaaacacatggagagatgaaagttcaaatacagtcctggcggaaatgtaaaattgtatggccaaactggaaaacagtttggccattattcaaaaagttaaacattgaattaccatatgacccaataatcccactcctagatgtatcttgaagagaaatgaaaacatgcatttccatagcatcttacaaatgaatgtacatagtagtgatattcctaatagccaataaatggaaacaatccaaatatccatcattggtgaatggataaacaaagcgtggtatattcatataatggaatattatttgcccattaaaaagaaatggattactgatatatgctacaacatggatgaaccctgcaaacatcatgccaagggacagaagccagtcacaaaagactacgtattgtatggttccatttagtatataaaatgtccggaataggcgaatctataggacagaaagtacactgatggtgttttgggaataagagtgtaggtagatagagggtggctagtgattgctaatttttttttttttttttgagttaaaaaagtgctataaaattagaatgtagttatggttgtacaattatttgagtatactaaaacagctgtacagtatacataggtagattttatggtatgtgcattatatttcagtaaagttctttaataaattagctaatgcttattgtagaaaagttggaaaataccaaaaaccataaacaggaaataggaaaaaaagtaatcctgactgtatatctggaaatcttttcgtggggtatggggtatgaatcacacatattaattttaatttcctgctttttcaattaaattgagaaagtttgggaacctctggcttaatcattatttatccacttctctgttgttggatgttagattgcttctagttcatatgtaattttataattttagttgacatgtcattatggattcttgggcataaacgtttatatgaattttgaatattaggaaataatcttggaagctatattagttttctaaagctattataacaaattaccacagatggagtgcctcaaaacaacagaattttactctcttacagtttcagagaccaaacatctgaaatcaagtggtttgcagcgttggctccttctggaggctggaaggagcatctgttccatgcctttctcctagcttcccatgactgccagccacccttggaatttcttggcttttatcttagtcagtctaatctctgcctctgtctttccatctccttctctgtgggtgttccttctccccttctgttttgtaaggataggcctgtcattggatttaaggcccaccttaatccaagatgatctcattttaagatgtgggacttaatcacatttgcgaagaccctttttccaaataaggtcgcattcacagatccctaccattcaactcactatggaagcaatgggatgggaggtaccattcaactcacagattcctaccattcaacccactataaagcagtggcatatgaaaaggatgggaggttgctatgggaatggtctgccccagatgcaggtaaaatggggaagcattttatatagaatggaaaaacaacagtaaagctggctaaaacttgatctgctttttacagtcatgtgctgacaattctaaacattatcaatgataaaatacttctccctcatgatattaactgtgcaatttttgctgcccctgctacatacatgctttattgcttggaaacaggattacttggtgaaataatgtgaatctttcaattctcatgatacatgttttcaacttaatatccagggtgcaggaatatatattcccaccaactttatacaagataatacaaatataatagtatgaataaatatgctaatttgatagaaaatattttaatatttactactagtgtagttggacgtgttaaatattgcaatggttatttgtaatctacctttataaaatttctaatgtctgccactgtttctgttagactcttaagaagatacgtgtttgtctcatagatttgtaagaactctttatatactaaaaatatggggcttctatatgattgcatatattcgtcacttttgttccactgttttagagagcagaagattttaatttctataaagatttttatgtttccctttattgcatgccaatgtttgttttttaaaaacttgtacgtcttaggctgcgatgtgaaaagtgtcttttttttgatttggaaacagagtcttgctctgatgcctgtagtggtatgatcatagctcattgcagcccttgaactcctgggctcaagtaatcctcctatctcagcctccgaagtagctgggactacagccacacaccaccacacctggctcactttcgggtggttgttgttgagatggggtcttgctgtgttgctcaggctggttttgaatactgggctcaagtgattatcctgccttagcctcccaaagtgctggaatttcagaggtgagccactgtgcccagcctcctgttttttttacatgtatatatatatatatatatatacacacacacacacacatatatatatacacacacacatatatatatacacacacatatatatacacatatatacacatatatatacacacatatatatatacacacacacatatatatacacacacatatatatacacacacatatatatatatacatatacacacacacacacacacacacacacacacacacacacacatatattttttttttcttttagatggagtgtctctctgttgcccaggctggggtgcagtgacatgatctctgctcactacaacctctgcctcctgggttcaagtgattctcctgccttagcctcccaagtagctgggattacaggcgtgtgccaccacgctgggctaacttttgtatttttagtagagatgggggtttcaccatgttggtcaggctggtcttgaacttctgacctcgtgatttgcctgcctcagcctcccaaagtgctgagattacaggcgtgagccgccatgcctgcccttatttttatatatcttccataacctttctatctctttctttctctttctctgtttctgtgtgtgtctgtgtctgataataaaatacattaaattttattttataacataaatgttttataaggtcggtagatttgtttatgattttaatggctgcatagtattctatcatatggatatattctaaatgtaataattcctcaatggtatatttagtttactttatatttgctgctttagtttgtcacaaacaccgtggatagccttgtatatatttattttgttgtatagttcttattggtacagtatgatttttcacaagtatacaattactttctgagaatttagctttttgattcacgtgaaagccttacttgtattgttaacaattttgttacgtttgtgaggcctaggcagaaggattgcttgagaccaggaactcaagaccaccttgaccaccttgggcaacatagggggagcccatctctacaaaaataaaaaataagaaataaaatagccatgcatggtggtgtgcccctgtagtcccagttactcgggaggctaaggtggaaggatcgtctgagcctgggagtttgagactgcagtgagttatgaccacaccactgcactccagcctggatgacagagaaagatcttgtcaaaaaaaaaaaaaaaattaaatatatacaaaataagggagaatactatgacaggcttccacttacctatctttaggcttctttataaaatgttcatttaatctgatctctataagaaattctgtatccttaaacaacatgtgcccttctctttacacagagcgattacccccttgctatgttttattaacagctagcaagtgctgggtcctgtgtcagttgttttgttttttctttttctttgtttttcttttcttttcttttcttttttttttttgttttttttttttttggagatagagtcttgctctgttggtcaggctggagtgcagtggcatgatcttagctcactgcaacctctgcctcctgggttcaagtgattctccggcctcagcctcctgagtaactgggattacagacatataccaccacacctggctaattttttttgtgttttgacagagatggggtttcaccatgttggtcaggctggtctcaaactcctgacctaaaatggtccacctgccttggcctcccaaagtgctgggattacaggcgtgagcccccgcgcctggccctgtgtcagcctttttaacagcataatttttcctttattagtcataactactttaagggctattttgatttacagacaaagtgagacttggatgaattaagaaagaattaatcaggtggttgaacctgagttccaactagggtgacaactcttcgcagattgcctgctgctgtcctggttttcacactgaaagttccgtatcctaataagcctctcatcctcagcaacggaggacagttgcccactcaaagccttgtgacattctagggtatcctatttctacatggtgggaatctagaagacggagaaagaatttctcattcccgaaggagcatggattatccttggttgtagtgtttatgtccacatcacgtggattcccgaaggagcatggattatccttggttgtagtgtttatgtccacatcacatgggatattttatttttcaggcctcttcatgtgcttgtgtgcaacgcagcaacttttgctctaccctggagtctcaccaaagatggcctggagaccacctttcaagtgaatcatctggggcacttctaccttgtccagctcctccaggatgttttgtgccgctcagctcctgcccgtgtcattgtggtctcctcagagtcccatcggtgggtttgaattgcatatttgttcacttatcccctttctcataccagctaatattcccccaaggctctcattctgaaaataattttcattagtcctgcttgagacatgtgggtggactcagcttggctcacttaatttttccaggtcttttttgttcgcctgtgattgtgggggactgtttagaaggactttctagagcaaggaagattgtttttacgactatacttcaagctcctcattgattttgcttagagatggaataataattgatgaaatctgaatggcatgacctttattgatttgtaattcaacaacttcaacatcttaccaagaagaatgtgcagttattctagcaggagaaacaatgcaattagagcctgcgagatgaaatcaaattgttttataatgagaaattagggaattcgaggcagacattagctgtgtaattgtggaaagggaagaactgtagttagagcatattagaaatctggccgtgcctcttttggttaaaatttcaattaaaacatcagatggcacttttttcctattgccattaggagaatattcaattgactgaaaaggacatttgaaaatttcctcgtattttcagcatatttgtttctagagttggagaaacaactatttgtctagagagaagtactctgaaaagacaaaggccttgctgggtgaggctggatttaatacatgttagggagatttctctttcacgtttgcttggtgtgtgtttggcggggggaacttacactcttagcaaagtagctagaaaaaaaaataacgtgcaaggggcctattttttcctccttcttctccgtcttaagtcctgaaatgttttagtgacccagaatgaagcttatttttttaatcatacttccataaaatgtaacccctgggacttggaagagagagaccagccaagggttagcttgaaccctttatcactcccaaacacaggggcttatggtataagtgacacactgcagatagatttacttttgccattttaaatttatgatggctgaaatgaaaggtaaatgccagtaataatcctcccccgtgttaaaagacatgaaacatctagtaattaggtggtaacaaaatctggacagccttatctttgcaaatcacaccaggtttgtgaaggaaagtggagtggccctgttaaggggcgagggaggctactgtgggggcaggcagcagagagagctccagaaataaatctgccagccccagtcatccaccagatgtggagggcaccacgggatatgtttaaatgagctggtatttaatgggagattatgtcgaattgtcagctgctcactctccttgtaaatctgtatctcaaatggtatttcgtgtgacgtctttgttctttgcttaactacggtgtaattcatgcctacttcagagatccaaatctcagcatcatttaaaagattagtttgaaaggaagggacttgggctcttgaattagacctatgttagtttatagggaggccttcctgaaatgtgttgtcaggcttgctcctgtgtgatggctggcactggttttatgctttccaattattctttgcacatcgttatttattattactgttattattatttgacatggagtcttgatctgttaccaggctgcagtgcagtggcatgatctcggctcaccacaacttcagactcccagggttaagcgattctcctgcctcagccttccaagtagctgggaccacaggcgcttgccaccacacctggctaatttttgtatttttagtagagacggggtttcaccatgttggccaggatggtctcgatctcttgaccttgtgatccgcctgccttggcttctcacagtgctgtgattacaggcgtgagccaccacgcccggcctctttgcacattatttaagggtgttttaacaaaatggcaatttccccaggctggcttgtgtattaccttcgcattgcatcccttggctcccatgagtgagcgtggtgacttggtgcgtaggtggtacgtgaagacagttgctcactacccaagaactcagggccctaaaccatgctgtaaaatgcaagtgctgatatctaattacctccatcaaccttggcagaatctcttcgttggagttaagaccccctgttaggggaaaaaagaaagtcctatgtttgcagaaaatattatactagactgctccaaggcaaaatatttattagccttcctgtgtcttcactgtgttttagttacttatctggaatctgagcaactgaattgagtttctgcatacctaaaatacatcatagtgaaatgagaagttgacttctttgctgtgaaaaaatttcagataacaattaaagtagaatgaaaagagcagagtgctggttgaacaaccctcaatggctgcagctgcatggagtgccaaattgccctcccccaccccacacacaaaatcacacatacacgcacgcacgcacacacacacacacggagtttctcagcttctgtgtagacagaatccagcctaattattttaggcgggaattttaaaaatcctcaataaaattgggcttggtagcacatgcctgtaatcctatctagtaagaggctgaggtgggaggatggcttgagcccaggagtttgaggttgcggtaagcgttgatcatgccactgcattccagcctgggtgacagagtgagaccccatctctaaaataaaaattaaaaattgtttaaaaaaaatgcagtataggccaggcacagtgtctcacgcctgtaatcccagcactcaagagttcgagatcagcctagccagcatggcgaaaccccatctctactaaaaatacaaaaattagccaggtgtggtggtgcacgcctgtaatcccagctatttgggaggctgaggcaggagaattgcttgaacttgggaggtggagattgcagtgagtggagattgcaccagtgcactccagcctgggtgacagagcaagaccctgtttcagaaaacaaaaacccaaaaagcaaaacccccacagtatatatagaaatacaagatttgtgaggggcgggggtccccctacaaagcaagtgttactgtccacagagcaaatgtcaatattttaatgtactagtaagggaaaattctattaagacataattgtttggctttgtcagtttgtcaacttgaaaatagagtcagcagcatctaaagagttgttttactacctctggagctgagaggtgaacatagtcgtttttcaggaagccgtttctggctcagacagataagaagctggcccacccttgccacttcctggaggactgtcagtgctagctaatgagactgtaaaagtggactatctgcccaggagacagtgaggaaggaaatcaggggtcacccttacagggaagggctctttgcagagagagtgcctgatacgtagcagctggtacttctccatcttgaaactgtccttcctggttttgtctaatttgtcatcatgggattcttttgacttgtttctagattagggatcaagaagaaatgactttctcctcttagacatttaattcacttagtgttccctagtcatgacatacttctgtgttatccttaaatactgaaacagggaccttattcttaacagtagaaaatcactgtgtatgatgatagtgtatacctgtaataccagctactcaggaagctgaggcaggaggatcccttgagctcaggagttgagattagcatgggcaacaaagcaagaccttgtctctaaaagaataagcagaaaccaaaagccctaaacatgaggaaattccacatgtaaacattaatggaaaacatagaagagttgaacctagtggtaaattttacctttagagcaatgcttgaaacaagggaaactgtcaaattctcatcatgggatttgtgttcctttgttttttttattaaggacttggtccttggattggaattccaaacccatgaccaaactgtaatcatctaattctgtattgagtccttactatgtgtcaggcactgtagtaagcaacactcaagaatcttacagtctactttccaagaattcacagtctagttttggaatcaggtgatcaattgacttacagtctggtatggtgatgacagaggagcaatgtacagatagaacagaaggatggcacagtgagccttttcaccaatcttggaaggccagtaatgtcagtgaacactaggaatggtgtcatggcctgggtcctgaagagtggatacttaatgtccatggaggcatgcatttttatctgccttgcatggcttctttcattctctccctgacttccacccaaaaaatcaccatgatatccagctgtggaagagttcattatggagagcttcctggaagaagtagtccctgaactgggttgggctaaacaaatatgccaagaagggtttctggaagcagttgacaaaagatgagtagagagagggagggggtggtgctatatttattccatacctttcagatactctctaaatccttgtccctgttgtctatgccatgtaggtagagttttcaagtcatgtcccataccttggatcattggattctcaactcagtagcacctttgtgtgacacctcttctgtaataccttattatgttgaaataaagttagcaaataacataacttacatgcacaaatatattttcaattcgatatgatagctttactgtaatgaaagaaaaaataactgaaacaaaatggcgtgtgtttcaacatgtaaatgcttgggccaggctacaggaaagatggggatgtatgtatccgtggatgaatcaccttgaatggactctcataaaaaagcccaccattaccaggtgtgtggtattgcagactccagcaccaccaaccttgagtgaagcctgactatattagtctgttctcatgctgctaagaaagacatacccgagaccgggtaatttataaaggaaacaggtttaatgggctcacagttacacatggctggggaggcctcacaatcatggcggaagatgaaggaagggcaaagggatgtcttacatgacatcaggcaacagagtatgtgcaggggaattctcatttataaaaccatcagatttcgtgagacttattcactaccatgagaacagtatgggagaaagcacccccatgattcacttatctccacctggctctgcccttgacacatgggggttattacaattcagtgtgagatttgggtggggacacagccgaaccgtatcagtcaccctccaaaaatcacacaaaatctgaaagtgcttttattcattctacatgtaaatagttgttgcactacccacctggaaattcagtggatgtttctaggctcagataattatccacaggcttttcatctccatgagtgtccactggggcattcttcattgagcaatacatcatgtgcattgcaagacatctgccatccctgctaccatcaccagcagtcatcacgacaaccagaagaaggccgtcatatattttcaaattgcctgctgagttccattgccttagacaattaagcttggaagtcagactcttcctgtggtttgggtactagaaaaaaggcagccaacaattcgtttcaaggtctcatttctgtatccttgatgacgtttctggccatcagctttgttgatgactttagagcagctatgtcatttaacactagaaattggatgtcaccgagtcctgtggaagggatatttaatttccattaaaacatgaatttcattctgcccttgccatgcttttcttggtcttagcccaacctgagctgctgatattaaggaataataggataattccataattttcattttaccttttgctttttgttttccatagcagttatctagaggattcccattatgcttcttcattacccggtgcccagaatgaacttatagaagcagaatatgaggggtcctttgacaaacatgagactgtttagaaaattccttttgtttgctgtgatccattttgtaagggaagtcactataatgttgttatttaagagaaagagacaaacggaaagaaacaaacagctggtgtttaacgactccgtcagacccaattataaagcatcaactagttacgttgatttgtgtacatccatgccatgggtatacttaaaaacattagattttgccagaactcatcttggctttgtttacatttttcttttaaacgtataagactattgatggtacctcaccaaggttataacccctttataatcattaatttttaatctagaaaagagtcttggagacaacaagactcatctataatttcttggatgctcaaatgaaaatatacaggactcaagcattagctaaaataatccaggaaagccctgtcaaaggttaggaatgtgatatctttctgtttccaaaagcagcagccctttattcaagacacttttctgtttaatttaattatctttgaacttcctgttgaaggttttgaaaaatatatgttagagggtggggagagagttcagtatgtcaggactgctacatttatgagtgtgggtctttattgaagtctctctttgtagccaatcctttttttttttttaatttttaaattttaaattcttacttttagatatgggggtctcactctgttgcccaggctagagttcagtggcacaatcatagctcactgcaacgttgacctcccaggctgaagcgatcctcctgcctcagccccccaagtagctgggaccacaggcatgtgccaaaatactcaactaattgtttattttttgtagacatggtgtctccctatgttgcctaagctggtcttgaactcctacactcaagcaatcctcccgcctcagcttcctaaagtgctgggattagaggcatgagccaccagacatgacctgtgtttatattgttaaatcaccattgtcaatcttgaaaggagactttgttttgatgtatgtaagattgagtttttactcatctctacatagtttcctcagattgcttttttttttttttgagaccgagtctagctctgtcacccaggctggagtgcagtggcacaatctttgctcactgcaacctctgcctcccatgtttcagtgattctcttgcttcagattcccgtgtacaggcatgccaccacacctggctaatttttgtatttttagtagagatggcattttgccatgttggccaggctggtcttgaactcccgacctcaggtgatccactcgtctaagactcccaaagtgctcggattacagatgtgagccactgcacccagcattccttagatttccaataaaaataaaaagctgtgtgggaagtcagaacttggttgcttcatgtcatatttcctatttttaagatttacagatattaacgactccttgggaaaactggacttcagtcgcctctctccaacaaaaaacgactattgggcgatgctggcttataacaggtccaagctctgcaacatcctcttctccaacgagctgcaccgtcgcctctccccacgcggggtcacgtcgaacgcagtgcatcctggaaatatgatgtactccaacattcatcgcagctggtgggtgtacacactgctgtttaccttggcgaggcctttcaccaagtccatggtaagagaacagcttctggcgccgcaaacaccttgggtcctagagaaacctgcacacttgtgtctccacctttttacctcttgcgggcatgagtctggtctcagtaataacattgtccagcccatcataaagggctcttgaacacattttcatcaactttaggttaagtctgtttgggtaaatgcgtcttggagggctgggtagaagatgtgggtttcagtatcatgttaagtatggctgaaagtccttatggaaatggtgatttttttgtttgtttggttttgttttttttggggttttttattcagaaactttgaaaatctattttgttgaatggagcacttgaaaactgctgttttgtgtcagtaggtaaacaacaaacattggtgactactgaattttcagcagatgtgattcctttgtttcacagaaaaactgtatcttttgttctaaatttttttcttctaatgggtataatcctctgttggagagtcctttgatagctaggagtgtgttttcttctttactttcccaaagacaattttggatgaatcatggtactgtggttacatttggaagtgtttacaaaggtgataagatgtttttatagtttggtgttcatttatcgaccatattaagaaccttcttctatgaaatggttttagtaggaagtattttgaatgaagaaagcgtattttccacaatatatttggtagattatttttcaaaaccaaaggacttcaaaaatgtcttcctattagtggacaccagtattccagttacccaaacttaaaatctacttgacagaaatcacccttttcccaaacacatttgccttttagcgatatcacaggccttcacagttggacctaggatattaataaaacaaagcaaaacaacaacaaaagaagaactattgcaggcctattatcctccagctgatctcacgaccttggaaactgtctgctgccttctcttacactcattcccacctgccacccttaaccttcgtatttggggatgacttttttttttttttttttttttttttttttgagacggagtctcgctctgtcgcccaggctggagtgcagtggcgggatctcggctcactgcaagctccgcctcccgggttcacgccattctcctgcctcagcctcccaagtagctgggactacaggcgcccaccactatgcccggctaattttttgtatttttagtagagacggggtttcaccgttttagccgggatggtctcaatctcctgacctcgtgatccgcccgcctcggcctcccaaagtgctgggattacaggcgtgagccaccgcgcccggcctggggatgacttttaaaaccacatcaaaagtcttttgaagtgcttaggaggaggtaagtaagtatatcttttattctaatcacccaagtggtttttaggcagagtaaacagacatattccaagagtcgaatacttaggatcagtggcagtgaagtgaaaggacctacggagaatggtgttccatgccgcagggtgggattgatctctaggaagtaaatgaatgaaacttacctgtaggtggatcacagggttttgaaatctccccatcactttgctcccgatgactgcataagcgcagcctcttcatgaaagtttctttgaccatggttatgcctcatactttgttgtgtccttcagtttacatgaaaagaaggaatatggatctgaactgggtgccagtgccatttaaatgaggcatttaggaatggggagaggagagaggtggattcttccttattttctgctggcccagtgccttccgctttaacaagcccagtcaaccatcatttgtaatctttgggtcttgagtcatctcacttgtatttgatcattgatgtgttttaaggagctcggttcagtggcatcagagagttcgttttctccttcttccataaggtccctaatcagaggaacgggatgggaaagctttagagatgagtctgtgactatggaatttggtgaggggtgatataaccatcctgccatttgttgtagactcgaatggatgaggagtcattgatagaaaatagtggaaactgttattctgtggcctgatcccattgcttagggactctgtgccagggcatgtgggaaaagaaggaaggcaagttctgctaaaatataaagtcagggtaaacatttttatttattggagaagagttgattattatctaatatttaatataatatgcttaataaagtcagacttgaaagttggctggttggacctaacgggagtatctctaaaaaataccagcaaattaagttggatcggtgactgtatcatgatatcggagtgttagctgttttgggagtacgtgtgctcaggacttgggctgagtggaaaaccagagtatggggttagaaatggaggcagagggactaccatgtcggggaggatgcacaatgaattggacgaaggttgcaactcagtgagcaccgtacctgtagtgtgtcttagtaatagcagatgcccaacctccatgcctaactcctttgcctaccccaccagtgtgcagcagcctctgccgcaccctactgcagtctctcctatttccctggcaggagagctcagagactacttgtgaacaggcctcaatgcctatagcaaggcaaggcttgggagaaacaaatgtcctctgggagcagccttgggtaaaagattaactgcgcactgagctttagatccctgagtgagaaagctgtgggaaaatgagtgtgtagctcatgagagggtttggagaaaagtggtgacatcgcaaaaatcccaggttttgttgaagttgtctgtggaggggcactcatagaaagggcactggacgtgagcatttcccttgtagttgagatgggatttgacatgacttcctggtggtggcaagacaagaaagtggcaacctgggacagtggacctcacagctctcctgctaatggtgctgatggctaagctcagctcttacccttgaccactggaacaacttagacatgtcaccagctttctgagcctgtctcattacgatgaaaattgtgatacaggttagtgtaaggaccgacaataatgcatataacatcaataatgatggatatagaatttctgcagttattataatctggctctccagtatggtagtcgtgggccacatgtggctattgagttctaaaaatgtggctaatagaactgaggaagtgaattttcaatttgattccatgtttgttaattcgaactgaaaaacaccacgtgtgccaagtggctgccatactggagagcgtggtcaaatgacatgcctagctcagtgcctttcgcatgggaggtatgcagtacttcctgccacgatggctgttactcttgtcgttgtgagcagtgccttggtcccgatgatgattctccaaaatgtaatctctgctgacagaacaagagtctgcaaattgggagtctggaaagggaagagaagggctttgtccctggccccaaagactcagggagaggtttactggccaggtagaaagggcgtccaggtgaagggaccctggttcagtgatctccaacctgcacgtctcatttgtgaggaagccgtagggtgtggacttttcttgtttctgaccttgagtgattagaaaatagcagcttttatatgtcacaaatggactttagataagcatgaagatgacgaagactgtggaatatgtagctaagagtcttactaaaatcctctctagtgtatttatatatttaagcgtttggtagtacttttttagccatcagcgttctctatattaggttgatacagaagttattgaggtttttgccattgaaagtaatacgtcacttcatgcagaggtggaattggcgctctgagcttgcttgtcaaattcacaggcattcacttttctttcataaacatttaggactctgtatttaggagaggaatcactgtgaatgtagacctcgggttggtcattttcctagtaagatagaccagactgactggaaaagtcaccctcttgggctatcctgcgtatgtggctcggcattgcttccgtcaggataatgcatcagtttcttggacaaagggtgcatttctgctatttgaatgcagacatatttttggatataagccacgcagttgcatcccatttcttccgtaggtaaaggctgggtttctaattgtgattgagaagcttagcatagatgcaatgtccctatcaccagatggctagtgtgctctgccttgtctgccttttaccttagagagggtgcttccttctgacacgggtattgctggagtacacattctgttgcatgaggtcaggggagcaagaaatacaacccagacttgcgctcggaagccctgccttcatttcttctctgtagctggctcccttaagtattaaacagcagtattctaatatcaacgtcccttttttatttgctgtgacttgctgtgactacggtgattttagttacagtaattaggtcactcttcatggagtcgggctattttaagtgcctctttaaggaatattgttgcagatcagtaattttacaattggatgttcttgtgcaactttattaaatgtgatctgtcttttaaatgttgcccttttacagttacacatttctaattgttgctgtaaatgcattatcactttgaaattaattaatttttccattttggctgcctgcaatataataatcactaatgagaaactcacaggaatcaattctcagcacagcggcccctactggtaaagccatgtctctgcctccctcttcttcttcagatccagagaactggacaagtgtattggggcgtcctgggagggaagtgtttgtttcttcctcccttcaatttatggtgaaataaaaatcacagataaacttggaaagtgagttatttttaagtgtcgttctaaaaaagatgcaatatacttcaaatagctgcttctaaaatatgttaaaggaaactaacatttgctgagtactttctaataatgaagtcacatcatacgtgcattacatgtttattttcttgactctagagcattcttttatgcagttaaattactctaaaatgttttgcacctgcacgcattaatgtgtattgtttggtaagaactttcgagttggtgaaaaaatgtattgtattttagtatctatatttatatatacatattagtctatgggttttaattcacaaaaccaggtgttgtatctggtgcacataagggattttcaaggctaatcttgggtttttgcagttgtaaccatgtgtgatgactttagaatcctaccacacttccaaatagagatgcagattgaccattttcccagataccacgatgctttatgtatcagcatatattttcattaatttctcataatttctgttagaattaataattccaagttctacaatcttagaattattatctttattttgtaattgaaaagcacagaaacctcatgcagcgtgttcaagaaaatgatataccagccttgtaaactttcacttgctaattgcagctgcatttgctttgtccaatgcacggtaatgcccctggcatccatatctagttatgcagttatgcttcctttttaaaatgtttgacagcaccttcactgaaatgaatgctgccaccaccgccaaccccaccttttttttttccacataagctttcatttctggtaaatacatccttgccagagttcccaggtccaagccggtcctttgtggaccagtatgcagatttgaagttgagcactgtcacttgcctcttaggagtgttttgtgcaaccacatatttgtgttggcagataacagtagaaagaatatcatgtgttagggtagcaagagcttagcagatgttttagggaactgcattttcaaatcattttacattaaaaaatggcttacgtttatggaacttctgcgacgatcgggttacgtttcctgtgcccgtgtaaagccagtcatcgtgctgagttttaacggatgtgcagctaccctgctaatggatgggccggcaatgctggtcctgttgcaaagttataaattataactagaaaaagcacaagatgtcattcttctaaccttcgtgaaagccaaacggggtaattctgcccttgaataacccgctgcagggtgatttatagttgtacaatttaaaacgtaatgaaggagataatagatgttgatttgttcctgaaattagtattttagaaaaatacttctccccctttccatctttaaatacctgcagctgactacactatagatactatcaagggcaaagccccctgtttgaatgtgtattggtacattggtgtatcacatacaaggcagagggtgtataaaacaggctttctgttgcgagggggaaatatggttttcaaagtggaaatttcattgtattcttcatgaatctaaacattttgagactcctgagtgaggtttgaattttctggttgcctttctcttgccagtccagatatgttagaaaactggactctcaggacccctctgtggttggaccacactggcgctttcctgcagttgtctgtcaacagaaggacctggtagctggcttgtcctcttacaccactgaggccaccttcttgcaggaagaaacatacttcttcctgccctggattaacattaccattggttttagtagtcttacgtcattatgtccaaagcttttaagtttacagtgcttgcttagtccagtgaccaatggatgtaagtaagttggaaaagggcaaaggatttagaatcatgagggttgtattcaaactgcagcctctactcccttttagttacataattttgaaatcatttgacatttctgaggttaattttctacatcagtttagctgctttaggccgcaagttattaacacccacttaaaggtggctgaaataatagaggttttgcttcccatgtatccagagttgctgaggcagcaagggttgtgtttggctactatatgagtagctcctttgtgataatctttacttttccctcatgcttacaagatggcttctgtggtgccagccattgcatcctatttgataaggtctgaaggcacagatgggagggatgaggctcctcattgcatgcctttttcctttatcaagagacagagcattctgcttcagaactgtcctcctgagttgacttcccgtcagatcccactggttgggactgagtcatctgtttgtatcctagttataaaggagactagaaaagtgcataactggctttttgagcctctagagtggcaggcgaactctgattttgaggaaaaaggatagggtaatggtgttgacacaggcactgttgaatacgtatgtacatattttaatagttttctcattaatcaaatggaaatgctatcgattttataggatcgttgtgagaagaagtgagaattgaaatgaaaggcatctagtcttccccggtccccatccacttgacccaccatacctcaagccacttctggctccatgctctttctttccttagggttttgaaacatgttcttcagcctagaatactcctcctccactcttaatttctacccatcctgcaaaactcagtctgaacagcacacgtcaaggaagcagttttggtctctcagattatatgaagctctccaatatgttctttcagaacagccagtgcctagaatactgcctgactcgtagtagcactccttatgtgttgaatgagtaaatgaagagtccctggaatttcttcttcataacattgaacacaactgcagtttgaaaacataatttctgtagttttttttttttctttttttttgagacggagtgtctctccgttgcccggattggagtgtagtggcacaatcccggctcactgcaacctccgcgcctccccagttcaagcaattctcctgcctcagcctcccaagtagctgggattacaagcactggccaccaaacccagctaatttatatatttttagtagaagcggggtttcaacatgttggccaggctggtctcaaactcctgacctcaggtgatccacctgccttggccttccaaagtgtggtgggattccaggcatgagccactgtgcctggcctgtagtttctttttcttttttcttttcttttcttttttttgagatgaagtcttgctctgtcacctaggctggaatgcagtggtgcaatcttggctcactgcagcctccgcctcccaggttcaagcgattctcctgtgtcagcctcctgagtagctgagattacaggtgtgcaccaccacgcacggctgatgtttgtatttttagtagagacgggatttcaacatgttggccaagctcgtctcaaacctgcctcagcctcccaaagtgctgggattacagatgtgagccactgcacccagcctgtagtttcttatttaatgtctgtccccccttctcttgacagtggtgtttttgccttcacactactgtatccctggtccataccgtaaatgttctgtaaatgtttgtaaatgaatacatgaaagatgaccaggtgctgaatcagtgagagtccttaatgtacttcttatcatttatccctctgaggtaggcaagggattatagtttagaatgtgtaaatacgtaaaagataaggcaaggagacctgctgagagtcacacagcaagcccccaaggtcccccaggctcatggtcaaatgacatgtaagggacgtatccagcggtgtgggtatgtttggagggaatgaatgtaaggagagagaggtgaggcacaggagagacaggatgagctttagaggtagacagctctcgggtccagccctagctctctcccattctaactcttgggcaaggttcaaaacctgattaagattcatgcataaaactgagatgttagaactacctcatgggcttgtcttgagaattaaagacgttatgaacttaaggcctctacagtgtgctagatgcttaagaaatgttaactactattgttattggcttgcagtagaaattaaagattatgaatgttcagcattcagaatatactagatactcaataaccattattgctgtcattattaacattattttccccagctttactgaggtatgagtgacaaaaatttcatatatgcgcatgagtgtgtgtgtgtgtgtgtgtgtgtgtgtgtggctgggcatggtggctcttgcctataatcctaacagttgaggaggccaagctgggaggatgacttgagcctgggagttggaggctgcagtgagctatgatggtgcccctgcactccatcctgggtgacatagtgagaccctatctctaaaggaaaaaaaaaattatatgtattcgtggtgtgaaatgtgatgttttgatattcatatgcattgtgaaatgactaccacaatcaagctaattaacacatcggtcaacttacatagctatcattttttgtgtgtggcaagaacattgaaagtctagtctcagcaattttcaagtatataatacgttattattattactatcgttaactgtattcaccatgctgtacaatagatctccagaatgtattcattctgtctaactgaaacttaggatcctttgaccactatctccccatttatcaccccctcccacttccccactaccagcccctcctgggaactgccctctactctctgcttctgtgagtttgactgctttaaattccacacaaaaagtgagatcatagagtatttgtctttctgcgcctggcttattttacgataaattgattgcttctcttcccattgtttatagatacccattctcgtaatgatggcactgtgtctgtcatagaaggcctaattctccctgttaacattgaacataaaaacctcatatgggccaggcacagtggctcatacctgaaatcccagcactttgggaggctgaggcggatgaatcacctgaggttgggagttcgagaccagcctggtcaacattgcgaaattctgtctctactaaaaagatacaaaaaaattggctggctggtcatggtggctcatgcctgtaatcccagcactttgggaggccgagccgggcgaatcacgaggtcaggagattgagaccatcctagctaacatggtgaaaccctgtctctaccaaaaatacaaaaaaattagccaggcgtggtggtggggcgcggtcgtgggtgcctgtagtcccagctactcaggaggctaaggcaggagaatggcgtgaacccgggaggtggaggttgcagtgagccaagatcgcaccactgcactccagcctgcgtgacagagcgagactccatctcaaaaaaaaaaaaaaaaaaaaaaggctgtgtgtggtgactcgtgtctattgtcccagctacttgggaggctgagacatgaaaatcacatgaacctgggaggtggaggttgcagtgagctgacatcgcatcactgcactccagcctgggtgacagagtgagactgaaaaacaaaaaaacaaaaaaaaacccaaaactatatgtgcaagcctcaggaaccactaagacagattacacaatgctcatcagaactcagcaggcttccacagtgcagattttaagccctccagttgcctgttttactggcaccaagaacacaccttagcttggaggaaacattggccactttcttgttaaaaacaaagagagggaaactagatctgcctttgtgaggctggagcacctcatcaatgtattttttctgccttgctttatagtgttttaaatccgcctcggcctttgttcctgaatgagcacccgagaaggggagaaagtgactatctggccttagtatgtgtaacaaattatttaatgaacatttaaccaagatttgcaattcccctagttttatcttcccggtttccttttcttctgtgtgcccgttggcattttggtaatgtgctgcctctttataactctttgtagctcttttattacttttcttttttcttttaagtttgtggtgccttctttgatcctcccctctttcagtttccttttctccaatttcatacttatttccagtgatttttggctgcaacgcagtttagatattggaggccagcgtgattaaaccgaggccaagagtttgtattgccccatgacgatgtttctggaatgtttcttctgtgaacagtgatttttgtataactcactggacatgttgatttttccctgtgaggtgtaaggtaatgttttcctagcaaaaacaaagagggctgaaacctggtgctcagaatcgtttggaaacggaactcctctccctcttctttttacaccaagataaagaaatactttgcaaatcagctgagcacatgttcccagctccgtgccgggctctgtggtcatgggtttccttctttatgtcttactcatctaatgtaattttagagtgtgttctctttagataattgtgtgtctctgagcaaatcacttatcctctctggtcctcagttttcttatctgtaaaatgaatcagttaaccaagaatagccatcccttgggttaatagaacagtttaacttgaaaggaaataaaaaaaggagactaacatgggcccacagacattgtatttcataaattttggatgaaaactgaacctaccatcatttattaagagaatggatattttcatgtcagaaattataggaaggatacagttatgggatgaggagcaattcttttttttttttttttgaggtggagtctcactctgtcaccaggctagagtgcagtggggcgatctcggctcactgcaaacctctgcctcccgggttcaagcaattctcctgcctcagactcccgagtagctaggactacaggcgcgtgccaccacacccggctaattttttgtattcttagtagagacgaggtttcacggtgttagccaggatggtctcgatctcctgacctcatgatccacccgcctcggcctcccaaagtgctggaattacaggcgtgagccaccgcacccggcctatgaggagcagttctttcaatggaatatatttgacttcagggagaactcactcaaatgctgctgttactgtttttccctttgttggaagtgatggggttgtacttggaatgactggcctagaaaaccctacaggtaccatttaagctccatagttcttctgtgtgtgtttcggatcccaggttccaaacctgcactaaaacttgttgctgcatctcacctaatcgtgtagtgagccaggtgagctcatctgtgaaatgcagacctttctggacgtaccacctcgtggggtgaagggaaagaaatgatacaggtgtacatcagggtataagctgtcctagagtctggattctttttatccagaagccattctttcagcctgtgcctttttgtaaataccataccccatctatttccacaaaggatttggggcattagcgagtaaagggggaatatgttctagaagaagggcgctcacctcagtaaattgatgggtgggccacaaaaatcatgtcacaagatcttgttgatgtgcatgcattcattcattcaacaaatattattgagcatctaacataagccgggtgctttgctagggacagaatgctgtacaaggtccctgtcctcatggggaccgtatgttgggaagacagatgataggcatggaaatgaagagacaaaccactccgacttcagcccaggaaggagctttaatttgagtaattgttttcactaattcatcttcacagaaagaaataatatgatcaccttcggttagtaaacaaaacaaataggcaaacaggtttacaggctgaggtgggctggatcacttgaggccgggagtttgaaaccagcctagctaacacggtgaaacccttctctactaaaaatacaaaaatattatctgggtgtggtggagctttcctgtagtcccagctactctagaggctgaagcatgagaatcacttgaacccaggaggtggaggttgccatgagcagagatcgtgccactgtactccagcctgggtgatggagcaaggctctgtcttggggcggggggcagggcaggggaggggggaaagaagagaaacagctttacttacgtttttgatgagcctagcctttgctgtgctttggaaaatgggctgtggaatttggctgaaatagtcaaatgcgtagctggctgtatgtggactgataactgggcttattttgcttcttttagatctggaaagactaagcgcaaaatagaaatgctaatggtattgatgtgtttttcttcctttggtgtgataaaaaggtatcagtagggatcattcataaaactagttagtaaactatcagtttaatgtacaatggtgaagaaatacatacatcatacttgagaccatgttccagagagtattttgtaacctgtgacgctcttttcaagtcttagagaggaagtatggaaagagcatgcgcttttgactgaggaggtcttgggtttaaaggtcgaattttgccacttactttctccatggccttggtcaacatcctgaagtctcaggtccttgtctgcctttgctttgacacgagatgttgcctgcctcaggcggttgttgcaaggactaaaatcaggaaggcctggaaagacttggaagcatttctgtcacatcccaggaactccgtaaatgccagcaagtgttagattattgtgatgattttactactcctattattgatattataattaatattataattgttcattattaccttataaaaattacttatgatatgtttttcttactatttggtgaacatcgagtatagtaccaagtgtatacttttttttttttttttttttttttgaggtggaatctcctgtctcccaggctggaatgcagtggcattttctcggctcactgcagcctccgcctcccaagttcaagccattctccagtctcagcctcctcagtggctgggattacaggcatgtgctactacccccggcaaacttttatatttttagtagagacagagttttgccatgttcaccaggctggacatgaacttctgacctcaagggatccacctaccttggcctcccaaagtgctgggatgacaggtgtgagccactgccaattatatacttattttaggtgtattatgctgtgccctgtgcttttctttgttatactggaaggtcatgatggcaggatgtcttatttatgcttctctgtactctgtcctgtccagtgcctttcagaagtaaggtttttagaaaggtttgagttatttcctgttttctgaaccagacaggcagagtatttgatcttacaaaaatctggctcagttcaagttagctgtgtagctttggaacggaccctggacagatggattttctaaaattacagaggaaactagatctgtaactctgtacatttactcctgtgccagtaacaatggcaatattttaatactgtaataaattttttcttatgcatttgctataaattagtaaatctgtgtaaagctgcttattgcatcatcatgtagaatttctacatcctgcagaagtttaagaaaattgtcttccttttacagacaaggacactgaagtttagaagtgctaagtaaactgtcttagatcacttagctagcaagtgacagggatggaattgaatctgtatttatcagaggtgaaagtatatgtgtaattattcaactacacttaggtaaatatccgcatacatgcatgcctccccttagactccattgttccaaaaggtaatgacaacaaaaattagtcggaggcggaaggaaatgcaaaagtggacatttactcgagaaagaataaagaaaccatgcaggattccatttcacaaacctctacagctgttgctggggagtcagtggaggggtactggaggaaggcagactttgttctaagctacttagcagccaaggaaagcagaagaaactattattattatttattattattatgtgagttggagtctccttgtgtcatccaggctgaagtgcagtggcatagtctctgctttctacaacgtccacctcctgggtttaatcgatcctcctgcctcagcctcccaagtagctgggattacaggcacccaccactacatccagctgacttttgtatttttagtggagacagggtttcaccatactggcccagctggtcttgaactcctgacctcaagtgatctgcctgcctcagcctcccgatgtgttgggattacaggtgtgaaccactgcttctggcctagaaactattattaatagaagttctgggacaacggccctgctctcattacttgcccccaatccatgcaatgaaatactggcctgtgagtatgtggtcccttcagctcattttctgaagctgaccaaaggagcacagtaatgcataacgggggagtaaaattcctcaagacgagcaaaaaaggcagaaattaataaaactctatgtattagttatctatcactgcataacaagttacctcaatatttagcaggttaatacaatgcacattcattattttatagcctttgtagattaggaaccagccattgcttagctggaccatctgctttagagtctcacaggctgcattcaaggtgtccactgggctggggtcaacttcttaccgacaaagctggtgccccaaaagaatggggtcttatcctgttgggtgtcatgaagccaacacacaaaaccgaaagtagtgtcaagcagtacaggctttattcaatggccatggaattgagaagcaggagcatggctcacaaattcacaaatcagcttctccactaatgaggggtgaggaagttaaaatatagactttgttgttgttgctgttttaatgaagaggctggacattaaaatcaaggggaggaataatcatgtcttctcttgaaatgggcagtgaacttcccggaaccagagtgttgccttcctttttatccttttatggctgcttctgatcattgtcatggtgattgtcaactgtcttggcgctggtgagggggctgtttagcatggaaataggattataatgacacctgaggtctttttgaagtccttgggtcggctatcttgcttctaacaaatctcagctggtctggttacagagggaactttttatcacaggtgtcctgtttcttaaagataagcagtgttattacagggtagaaattcacctatgtcaagtaggcattataccaggtaacaatctcaagactcagcagggaaggatccacttgcaagcccacgtgcttgctggtaggactcagttccttatggcccagtggattgaaggcttcctttcctgcctggtgtttggttccttgccacgtagggatctccatcatggctgctggctttatcgaagcatgtaagccaagaaggaaatagaatccattggtaaaatgaaagtcacagttctttgtaatgtaaccacggaagtgacgtcttactgcttttgccatattctttttgttagaaggaaatcactgagtctgatcgttgttaaaggggaaaggatttcacagtggtatgaatcctgagaggcaggggtgatcagggccagctaccacactctacaacttgaattttgttttagatttcagtgccttttggggaccctgctacattgtggtagatttactcacaggacttgatgatttttcttgacctgcctgaagccatagcatttattacggataagtttgtcttttcttcgttctttttctgtttgcatcctttcgtcatccttttcttccctctttctggactgagagaggcaccaaatgcacccatttaaaacatatatgcatttctgctttctgatgggaggtaagatttagtcatttaataagaaagcttatgaaaagaataaacaaactggtagataatgtatcctaaagtcaagtatttgctttcatgttgctttagtagaaggggcccttgttaatcgatggcccaaattgtctttctcaagaaatgtgtattgcagaatttggatttgagttacaaaaactagccagaaagcgtgaactttttttttttttaagccataaagcttggtaaggctagccaatcatttcaaagcctgtgtagaatatctagactatatgtaatcctaggatttgttgttgttttgttatgattttttttaagcaggaagctaaaaaaaataaccacccgttactttgctgcttttagaaaataggtttgagattgattttgaatactaaagtatagttttcatgttataaagccaaccatgttaaaaatgtataataaagtatctaatttagcaaaattcaaatttcccctatgaaatatcaagctctttttatgcttcttcacatggcaccttgtgtagaatttgaaccactttaaacattgcatccttgagttgcatatgatgggatctcttgaatcatttacattttgaaaaaagaaagtgaaatattctttaagaagccaaagtaatccacgagaatgtatggtgtttgttcagctggatatcttatttatttgaagtactgagagagaaatcttttctgactgctcaaaacagggaataataaacagtcagagtgtccaagtaatctgagctagaaagttccttctttcagagaaaagttataaaaagtatatttgccggatccaaaaaaaatactgtgtatcaactactgagacctgcataatgttttcttagtattctcactctttaaaagaaaaaagaaaacctgtaaaatttgggaacttaaactttttttgatattttaatatttctaggcaggtgagtgcaataagtctgttttttgatcttagaacataacatttcttgttggctattgtgtgtgctatgtgtatgatttgtctctttgttaattctctataaatataaaagagcaagtaatgaaattaccatggctgaattctgaatattaacccagagcagatttcctctaagaaagatcataagaagatgcttaaaagaaaacattatatttcaaaagaattaggttctgaaatatacccaataatgaaaacaatacaattttcttctgctttttgtccttcctgttccaagcactgggaaggagctggcatatttcttatgtatgaaaagtagaataatatattggattcctttatccctaacccggaagagtctttcttggactgtggtttgctttcccgttatacttaagcttgtttattgcatcttccgatgtcacattatctcattgccaagctaaaggctctgttgggttcttagttgaacccagagtggaggccgatttcatccaaagccattttttttaaaattagaaattaaactcacctttggcaagtcctcctgaccagggatgggtcctcatgttagtctgtaatgtgaagatatgaaatgtatttgatacaataggagattcactgtgattttcactgaatgagtatacattctgcagaactagaagataaagataataaaacaattcacatttcttaggactaatttattttccacagtccactaccaacatggtgggatggggaggagctgagaagagcatatttggctgagtttggttgcagaaggatgcaatgtgaggtagcagaaggggctgtaagaacacaggattttgaagttgaagaaaccagcctggaatgaatcccagcccttccttttagtgacctgctggccagccacattacctccttgggctttggattttctttttcactgtaaaatggggaaagtagctcccacatctttgggctgttggtgggaggtgtgcaggacacagctgaaacctttggtgtatagtggatactaaagcaatgctagtcttcttcgtgtgctaccagttagaatgaattttgctgacatcttactggtttctgagggtatacagacacttattgtcaaagatattattgattatctgatccccaaacatatggagttacatcacagcaggtgagaaatacccttcaactcttgattctaaggaaaatccttggggagccgccatcattccttccacgaaggaatgaaattataacgtaatgtattgttggagcccttagttcaacactgtcttttttcaggtcatattaatgcaatggttagcatatcaacttccttctgtttttagtgactctaatacattatattcaccttgttctctgcatgttctttctttaagtcatgttagatcccttttttggaagcaggtcaaatttgaattaataaaatgatttatgttgaagtacaggcatatcccacagaatctcttaataccaggccaaaagtaactttatcttgatctgtagttcggacatatttcttggattgtccgcactcataaaaagagattgcgtaacaccctttgaacaaatggatatttgagaaccatcctgtcttcagatttagattttttcaatttttttttactgtcatatgattcacatgctagttactgattgctatcatgcagtctgccagcagaccagatggcagatcttttaattagatatgtttgtgtgtgtatgcatgtgtgtgtacatgtaatcacagttcatcaaggacctaataaatacttttttctctctctctctttttttttttttttttttgagacggagtcttattctgttgcccaggctggagtgcagtggcggatcttggctcattgcaacctctgactcccaggttcaagggactctcttgcctcagcctcccgagtagctgggactgtaggcatgcactaccacacctggctaattattatgtttttaatagagactaggttttaccatgttggccaggctggtatcgaattcctgacctccatgtgatcggcctgccttggcctcccgaagtgctgggattacaggcatgaaccactgtgcctagccttaataaatacgtatttatgtctttcgatctttttctgtttttctacattccgtttcccctatggctgctattgttttccagtgagctatttatatatatatatacatatttttgagagggaatcttactctgttgcccaggctaaagtaccatgtcaagattatggctcactgcagcctcatgagcctcaaccttcttggcctaagtgatcctcctctctcagcctcccgagtagctgggattacaggcacctgccttcatgcctggataattttttgtatttttgtgaagacgggtttcatcatgttggccaggctgcagctatttatatcttatatgtgtatttgtaaaaaatttattcctcagccctgtgtggtagctcacttctgtaatcctagcactttgggaggctgaggtgggaggattacctaaggtcaggagtttgataatagcctggccaatatggtgagaccctgtctgtactaaaagtacagaaattagttgggcatggtagcggtgcctgtaatcccagctgcttgggaggctgaggcaggaaaatcgtttgaacccgagaggtggaggtggcagtgagtggagatcacgccacagcacttcagcctgggcgcatgagcgagactatgtctcaaaaaaaaaaaaaaaatttcttattcagttgatttaagatggtttataaagacaacatgagctagcggtagaaatgcgaatggacgcttgtagacagtaaggactcaatacgtgggtttgttcaagttatattgtgcagacaggcatatgcagttagaaaatctgtctagggtagggagagataaaaccagctacttcagccctgctatttttatcctgaagattttttttttactctgtttatgaataaaacattttaatcagtgctgtatcaacactgatcaatttttttcatggaagtgtaatacagggtgaattccattaagtcaattaaatacttagatccagtttttaaacagtgcgaagatagttaagctcttcttttattgaaagcctttttaccaaaaccatttttttttattttatagtgaagatttcatgtatctgttttctgtacatgccaagttttacagctttttgtatcatgagttttcttttgcatcaattatttctaccaagtccaacttgtagattgggcagatctggatttcaccacacctggtttttgttgtcattgagtttttgtgatggggtgatttcagtgagaaatatatgccattaatttgatgaaaaatcagtatttatttattaactaatacccaagaaattccccagcaagcctcttccagtattctagagtttctcgtttcttgaggattggtctccgggcatactcctaatctaattgtttcccaaactttcaatgttttggatgactttggaagccttgatttctgtaggctgtagcaggacaaattctgatggacagatcaagatgttctatgttgctctaaaacagcatctctcaaacttttttggaccactatctaagttttttctgttaaaacccaatacatttatacttatgtatattcgtgtgtgtgtgtgtgtgtgtgtgtattatatgcatgtgtgtgtatttgtctgaaataaaagttttacaaaatgatacttttatctgagcagtgtcctgctgttttttttcccctaggttgtgtttttgtgtttttgtttgtttgtttgtttctttgtttgtttttgagacagaatttcacttttgttgcccaggctgcagtgcaatggcacgatctctgctgaccccaagctccgcttcccaggatcaagcgattctcctgcctcagcctcttgagtagctgggattacaggcatgcgccaccatacctggggaatttttttttgtatttttagcaaggttgttgatcaggctggtctcgaactctcaacgtcaggtgatccatcctcctcagcctcccaaagtgctgggattgcaggcttgagccaccgtgcccacctgtgttttttgttttgtttttgtgtatgtgccaatgatgacccagtttcaataccaactgttgctttcaccacccactattggtttcaccaccccgctagatcacagtctgttctttggcagtcactgccccaatactgtttgatgtgctcccctctgataaatgttcattgagtgccccacatgtcaggtactgacttaaggcatagcaaatgcaaaaatgagcaaggtgttctcttggctctatgggtgcctaccttagaaggatggagatgggaagaatgtgaaagggaggtgagatgagcagcactgggatgtgtggcttttctgtcttgaggatagatagaagaggagtcagataaagttgcagaacagagatgacgtctttactgagacttgaatgatgtgtcggaggcaaacatgttgacacaaacgagagaattttaggttctctttgtagctgtggctgggctgggacaaggacgatggacaaagttatgggggtgctaaaaacctcagtaatgaagataaatgatattctaatctaatattttaaaaaatcgaggctaggtgtggtggctcatgcctgtgattccagcattttgggaggccaaggtggacggatcaccagagttcaggagtttgagaccagcctggccaaaatggtgaaatgccatctctactaaaaacacaaaaattagctgggtgtgtggtagtgtgtgcctgtagtcccagctactctggatgctgaggcacgagaattgcttgaacctgggagtaggaggctgcagtaagctgagatcatgccactgcactccagcctgggttaacagagcaagactctgtctcaaaaaaaaaaaaaaaaaaaaaaaaaaatcaaaattgatgcaaaaaatatgataacatttcaaaatttaaatcaagacaaattcaatattatagcaaaggttcaagtaatgaacatgaatttgtaatgatgcctgggggaggtgaaggttaaaaaaaaaaaaaaggccaccaaggacctcatgttaaagttgatgatgacggaagtgagcagtgatgatgagatttaaaaaactaacttttatttttacattattttaactagtatttgtgttaacattattttaatctcctgtgcacttaagggagctggcataggccggcagtggctataggccaggacctgtgctatgtagcttatctatttctcatgctgattctacttttgttactaccgaaggagcttagagggaatcagtgacgtggacaaggctatgtaactaaagggggtggaggaggattcaagccccttgcaacggactgaagtgcccaagctctaaatccctgccacccacagcctctgttggccccaggttgtgtctgagattcagaggttgtttttatagcagcaacacagtaagttgggaagagggacacatttttaacatagacaccaaaagagaggctggaagagttgaccacttagaaatgtcacgagtgtctgtgaatagtgttgggggctgagaggcaagagaagaaaatagtcctaatgttgtacaagtagcaatggaaacaaacttgttaaaaaaaatttaattttgtttatgcatgtgtgcataaacaaagcaatagaaaatatttgatatttaagattgagcacttaacaaaatactttgtctctttttggtttgctgtcttaagcaatagccttaaattcttgtcccagggatacctgatagagctaatatagaacaatattttaacataatttgaagtatttttttcttctgatgggtatgtagttcatttttataaaaaaatttaaaaattctgaatctgtggtgtttctgaaacatcctgatatattttttgttgatgactcttaacaaaggatgtaagacagattctaagaagagaaaaggtagaatatccacatgtctcagtttcataatatgtgtaaaaattatcatgcccattcattatttaaagtgctgtggctttttagtgaataccaacattaacaaaccatgttaacatgatttaaaatatgtaatgaaatttgcaatgcatcagatgatggaactatcaaattagttcacgtggcgttggctgatcacccttatgaagagttacttgcattgtttgaagagggaagatgcacatccccttgtgggctggcagcatttttgctaacactgccttaaatgatgctactggcaggatggttaatttgatgttgaaatgtcacacaatatgtgcccaccctacgatttgaatcttctgtgccgttaagggaattggcagtgttcagacagaatggtaacattctctctgatcgtgtctgtgtctgcacccttttttgttttgtttctgttgtcttcattaatagacctttcaggaaccttcctgggatctcagataacagttcttctggaacaggattatccagaggtagcaaaagctctcctgcaaatattccattgcacgactttaaataaagcagcaagaagtcttttcattcagttcagatttgctacttgttctcttggttccttcaaagtaatgactaagtacaggtctttagatagagagctgcaccaaccaggtattgcttcgtgtcttccacgtacgtcctgagaaagcgaaggtgaatttcaccaattggtaggtggaaatagaaaaactgttgattctttttttcattcaccaatcttttttttccccaaatgctaagctttatttggggaaatcttaacagccgtttttataagactctgcatttacaacatttgtgggggctgcagaggacgcacatgaaaataacatgaactggccatgtacggtggctcatgcctgtaatcccagcactttgggaggccgaggcaggtggatcacctgaggtcaggagttcgagaccagcttggccaacatggtgaaacctcatctctactaaaaatacaaaaattatagctgggcgtggtggcgggcgcctgtagtcccagctacttgggaggctgaggcaggagaatggcctgatcccgggaggcggagctttcagtgagccaagatcgccctactgcactccagcctgagcgtgagactctgactcaaaaaaaaaaaaaaaaaaattagctgggcgtagtggcaggtgcctgtaatcacagctatccagaggctgaggcaccagaactgcctgaacctgggaggcggaggttgcagtgagccaagatggtgccactgcactccagcctgggtgacaaaaaaaaaactttacctgggcttagtaagttgcctgacttctcatcctggagttcgtatccccttgtttctagaagagaaatccctcagatgtgaaggtgtgttccatgattttgtcgaacttgccctacatactgttttattatatattctgcccacttctattccctgccaattaattaattgtttcattggtatagttttttttttttttttttttgatacagggtcttactgtgttattcaggctagagtacagtggcgtgatcacagctcactgcagtcttgacctcccaggctcaagcaatcctctggcctcagcctcccaagtagctgggactattggcaatgccaccatgttcggctaatgtttttaattttttatagagacaaggtttccctatgttgcccaggctggtctggaactcctgtgctcaagccatcctcccacctcagtctcacaaagtgctgggattacaggtacaagccaccatgtcaggccattggtataccattgtttttcttaaacatttatttattttcttatatttacagcatatgtggtcatttaaaattattttatagcatataaaagtaaaaagaatataaattaattttttagcattaatattagggaagataatctgacatttaaaaatacatgtctatatgtgtatacatacatagaagtatatatataaataccagtactagtgtctgctaataggtggcgccactttttatctgtgtgtgttgggggtggaattagcatgtagaggttggcaaaggggacaggagactgtgggatgattagtatattcttatttggcctgggagggaaaaaaaatctttcatttccaacaatattcattctctgtgtcacctcagcatttaatttacttccgtcacaaaactacttgaagttgtcccaggctagttggtcctattaattacaacctagagggattctattagtaaactaatggattacagtacctaaatggaagccagcagatgactttggaaggactgatccgcaagggccttctgtgtgaagattaaatgaagcttcctttagccttctcaggtggccacagtttcccataaccttagagattatctaggccaaggctattaatttagagattaagaagccaaacccagaaaggttgaaagactgtcgtaagttcacactgaaagagagtggtgtaatgcccttttcaccaggctccaagaaatttgcctattttatgttttaacggacatggtatccccagcatttttaataaatgcccttttcttgcataagtaactggatatttccgagtggcctacaagtggagcgtgatttcatctttcatcaagagaagcagcttttcctcctcttgtatccgttttcttccttttctaactatcaaggtcatgcggtatctgccattttgcatattcttgctttgcttcatgttttccttaaactctgtgcacatgaatatttgtggtatatggcttaattgtaagcgatcaggcatcaatggctttttatgaggcaaaatctactttctgcatttgcgtgtgccattattatagattgctgatgtttgccaatggatattcttggaagtcgtcttctggtttaaatgcagttaagtatttaaaaataataccagtgacatgtttgcatttacattcagcctgaaggcctacttgatgctgcaactgaaaaattgttagactagattttattttattttaattctttttgagacagggtcttagtctgtcacccaggctgctggagtgcagtggtgcaatcatggctcactgcagtcttgaccaccctggctcaggtgatcctcccacctcagcctcccgggtagttagggctacaggcacacgccagcacacccagctaattttttgtattatttatagagttgggtttttcaccatgttgttcaggctagtgttgaactcctgggctcaagcaatccgcccacctcggcctcccaaagtgctgggattacaggcatgagccactgtacctggactccactatgccttcccctccccttccctcccttccccaccctaaagagtctcgctcttttccccaggctggagtgcagtggcactatctgggctcactgcaacctgtgcctcccggattcaagagattcttgtgcctcagccttccaagtagctggttttgcaggcatgcaccaccacacccagctagtttttctatttttagtagaggcggagtttcaccaagttggccaggttgttctcaaactactgacctctcctcggccttgcaaagtgctgggattataggtaccccgcctggctgatactttccttagttgttttcagtgtaataacctgtcttcagtctactctttgtccttttctctcctttcctccctgaatactcaagcttccagtgcacagatttctccaaccctgaatgtgactgataccaacaccatactagctcttccacagatgcctgtttgttttgcagaacactggcctgaatgactcagacttggagcttgaaagagggagaactgatgtggcctgtggcagacgtgtccaatgacctgctgtgtccttgcttttgaagaactaaagagtagacttgaccactttttaaacatgacattcgatccacgtggcatagcaaggatgggatccacaagatggagtgatctttacgccatcctcctgaccataaatactaaatgaatactctatttcagttgagtttttagtttgctctgttacgtgaggacacatcacttgcacctcagtgtgagtttgaaagtgttttctctggagaataattctgaagaaataggccctccagatatcagtagtgacaggggtatcagtaatgttgattactaagttcttgccacaggtagaagccatgctactgcacaagtttcatacttgaagagtggacatctgacacagtgttggtggttgttgaagtgtatgactattactgtgttgctttggaagcttgatgccataacaaaagtgcagaattccatgtttgataactttctgacttgatgaaaatgaattgtggatacagatttcactatccatgaattgtggccttaactttctcatgtacttactttaaatcagagagcccacctgtccaattctagcttctcctgggcatcctgtatttgacacagcccctcccagcattctgagtcatcgtctgctgctcttgcactgtccgttttccaaatgaggaactcatcggtaaggccagaaaggaaagggagaaaaaacaaacaaacaaacaaacaaaaaataggaaaaaaagaaagagcgtatttatagatggtagagaattctgggcatgagaaacccagccaaacaagtggaatgtgtgcataggtgggactgctgatcttgttttatgaaagaaataaaggcaagtcaaacagatcctttcgcaaggatccccatgtgtgtatgtctaacccagtgacaggtaaggcagccaggagctgctgttatttcagtgcaaagctgttttcacaatcacagacatgcacagctcaaaaaccctcacaggtcacgcctgaataccttcaatgtgccccatgtaaaaatacactgcaagtcgattggacatgccctatgaattataccttatttatgatcgtcgagccctcccttttcccgtcatgctttagaattatgggctggagcagtttttaatactctatttattttaggggaggaaaatgtttttctttaaccacaacattcatgcaataccaactgctggcagtttccccagcatttaaggaaatattgttgtaagacttttatgttctgtacttcaatcagctagagccagcagtatcccaatggaaggaccctcaacagaccattttcagcattttgctacaattaaactcctctggttttagccctcaggcaatttagtacctttttacatatgcacattatgaacttttgaccagggtctagcagtcatatattagaatgctgctcttgaaggcaggcttaacaagttcctctgagtattacagttggagtcagttgtggaaaaggtaatttaagcaacttgcagcgaggccattcagaatctcagcgatgatcctaaatatctttctctcttgctcacgctcttttttttttttcttgtttcctctggaagctggtagcaggagctttcaaagtctgtgattgatcttttattcagtagctaacgagggctgtgattctattagcgcactacaaggcaagagaacagtgatttaatgaagtgtctagtgagccggccatagatttatcctgttgtcgctaatttgcagcgcacttgccagcataaaggaaactgcactcacactgctattaagcaggtatttccttagtaaattgttgtaaggtcaggtacagttatctgagcaaaagcaatgccttacctcttcagtgtctgcaaatgacagccgccgtgctgagcgctcactgaagtggaaccgggagatcagaggtccgtctccaagtcgcccttagcggaggcaggagcagatgaactgccaagtaggagtaatagagtcataattggtgattagaactggaaaggtgcaataacatcttaatacaaactggcgtatgttatagttactgtcagttgttgtaaactcgtcctgccgcctggactagttacgcttcccttgattagctctgagaaacgaggcagcgggcactggggcagccacatagacaacatctaaatttttgttgctttcctgggtcttgccctgtccttactgtttcccttgggcacgctgttcaccccttaggacatactacagtaaccttttcccaccaccgtgggaggactgtgattttgtaaatgtcctctgatctctcctctttgcaggcgcagtgacatttatgcacactggctttgaggctcattgatcttttgttttatttgcctttgctgaggcaggggcaggtctttgtttcatgtcagatccgtatcccactgcaattctgtgttactgtaggagatttggggttggcatgccagagtgaaaacgcgaaagaaaataaacaggcagcactgaggaattatacacttgagcttggcatttttcttaacgcagggctattttaggtgcactgcgcatgttggaggtgcccttgcaggtataggtaggcattgtccatccgtggtaaaaagcaatagaagaaattcttacccgatgcttaatgaattgccaggctggttaaaaaggataacccttgaaacctagggtgtccaactgctaatttatatagactggagatatttccatgcctcgcagcaaaatttttctttaaattcacagaagcagcagctatccagcattgtccagttgtgctgagtagctgtcattattgataaacatgtaactggtcatttgtattgttttgagtaggatatggcttatcaggatgcatagtagagaaaaatgagatgaggtaatgagatcacatacactgaagcatcttacgaatctggcacatagtaggttctcaataaatcttttttgattctgtgactgttagaatctgttggctgatactctgtcatctggctctcactctgctccataaaacttgggtaattctaatgcttacttcatcccagggctgatgtgtgttaggttagggtttatgatcaagtaaagagtttaaagaagtgttttatgagggagttttgtttgcaaatgatcacctggtaatttaagagggtgagctaaacttcctccttttctagtatggacctttggggctcaggatgaggatgttcaatttgtactgctggtggagctgcctttccattaagtgagtctttctccaagggaacagaagtcttaggttgttgatctggcggtcagaacctaggacaggcaaggcagtgggctgttgtagaggagatgaagctgatcagagcacacccacaccagtgacaaccggtcaggacctgggaagggctctgacccattcatctgagagatgtggcatgaggaacactgagacctaatgcttattgcttaatattgtggacaagggactctgtgggttgtctagtactaagcagaatggaagggaaggatggaaggaagagagggagagacggagggagatggaggatgacagggagatggagggaggcaaaaagaaaaagggagaaggaaagagaggaaagaggggaagggaggaaggaaagaagagagagaaggaggaagagagggaaggaggcacagaggtagagaggcagggagataatggagatcctggccaaaagttaatgctccgtttctagtagtccacagaaagcaccttgaccaagtgactgaatacaaatcgtatcacaaactactaggatttcttgggtgcttaccatgtgccatatttccttgaatcttcatgacgatccttcaagggatccttgttttctaaagggtaaaggtgcaggttagaggctatgtcagaagcaagtcaggatttgaaggcagatctgtctgcttttgcccctctgtaaatccagagctgctgcctcatttcttacgttgcccccacccgtgcagcaattcttcctgggaggcctcattgttcatattcataaagggccccattcagtctcctttttggagaaatggccactgcaactctctgttctgacctggggggaaatgttagaccctcaataaggagaatcagagaaagaagaaataaaacatattactccattcccatacttctgtgaagaaatacccgagactgggtaatttataaagaaaaagagatttactgaactcagtcgtttcacctggctggggaggcctcaaaattatggcagaaggcaaaggaggagcaaaggcacatcttacatggcagcagacaagaaagcgtgtgcaggggaactgccctttataaaatcaccagatctcatgagatttattcactatcaagggaacagcacaggcagatcccatggctttgactcagttacctcccactgggtccctaccatgacacatgggagttctgggaactacagttcaagatgagatttgggtggggacacagacaaattgtatcatagaatcataaaaattgctatttctaaggcagatgaataatcctggttggaaatcatactgatttagacttaaaaccattcagccttctttaccatttctgaatgtggccctgagggaggatttgtcttttgctattttctttttttaagagatggggtcttgttgtgttgcccaggccactctccaactcctaagctcaagcagtccgcctgcatcggcctcccgaagtgctgggattacaggtgtgagccaccacacccagcctgggggagggtttgttaaagaactgtctgttttatcacatgaccacaagttaaaatgttgggcaatgtccctgaatgataccttttcattagtaactcacatggacccataatctctgaatttaacatgcttttcaggaatgtgttcatattttccacctataaaacctgttttagtaatttactcccttgtaaatgttccttggtatgtaaatttagcatatttccttttaattgcccaggtaaataatacccaccatcagagggcaccagtagtgtaatcaccttattttttaaaatgtattctgtgtttcatgattttttctgaataactgatctttacagtctgaattgcattctgttgggcttgacttatttttaaattaaaagagactaacacattaaacactaagaggtcacataggatattccatttatataaaatatgcagagtaggcaaattcataaagacagaatacgcatcggtggtttctggggcggcggggagtatggaaagcctgttaatgagtacaagtttctttagttttttttggttttttgttttttttttgagacggagtcttgctctgttgcccaggctggagtgcagtggcaccatctctgctcactgcaagctccgcctcccaggttaatgccattctcctgcctcagccttcctagtagctgggactataggtgcccgccaccatgcttggctaattttttgtgtttttagtagagacggggtttcatcgtgttacccaggatggtctcgatctcctgaccttttgatcagcctgccttggcctcccaaagtgctgggattacaggcgtgagccattgcacccggctattgggtacaagtttcctttggggtggtgaaactgttttggaactagaggtgatagctctacaacactgtcaatgtactaaatgacactaaattgtacactttgaaataatttatgttatgtgaatttcatctcagcaaaaagaggctaacacataaggagacatattttgatacatgtggcatattaagctgctgttgttgttttttaaatattccagctgcgtgcagtggctcacacctgtaatcccagcactttgggaggctgaggtgggtggatcacttgaggtcaggagttcgagatcagcctggccaacatggtgaaaccctgtctctactataaactccgtctctactataaatacaaaaattagccaggcttggcgctgggtttctgtaatcccagctacttaggaggctgagacaggagaatcacttgaacccgagaggcagaggttgcagtgagccgatatctcacctctgcactccagcgtgggcaacagagcgagactccgtctcaaaaaaaaaagcacaaaaaatttttttcttccatctgtatcacacagttgcaacgttgtagcatgggcaggaaataattgggttgtatgtaatgcccagtaaagtaaacagatcttagagagggacaccgatccctaccctgcatggggttattcacagagccatggggacactaaacgtaccttatctcttgaccatgctattgattagttatgtgtttgcctgtgttattaataatgtatacattgaaaaatctatgtgcattatagtctttgatcttgtcatgaatttcaaagccaaagattccattttccttctttttaaaaaaaatttttcaaagaggtaggctggaagtaaatttaaaaattttcccctttctggcagagggcttttttctgatcaccacccatgttaattagatatgcatgtatgtgtatgtatgatgtatatacccatatacacacagtctatatatacatgtatgcgcacatacacatattttaaggaaagaattataaaatgatcaattcaagcttactatatgctagaggtgaggaatatttgaatacaagtcttatctagtagattaaaacagaaattaaagactgtagactaaggcaggatcaaaggacctcttttcattgttcttttattgtttattgacttcaaaaaagactttttagtttaaactgactgtaatgtctcttgaatggtcttttgtaaaatgactttgaaaactcggggataatgtcttcattaagtggagaaaaatcttggggaaaatataactgtaacttggctttcattagagtagaaagagataaagctttgcttaattaatgtctgttttccctctgttcagaagtataaggaaaaaggggactgaaattagtgctgataaaagcttgaattagacattatagcactgaaacttctttttcttccttacttagaatttggaagaacatacttcatacaaagctatgaagcatattggaagattttaggtgccctgtcttcctggatataaaatgactccaaactcagtgatactgatcagcctggcttcttttccacctttctcacttcattgtctttttgtgtgtttctgacatctgttgacaaatgggcaatcttggggatggggggttccactggtatattttctttactgtttaagaaagctcaaaattctctctgctcttttccaagccaccaatcaaaactgacattttctaagtgtcctcattgccctctgggaatgttcatggcctctgggagtccaagaactacctttacactggatcttcactgcttttactattgtgtggctttctaccagttctctgctcagcttctcttttctggagacctgatatgctttgttagcttagcatgctgttctaggctgcctttcttttttttttttttttttaaacttcatggtgagcagaacactgtactccagactgtgaggccccacctgtgcagcctgctggcttctcataccagcttccttctcaccttaaccccacgtattgttgcaacggcaaaaaagagaattgcacagaggaacaccacctatcagagttcacactgagtttgcagattcatccttttgcttccagccatcccatggaatgctgttcttggaagggtcatctcatggtccattgtcggccctcttagaagagatttcaggccttcccttgtagcttgatagttacagggagtgctagggtaagtggaaaaagcacatgacttggaataaagacttagtacacatcccatgtctgatttatactaactagttcatggacctagcctacgttactgcacctgtttgagcctcagttttcctgtctgcaaaggagggatgatggtacttacctcaaagaattgtagttggatcaaatgagttggagtgggatacagcaacaatctatattctgatttcagcaacactgtgcagtgtaattccatattatattacaccacatcttctgtgggtctttctttgggggaagctaacattttaaaaggtttccctttgtaacctgtaaccccctctaccccaaaagtatattcaagagcgaaacttttggtatgacgatgtcttacatcagtagttctgaatgacttgacttagctatctttcttgagtctctcaaaagacagatggatggatagattgattttgttgtaacacctgttcagttttgctggccttactcgttttcaaatactcaaatgccattgagtcagatttcagaggcaaatggtgatacctcaggtttgaagttgcaagaagtcaccacatgcttgttatggaaatcgtcagggatatttattccctctcctgagaagcataattgagcctccaaaccacccatcaagatatccacctgtaaaatatttaagaactggtactatgaagacatttcccttatgcaatttgttttccatctaagagcagaacaaggaaaatatagctgactataagttacaaaggcagactcttaagctacaaaatacatctcttcacaggagcacttggagaagggctgaaggcaaaccaaaagtgagcaacaaggagactagtgttctgaaacagagatgacaggctccgcagtgagggtgatgatggtgttacgaattacccattcagtttaaactagacattccctggaagcatgtcatggggtgtgcagaagggcttttggataaaaggggtctagttaagagatgttaaaaaaacaaacttgaaaagcatagcaggctgccaggacatgtctgagtaccgcgcagatagtggggaatagtctatggattctgcttacaccatggacaaccaggctgggccatgggttgtgttttttttcctctcattttatagaaatgttaccaggcatattttccctgtttccctaagaagagcttcctctcagtgctagccagccacagggccaagtgacacctagaggtgatcctttggttatttgctaaacagatctaagacaaaccgatatctgtaacctgggattagatagagccaataagatgtaactgaaattctcagggattctaagacatctacattgtatgttggtacgttattgaaggtgatgctagctgctataacaaataagcacgcctgtgcacagttgctcaaagatagtagaagtttatttcttgtttatgtaagatccataatgactcttgccaattagcaggctgctctcttccaagtggtaacccagggactcaagctcttttcatcttgtggctcagccgtctgacacatgtggcttccagcactgccctgctgttgtctgcacaaagctggtggaagaagtaggaatttgcaggaccatgtgtggagcattttaaggatgaggcctgggagtggcacaaatctttgaactccaggaggctaggaaacagagcataaccttgtgcccaggaagatgcggggcatagtacatctttgcctcacctgatgtattgtttgtttaaaatcactttggattctcatttaccttttccccctcaagatctttgtttttgactttggagataaccagaaataactaagcatgcttccttccctctacgatttcatcctcatggggaagcaagaccccactcttttattttcatgtatgtatatatgtatgtatgcatgtatgtatgtatgtttgagacagaatcttgctctgtcgcccaggctggagtgcaatggcaccatcttgacttactgaaacctcctcctcctggattcaagccattctcctgcctcagcctcccaagtagctgggattacaggcacgccaccacacctggctaatttttgtatttttagtagagatgggggtttcaccatgtgggccaggctggtcttgaactcctgacctcaggtgattgacctacctcggcctcccaaagtgctgggattacagtcatgagtcaccatgcccgaccagcaagaccccactgctattgtccagtgtggtaggtacctttgcctaccttctactctacaggctggaacaggtgatattgtgcctacttcacagccttcctagcaactgaggatggctgtatgacagattctagccatcaagtaaaatcagaaaccaacagcacgtttccttgaataccttttgctttctataaaatggtgtggcattgctggtattttcactcttccttcctaccctggatgctgatttgatgcttccagccttagcggttttcttgcttctaggactgaacagggaagagggaaaagtcaaaagaatgacagaaggtcctcacgttgcagaacactgaccaatgttggcaactacaagacaatcaggcgtgattcttcatccaggatctgcttttccctgtcctgccaattcttgagctgctaataaacattctgatgcaaacatggaatacagatttcagagggattctgggtagccctcggagatgaggatgctttgcgaatgtaacaggcatctctcacctcatttgtctggtggaatgtttacaaatgctaattaagttttgcttcaaatggggaacagtcctgtgcagtgtttctaggaagttaccagcttcatcataggaagacgttctccatcgtttggatctttttcaccagcaccttttgattgtggtggtttgggatgtgatgatctcagaactttacatcctccatgaaatctctgcagcgatagttgaatgtcttgccttttctattattgccctttttcttctgtgactttgtactgagacacatttatattagggtaatggcctcatgctatttgaaaatctttatttgggccacattggttggaagataaaaatatataagcaatagtccctgaacatcatttggcctgaactaggctagagtttctcttaatcaaaataataacgatgatttttccatgccaaggagtggtgtcatatcatgaagtagatttatgtacacattaaataaacttttacattttaatgtaccaatttgcaatttttttttctattcaccaaaatattccagataacggttatcagtttttgattctacacatacttcaaatactattaatgcaaaatccttctttagaaatgttacctaattccaatgtttcactttattcagcgaagacattcctttgattattctggttaggtgttatgatgccaatttgcccacacattttttcttaggcgcctatgcttgcagtagacagagagttgaggaaagctcaaggttaaaacaggaaaaagtaacacagtaaatacctatttttgtgcataattcaaattaaaaccccaaccacctagaagcaccaatacaaggaactggctgcatattgcattcctgtgacctgctgtcttaatgatggaatgactaacgaggatcagagggaatgtggtcagcctcttatctcataagccaaatgctgcatattccaagcctgtcaattctgaaagcccttgttcatttttaaataatgaaaaactttggggccttgttcattgtttctaaaggaagacatttagaaaatttagaatataaatttctgttagtagaaactaatttctcttgcttttctctaaagtatacttgatttgaaatatgtgccctgaagttttgctatgttgaaaaaaatgatgagccgggcacagtggctcacgcctgtaatcccagcactttggaaggccaaggcgggtggatcacctgaggtcaggagtttgagaccagcctgaccaacatgttgaaaccgtttctctactgaaaatacaaaaattagccaggaatggtggtacacagctgtagtcccagctacttgggaggctgaggcaggagaatcgcttgaacccgggaagtggaggttgcagtgagccgagatcttgccattgttctccagcctgggcgacaagagtgaaactccatctcaaaaaaaaaaaaaaaaaaaaaaaaaaattatgtcatttcgttgtcacagcgtcagcagaataaatcttagatcaagatgggattactgcgccactcccttcttcccagtctgtggtttagcacgggaaaaagcaaactagggcccttgggccaaatctgatctgcagcctgtttttgtgccgcctgcaggagaacatttttaaattgctgaaaaaatatgaaaggaaaaatatttcaaggtgtgtgaaaactacatgaagtttaaacttgagtgtccttaagtaaagttttataggaacacagtgttgcttatcttttatgtaatgtttgtttgctttgagaccgagtctcactctgtcacccaggctagagtgcagtggtgcgttctctgctcactgcggcctgcatctcccacgttcaagcgattgtcctgcctcagcctcccaagtggcttggagtatagacacgtggcaccacgcctgggtaatttttgtagttttagtggagacaggatttcaccatgttggccaggctagtcttgaactcctgacctcaactgatagacccacctcagcctcccaaagtgctaggattacagacatgagccgacctttttatgtattgttgatacagtatgacaagggaagagttaactgattgcagcaggttagagcacagcatgaagagctgacaatattgaccgactggccctctcagacaaagtttgccaacacccaggtgagcagatacacttatctgtgagcagacgtgattcaggggagattgttgtccctcctttcctaagaaaatgtggaaagatgagaatgttgccaccagtgctgatatggagcgttttttttggaattgtcttaaacaagtcccaaccttgactttgcctgtgtaccctactctttactcccaggtctttgcaaggtaagctgtcaggtgttagctgaagatacggcagcccaccagtggtcccctgaatgccaacaagagtcacctctaagatgatccagctgttgcatggtgtagcatgcctagtccttgcagcacacacgctgccattcttcttcgccgttgttaccgtattaatttagggatgatgagaaagtggcctccctttccctgttaattccttggaggaacttctgttcgaaatgaatagtcttgaaatatgtcataaagttacctatcaggaccacttttacagagatttaaatgtgataataagaataaaagaaaatgaagtgacattgaggacgtcttcttttataacagctctaggtcttgcctgttaagcacgctgtaaaatgactgttacacgtttatggattgaaatggttctgctgaaattttaagtgttaacattgttcaaattttcattactaacacctctcacattgttagaaaacagttttatgtttgacattttgatcatactaacctgggacattttatgctaaagttctcatttcatgccttaggaatcccctgcttattttgatttcagcacctttctgtaggacgccaatagcttatgtttgcacatcttaccccgatgcactctctaaaccgatcatcacagaagatattttgtagtgatgaagaaagcttaaatgtctcatttgtcagattggtttaggtagaaaataaggatttccaccccctcatcgtggttcccttttagattttcttgtttgcttttctttaaagctgctgttactcaaacgacagtccgtaaactgcactttattttttataacagctttattgagagataatttacatgctatacaattcatgcatttaaagtgtacaattcaatggctcagtctattcagagttgtgcaaccattgccacagtcagttttcttacctgaaggagaaagcctgcaccccatattttttacctcccattctccacttcaactcttccccagcctctgcgaaccgctagtctgctcttcatctccatgcgtttgtatattctggacatttctcattaatgggctcacacgatatgtggttctttgtgagtggtcctttcactttgcatgcatcatgttttcaagatactgcacctaatttttcagttccttgttttttcttacaaatacatttttcaaaatgagtaaacatatgtacaaaaatatttaatttatttaggcacgccaggtttatgagattcatctttgtagccaccaagagccactaacagtgctaacatagccaggcattctaaatgtgtttgtcaggtgcataaatctgtgactgataaaaccactgctcattacttggttcttaaactctccctcaatatagctgtagggacatgcaaaacaaaggctggctcattaataggatatgtctagagttctgctttagaaatcataatgtggacatcattgatttctctgatgctggaagctgctgctgcttcttcatctttatcttctcctccctgtgtattgagagcagggacctccttgtgctgttttgggctctccttgttcacccagattggctgcatcagcaccttcttaaaatattagtgttgctgagataggagcttttggtagatggataaactgggatttgtaaatattttgcttagtttttttcccagagttttgcagaagagaataaggtgttggtttgttataaggtggtcctttataaagtttagacctattttaataaggctgacttgggttgaagataactagagccatgactttcatcttgatggacaatgagtactcactctacttttttagtttatatttttattttagttcatttcatttaagacagcgtctgttacccaggctggagtgcagtgacatgatctcggctcactgcaacctacaccttctgggttcaagtgattctgatgtctcagcctccccagtagctgggattacaggcatgtgccaccacaccggctaattttatgcatttttagtagagacgcgtttcaccatgttagccaggctggtcttgaactcctgaattcaaatgatctgcccacctcaacctcccaaaatgctgcgattacattttaaaactctaccttttaaaaattagaacctggacaaagaggtattaaagaatgtgtctcttattaatttattatggtaatgagaagagtttggatttggacctacctaggtttttctttcctccagctccgccaccccaactccttactcatgcttcctctgtaaaatgatcactccccagtttgacaggaattgcccctggaatcccatctggtgttctaattgttaccaaatccaggcaaatcttgcctgtgatacaggtggtgaagctactggatagaactggagcatctaactggtgtgagatggtatctcattgtggttttgatttgcatttctctgatggccagtgatgatgagcattgtttcatgtgtctgttggctgcataaatgtcttcttttgagaagtgtctgatcatatccttcgcccacttgggtggatgaagctggaaaccatcattctcagcaaactgttgcaaggacaaaaaaccaaacaccgcatgttctcactcataggtgggaattgaacaatgagaacagttggacacaggaaggggaacatcacacaccggggcctgttgtggggtgcggggaggggagagggatagcattaggagatatacctaatgtaaatgacgagttaatgggtgcagcacaccaacacagcacatgtctacatatgtaacaaacctgcacgttgtgcacatgtaccctagaactgaaaatataataaaaaatacatattaaaaaaaaaaagaactggagcatcgactttcgttttcatttcaagacccgtcccccatgatcacagaggatgaaaagtctgcttaaattataagctagctaattgcttcttcagttgaagacctaaatgagttttaaagtgaaatgcatatctctaagggctaagtagccaacacaataggcaattgagataggaaagactaatttagaaaaggttgttttgttcgtttttctttttccttccctcccttcctgatttcccatcttcttcctccctcttctctcccctctcccccttctcctttccgtccttcctccttcagttccctctttcctctttttcacccttttatttaacattataaatacgatgggattgtgtctgcgcttttgttggtaattaaataaattatttatacatttaacacaatcttgaattaccaggtgatcatcttaggcactcaaaagcataagagcccttgaaagcaatatctaagcatagatattccatagcacgtcttacaatctaaatattgcttttagtgtaatcgaagcagcaagagtagtcacagcagttgatggactatttttcaaattgatttcaaaaatgtatttaaggggatgatcttctagtctagattacctattgatttttaatatgaaaagctcattatgtaagcagtaaccgcatataaaaacctagcaaacctttgcataaatcctttaattgaatttccagagcctgtggttctactttttttttaattaaatctatttctttttttaagtgttactgtgtaatttgcatgctgtgaagaggccctgtcccagataaagtgccattgatccttattaaacctcacctctgggcttgcttaaaactaactggaaaaattaaagtgttcatgccgcaatgcacttatagcttgtgtgataggattatggaaaaaataataaaactaatttccaggggagaatttctaatgtgagattttattttttttcaatttgataattaatagtgaaatcatatcatatatataaatcatattttagcctataaactgaaatggcaattaggaaagataatatatacttgatgtaaaaccatgttacgtgcggataatcttttagcactttaattttttaattgtagaaggagagaattatgaattcaagtcaaacacattaaatggtgggtttcatccaaaaaatctgattcttttactatgtactgtattagtggatttataatattagtgggaggaagtataaaagatatggaaaaagatattctggttatgttcgtgctaaaatgtgtgtattagaattaccaggggaaagaaaaatataaaagctgcaataggtttttctattttttaatacctaacatttgttattttaaaagcaataaaatcccctaaagaaatattcgtaatcaataagaacacaaaatatggaatatattaactgagttataaaaatgtttgtagtatagcacagaatgaaaaacacagcaaggtatgtacggtttaaagtgtaatcaattttgaggttgtatacaaggatataaatgataaatacaagtagtagcatttttagtaaaggctgttacaaaatactgtatttatggcctattccattctttttatagctcattaatgtagaaaacaaacacagtgtatccatcttctcagacggtttaaaattcccttaaatgatgtttttaaatgtaaataactgagctcatttgatctggttcttccttaagccaatgttagcatgaatggccatatttaccaccccggggttccttttcagactccggaaagaaaaagcgatgataatgacgtatttccctcccttccacaaaacagggccaggtgtaacacactaagaacaaatggcttggcagcctactctcctctctcgaagctccatgcccaccttgctgttgcaccccccaccccaaggaaagccttcccacctttggaagctgcattaattattccaggccacaagggtgccgttgagttactggttcactgcactggctggcaggaaagagttttaatgcaggctccaaaggtgcttaatttcctgtggtccttatgaatatgcatacagtatgtgctcagcaatctagcagttcaaactagacagctggttctggtggtgagggttttttaaatttattttttatttatttattttttctctcccctttccttggacaagccctttctgaataagctgaatctgtagtataatttcattaactcatttccagtatttaatttggttttgatatttccatcatggccccttttctcctttgattttgtcattctgtagaagttgataatctgtattatgatcaacaaggcatattgccatgactgtaggaatcaccaatttagatatccaggcttcctaaaatataagtaagtcagatttagcattactgttttcctgaatgtaggagtatttggaaaaggaaaaaaaaataaacatacatcttggaaagcagagaaaggtgttttgttttctttctgtttggattaacatattctccatcactgtgtaacttcatccaatacgtattgaatacctactatgtgtctggcaccacttcagacagtaaggatatggatatgaatttgtatcagtcaagccttccaggatcttattatctagagagaaagattaaaacatatgcaaataattttgatagaagcaaagacctaactcagcctgagaggaggttgggtttagagaatgctttcattgtaatgttttaaagctttttatttataactatagtttatttggactttatgatttaccaagtaactttagatgcaaatatggtagtactgtgaagattatggtttttgaatgaagtcactttgtggcatgatggtatagaataagatattttcatagtgaaaatggagataagacatgtcccattccctagaatagactgtcactgctctcgttgcctccaaggaggaaactgttataggaatgattgacatggaggttcatctgtagaatatggacagccctctacaaattgggaacaagggccaggacacgaaatatagtgacagcctctggcctgggagtctagacagtggtcaaaggcaggattcatggagttttccaagataagattcaagacccaaactatgaatgaaagccaggctgaggctggcaccaagtagaggcctccaataatgttgacccagcggggctgcattgttcactgccccctcctgggaaggaggaaccaatgacaatggagcatctaagagacaagagaaagggagtgtaaaggtgaggattccatggctttacactccagaaactcaggctagcttgttctcactgaagcagtcataccttctcgaaggcaactaggtggattacagaattgtgctgggtcctatggagtgtcagaaatagtgaagcttctggagcttcactgtccaatatggtagccacgtgtgactattaaaatgtaaattaattaaaattaaaagttcaattgctctgaaatagcagccacatttcaaatcttcagtagccagatgtggttattggctaccatattgggtagcaccgatatagaacatttctaccatagtagaatgctcttttggatacatctgctttaaagcattagtccccaaagtgtgaaggatgaaccacttgggttccgagaggaaacattataacttctgtttatccattaaactctttcatttattattaaacatctcaacacatttattgggtggcaggtactgttttaagtgttttgcatatatttacatgtactgtcctttcaaatattctttgaaataggactattgttgtccatatttcacagatgaggaaagagatgtgctaagaaaagaggtggcagagtagggattccagctcagtagccactttcagggtcccgtacttttcaatgtaagcatattggctctcaatttaaaaatgttattttttacagatagtacacagatgcactgacacaggtaccctctccagtcctctgatggtcaggaattgtgtgcagtatgcagtacattccaaagtcaggctggccatttccccagggagagggtccatgttggaacctttgctccttgtggactttagctttgaaatgtattgtagttttgcatgtgtgcttagttggatggattgagacatcagattatgtggtctgaactaaagcaaccgtcacagaatgaacaagagacttacaaacatttgtgcaaaaagatcagtgtttggatatagttcttagaatagcaaatagtaagaaaagagcaggattggtacttcacctactcctaataaaagcccttcatcttgtgcaaagtaaacacaatcacagtttgatcagaagtggtcaatggaaaaacaaaaatctaaattagcaaagagaaatttgaaattgcatgcattatttttaaagatgaacattgctttaacctataccattcctggaggtagtagctaatagaatgatccaagtttataatttgtaaataagtagacatcttttgaggcgtatgcccttaatttttctaactgatgaaagcgtacttccatcaactcaagacagttcaaagcagcttggagcctcttggattttaaaaagactctgtggcctctgtctctcttggttttcagtgctcagctgaggtctactctgtttatcctctgcctactagaaggatatcctttcaatagaggtgaaaatcctgaaataaaaggtttcataaatggggaaaaaagtcattgattgaaagagtcatggcatagatgctgaagttttgatgggaactttgcaggatgttcgtttgtttatcattagccctgggagagtcatccctcacctcccaccaccccttaatttaaagggatttaaaatattttcaagtacatcctgatatcagcacgtggtacactgagcctagttgatggaattgtgaaaaaaaaaaagaatgttttcccaacaatttggctgtatttgccagaactgtttcaagaatgctatgacttttgctcagggcaagggaagtgtgtgtgtgtgtgtgtgtgtgtgtgtgtgtgtgtgtgtgcgcgcgcctgcatgtgtactgtggatgtgataagagctgtgtttgtgaaaactgtgaagacataacacatatctatgaaccttttctattaatcttcttggggctggagctttaaaataaaataaataacttttctgcagagagagaacctttccttacccaaagatttcgtaactttctcacatccttggttaaggctgagctgcctagctgtctgcatttctgataggttttgctttcatacacatttcaaggacttaagaaatctgtttctaaagaataacttagaatgtgcttgttatggtcccacctattctggggaataggtggatattatacatttatttaggtggaatggtgggtcagatggcttcatgtctttttacatcacagttccacagccctcattagtgaagcagaggttgaaggaggtcacttgctttttatcccaatgtcaaataactccataattttttttattattttttgagacagagtcttgctcttttggccaggctagagtgcagtggcgcgatcttggctcactgcaacctctgtcgattctccttcctcggcctccgtagtagtcaggactacaggcatgcaccaccatagctggctaatttttgtatttttagttagacaccaggtttcaccatgttagccatgctggcctcgaactcctcacttcaggtgatctgactgccttggcctccgaaagtgctgggatgacaggcgtgagctgccttgcctagccaaataactccattatttaagaaaaattaaccagtatttattgaatacttactgggccctgtgctaagtgctttgcatgtgatttctaatttcctgaccattctatgaagtggctactataattatcctgatttcccaggcagagaaactgaggcttagagagttgaagtaatcaactgggtgttaaaaagctggtaagtggcagagcacttattggcgctaagactgtttctcaggaccttgttgtacgagagtcaacgataagacgcagaacgtatgtttcatttttcttgggaaggatctatctcactcatctgccttcctgtgtctagcaagagggccaggcacataaaatacacatggtacaatctgttaaaaggcatgaaaaagaaacagtcattcatatctgttcgtagaagtgggcgtcaagattttggggcactgagatctatgcatgttgtgggcccactttaagaaaaggagtcaaacatttagtgtggaatactggaaggggtccctagacatgaagggcctcttcaacctaccttttgttggcttcaaggttatgccatattttgcaaagtcaagttggagatggctctcgatatgcatgagtgtgttagactgcttttcttctattttttaaaaatgcacccaaatgtaaaagatacttttacctttttgatttgatgttgaaggtcatttgaaaaatactctgtctttattctttgaaatggatttactctcaagaaagttgcatgtcactttacttggaagagacgggtctcagtgaggtgtgcctccgctttcatgaaaagtctcccgtctgcagaagcattggctgacatggaagattttttttttttttaatacttttctttttgccggcatctgcgtagaatttttttttttttttttggtagtttcttaatggtctttagcaaaggaagtaagtgacactgatcggtgaaggcagacagtaagatttataatgtatttgtgctagctgattgccaacagaaccggcctttcccagtggtgctgtacgcagactcggaaaatcaatagggattaacctttgacccccttcacatacttatactgtgggctgcatcgcttaccaatatttcatctgtttcacttagctgctgttacttactcaataatgtgtggccaatctcacaagatactaattctttttttcaaatgcagcatcgcttgaagctgtgataaaatatcacacctttggaaatcaaggctcttcttgtttatttatttaactcacattaattagccttaatttaaaaaaaatgagaagagccagcatcatgatgcaagcattgactttgctcacaaaaacatcttgtggtcaacagtggggcttagggggcaggttttgtggctgtgacagaacacgtggcccctagtgtgtctgttgaaagatgggcccctttcaggaaaatggcttaccttactttttagacataatttttgttttctgttaaagggtcagttatagataagtatgctcccttgcaatgaaatgaacccactttatcaattttgaaggaatcaaaattaacttgaatacattgtctttttgcatatgtatgtagtgctttgtataaacatatgaatttgtaggagctgctcttaatgattattactgcataggctggaatagaagcaaaatttgcagtaatacttttgtacctttctctttaggccttggcatatattaaagtactatacatttgtcttaaaaattgaaattgtagattattttcatctaagacccttttgttcacagatttttttttccaagtatacctattccccagagtttacttacagtttgctattgatccagcagctggtatttgaattggtcgatatactctgtaacttgtttaagataccctacctgagctattagtttaaataatgtattcataaattgattaatcattacagtaagacttattagctgcatttatatctgcgtgttatccacaattgacttatagtctaataatcacgtatacttaagcagaagttgggttttacgttacaatttaataattatcaaggtggcaaacggtagtatttgtgtgtagaagttgagtggatgtggggctttaaaggcaggagtctctaagcaggttgctaattttacttttcctagataaaataattctctctcccaaaatgaaatacaggaagtggaccaaattgtgtcagcctgaaagaagtgattgagtttgcggaagctgtcctgaagtcgaggttctggaagatgggtggggtggggggaagcgaatgtgaagtgccattgcatttgtctccatttctgtcccagttacatcaaggctgggaggaggtctttccactggttttccgggctgtttgtgtactacacagcctgtgtacctggcaaggcacgctctgctctgccctgccttctgatgagctgactaacaccttatagatgaggttcccttagaaccaaagatgccccatgaaactccctaggatgaatgttggaagtccttccaactgggattcccagccggaaaggaaacagttcatctgactacagggtttaggtttacatgtactttaaaaaaaaaaattaataaagtttatttttacagtaattttaagttcacagcaaaactgagtgggaagtgtagagtttcatatactccctgtcctcacacatgcacagcctcctccagctatgcacattttcaatgaaactacatgttcattgaaaatgatcttttgggtggttgatgttcgattttggctctgtgttgggcctgcccagtgaggtccttttgactccctaaggaaccctgttttgggtttcttttgaggttgaagatatttcagactctttccccctcaacttccataggaaccaaactctctttcttcctcccgtttggttggaaagttattttgcctcactgcgtgatttttctactgcaccaactcccctttcaaacgttattccacaacatactaaattaatgtatactgtgttctttgggtaatggggaggggagcctgtctcacagcacgcatttgttcagctctgtgttgaaagagcactgcccgccgcgtgaaggacatctgctcacaagtgagcaattgtgcttctgatttggggcagcacctttgcttgaacgctggctccagatgaaagaacagattgccgcggagccgcttttccaaggatccctctccccagcatggggcttcatacattattgagagcaaacctactttccaccgccactcctggatgcacttattttgcgagccttattcagaatgtcagcatggatcacttggcgacaaaggcctaaagggcaagccaggaagcttccatggatacgttatttatggtgtttaattattattgtacagatttattaaatgactctgttacctaggagtccatgtagttgctgaaaagagtttgctaactttgaatcgtagatgttttatctgaaaacaaaatttccttgtgaatgctgttaccatattcctggtgtctatgtgagggggtgtgtggtggtatgccggtaagtgttgaacaacctgctctgttggcgggaactaggggaaacaaaccctgttttgtagtatttgctgattactgtggtgtaaatactcacaccttggctgatttcaagttgcagcttggaacttggagttagaaagagatgtgtagtcccataccattttatgtatgtaaagtatttgcactatgccgactaatagacataaataacctcatgagcatagataatagtcacatctactaagattattcagaagtattgagctttgagtatgttttacctttttaatatagcttattgaatcatacatttatctactttaatacttaataatgagtgtgcccaacaactaggtcttaaagttcctgatagtttagcagtgtgctctcttaagccagtcggacctggttgttgtacactactgggtgtgtttaattgacttccagttttgttttgttttgttttgttttgttttgttttgaaacagtctcactctgtcgcccaggctggagtgtagtggtgtgatctccgctcactgcagcctctgcctcctgggtttaaggaattctctgccttagcctcccgcgtagctgggattacaggtgcatgccaccatgcccagctgatttttgtattttcagttgagataagggtttactgtcttggccaggctggtcttgaactcctgacttcgtgatccactcgcctcggcctcccaaagtgctgggattacaggcatgagccaccgcccccgaccattgtctgtcaggtttaaattgcaccttgggttcgggtgaagttgatgatctattcctaatgcaggctcattcctaacagggcatccctgcacaattttccgctggggtgtgatgagctgcttcgcatcctgctaagtgtcctcgacagcgagcagacacatgtaccctgcttggtacatgccagatgattctgttgtagtgatattaaggacaacagtattttgccagaagctataacgagatgattctataacaacagcatggtgacatcagactatgttttgcaattttctttaatatttatgctggataaataatttatcttttttctcagttttttttcccttttctttttttttctccccatcttgaacatgttgctgtagacaggtgctaggtttccctgaatgactaaagcagagatttggttattttcctcccagaaaaagtagatgcatcagcagagttgagcccctgggcattatttccccaattccgtatcccatctactaatacaaactaatgagatctattaaggatgagtccacaagtttgaagggagtctcttactaatgttccgtctttgcatggtgttacaacagcgggaccattttacactgagggtttgcgagaggcatggctcccctgttatgtatttgggacttactgcagatgcttcctctggttcagggtgttgaggcttcgtgctgttaatattggaaggtgggtcatttgtactgggcatctgtcctgtatcttggagatgtttagtaacatccctgacctctagccattagataccatctctcccagtagggataataaaaacatgtctccagatgttggcaaatgtctggccttctggggagtaaaatggcccctggttggaaactagtgttccagagctacattcttagctgcttactgcatcattgtttttagccctccttttctctggcttccaggaaccaccaatcccccaacactaggatagggcataaggcaaccttatgtcaccaaattaatgtccgcctaggcaagctggactgcagaaagaaaagcagtatttctaccctaggatcattatcccaccttccccaagcttcgaaagaggtacaggagtcctcagaaatggggcttctaaaataagtggaactgggacctcttctctctcaggctgttacttgttgtggttccagcctattttctgagctgtggagcagggagggatctcacaggaaacttggtaatgtagattttggaggacttgaaaggttcctgctacctttggctggggatggagggaacatggaagatgggtctttgtttagaggaagctctttatcctggtacgctggaagttggcatagtcttagcagttagtccagatgtgaatttcaggattattctgtgagtcttccaagtcctgtctcagcagtgaaataggctcagtgtagcttatgtctaggtggctgagttcattttctagtctaggtaaagggcacctcctgtaattgaattgtgtaaaacctgcacagtggtacacctgagcccttttttaggacccaagagtgctgagattggctcttcctgagattccctctttaaggataagactttctgatttttcaactggatttaccattgtggcatctgcacatgagcagactgactgctttttggccctacctggagcctgggtcctcaggtagctgacccgagagaccgtggagctgcttgtgatatacaatgtcagtgctctgagctcattaggcgtcatctgagacagtggctgtaggggaggggaggtaggctctgagtcaagcagacctggaattttctttatgggccattaggaactgtgtgacgctggggcatctgacttcacctttctgagtcttagtttccttacctgttgaataggtctaatgatatcattatggcagatcagtgggacgattgagtcaaataacatgcccaatgcctgtttctcagagtaggctttcagtgggccacatctgttgtcactattattttgttctttctgccatttgggatgtgctttctgataatggcactaggctgccttgttgcctcctgcatgtagaacacagaacttcgcagtctctgcagagtgtctaaatcctgctctgggccagccctttcagaaacacttcaggagatcaatagttatctgcttacctttctagctgagatgagattttatgcttgttactagcagatcaatagtgaaagcaggttctgttaagttttttataggagtcattaatctccctcagcctcagtttccctatctgtgaagtgagtctaaccaggatgataatgaagagttaggtcaagtgaggttggcagccagacacccaccaccagctgtaacataagaacagatgttctctccagacccccaggtcagctgaggtcgctctgcttggaataatgaactgccacattgaggatttttttcctctctttacttggccaaatatccgagtgtggaagctctcactgtgaacctgctaacatacatttcagtgtctacaaaatgtcttttgagagaaaacagcagggacattcgtgagctcttttttttttctaaccactttcccagtgagacttcagttttcattctccccttagcagctttcaaatatgtacgtaacacaaatgttacatgtttgagcatttaaactgaatttggacagggcttctatttccagaaccttctaactctatttctttgtgacctgatagtcttgctctccagggtaaaagaagaggatggaaatggctgtggggcgcctgagctgggccctggcatgatggcaagatgccgttctgggttcactgggatggctcaaggggagtttggaaaccctcctaacatgtcatctgaaatctgggaccacagttccggctggaacacttgtcactaaagctgctgataagcaaagggtgtatcactggtatgggtaacagttgtgggaggaggaggggtctgacagatagccggatgattttaatgtttatattccactggggtaagctctaacaaagacccatcatttcccagataaccaattcttttaaaagaacatctgttgaaactggcaatttacattcttcttaaaatacggagcgacataattaaccctctggggagactaatattagtttattagagacaatttctagttctgtttatttttaacactaaacgatttgttcagattggggaaaaaattttttttttttttttggttgtggtggcgttggcttttacttggggttgacctttccttatcaaggacgtacaaggtgaatagctgggtgataatatatggtcccatgatcatcaaccaagcaccaacggaagccttttggaagtgcacagtattgtttaacacacaaataactcagcgtttagtaactttcaggtacaatcagtctattttaaagggacctcatgtgttattcatgtatgtgcacatgtgtttatgcagttacctttgtcttcattgatttggactcctttggtgctcgtaattggtgaaattctcttgtgatcattgttgtagttcccgcaaatctatttacggttttcacaaggaggtcacgaacatgcgttgttttcaatgctgggctagtttcagacttctggcttgttgtgggacggaggagaaagaagacagggcattttgatgtggcccagagaccaaatgaaacaaacgatcctctgattgctcagatgtcctctttgacttggaaagcacccacgtgaatgttgaaccatttggccctcagttctccgtcctgcagcaaactgcattgactcctgttttctacacagtggtcttcagctacaccttaccaagcaccccttacccagcaaacgtggcttctcttccccaggcagagcagtccgttacttagactaggaaatggctccgagaagctcacccatcaccatttgctctactgcaaaacaggactcattagcaggagctcataaaatgaaactggcagtgagctcatatggaagaggcatcacgggcaactcggcttggctcaccagcccctgagctgcccccgagtgaccgctccagccttctttccttccacctctccctcttggccaacttcatgcttcagccaaagtgaactgagctcaccaggctgagtcatctgtgccagctgtgccctctccccgaggctgcctgccatgctcgtgctttcttgtctattggcaaaaggctctccatccttcaaaatccagctcttggcctcatatcttccacaaagccttcccagacctttactcacctgggccattaatcaccttccctctcagtcagctgctacaccatgagtgcttttgtatcgtgactgtctggttacaaggtcatcttttcccctggatgagacgccccttggggaaaggaccaagttttattccctgtttaaccttggcctgacaacctaataggtgctcagtgaacagttcttgaatttaattctctccctttccccacactgatgggtatttaagctccagtggtactcgatgtgttgttttctttgttcttttttttgagacagggttttgctgtcacccaggctggagtgcagtggcagagtctctgtgcactgcagcctccgcctcccaggttcaagtgatcctcctacctcagcctcctgagtagctgggactacagttgtgcgctaccacacctggctaccgtgtcttgttttcaatgcagtatataagagggtgcattgtgtacctgtgggagtgattacagaatcccatcaaaatgggaatcactgactgaaaactggagtttatttgtaagctgggagatgggagctgaatttgaaaccccaggagaaaatagcatataaagtcattttaaataactatcatttgcagaggaggggggcacagatgcctccagtggcccaagactcccctttacacattgccgttcccttgccttctactcctcttttcattacccttatcaagattctgcagcccagggtgctgcttgttgatggacatcttcacctgactttctccctggtccaggtgcattttaagcatggaaggtgacacttgccattctcaatggacaaagggagtgggggtgtgggggtgtgctttggggttagtctctgggttttcgaaacttagcattctcagattcccagccaactggtttcacatgacaagtaaatgagcaacctggaagatgagtggcgtttccacacacagggaagcagatagttccattaggtgacagtgtgtgcacagtttatggaggatgaagcgggaaacctgagccacaaggcagtagaggttggacgagacactcattccgaaggcgggtgtgtatgtgcaaactgtataatttttttcttcttttctatctgctagcaaagtgggtaagttgacccatgacatcgtccactggagggaccacatttgtgactctagcaattaagcctcccttctcatctgtggataaaactgacctcccagtgtgctggagtcaaacatattcagcatccaatccacattggactgtttgcatgtaacgtacagaacactcattcatctacatctaggaccataacagcgagcaggagacagtccctgaccctggggactaagcccaggacctgccactaggagatattcatggaatcactgtttctcctccttttcaaagaagactgaatttatgatgaaactttcttcgtatattggctttgagaaattctgttttggtgcttatgtgctctggataattctcaatgactttcaaagttatgattcagggagtaattggttctgagagaatatgcataatcacatcaaggtgtgtttgttttccaccatttgtagccttttgacaaatttctgggggcctcatgcctgctaggccgaatacttgtgtcccttgagcctggagacggcaagtacccagtgtgcatgcatgcactcccaaagtcctttattcacgacagacatcactaatcaatcagtcatgcttagcatactactccaagtagtcattactaatcatctctagtcagcatgggagatactctttaccatcccggtaaagtgacgttttgatgaaaacagcatggatcttcctgcagagaacagactagccccctgtacagcacacaactcggggaattttaggtttggtgatttactgctgttggagcctggacttcttcctgggagaaggctcgaaaaacttcatgtcagttacttaatggaataatacatgtttcctgcttccattgtcttcctggacctgacactcactctttaaccataagcagaagacacatacacaaatgtcctatgttaagaatctttatttaagacaggtggctagcattatttgggtccagaagcttccctggaaagaaaggattcactgcaagatcgacaggcttacccagttcatttaggcgtggcttgatttatgcacacaaagctttgggaacatatcagtcacatcaagctaggtccacctgtgtgagtaactaacgtgtttatttatgattttctttaacagcacagaagagcaattgcatttggtcattctagtatcaactgagttctttataaaatatctttggggtgtttaaggagaattattctttttacaagttctgattaatgacaccgcaaaaatgaaaataatgagctaatatgtatctagtacttgctatgcacttatatgtatagaagcgtataatccacagcactccttctgaatacgttacgtaaatggaaccctcgcaacagtcttacccccattgtagagatgagaaaactgaggcatacagaagagatggaactaggccaagagcatagaggtggaattgttgtgtgagcctgtagagtccgtgttcttacccactgcatgatgtctgatcatcgtcaattttctttccatttggatagatgaatggtaatacttccctactaggtagagcaatgattccagaagtttataataattggaaagtgtattagtcgattctcacactgctataaagacattcctgagactgggaaatttataaagaagggaggtttagttggctcgtggttctgcagactgtataggcttctgcctctcgggaggcctcaggaaacttacagttatggcagaaggtgaaggggaagcaggtaatgtcttcacatggctggcagtggaggaagagagaaagtagggaggtgctagatgcttttaaacaaacagatctcaggagaactctttcacaagacagcactagggggatggtgattagaaagcacctcatgatcccgtctagttcctgcagagaacagattagccccctatgcagcacacacctttgtgaggtcccttctccaacacagggattacaattcaacctgagacgtgggtggggacacagagccaaaccacactggaaggtaaaaaagttggcaaccagaggcttagaggaggttcaaatctcaaagtgatgtctttccttttgcattttggatggtttaataaataagattgatacaaacacaagcattaagcaaacaaaaggaaataaaaacggcaacaaataaaacttctgtgctttttgaaattctgtttttggcaggcaacattccaaagatctttttcatttaaagtccaggagtcttctgtgtgaaccccacacaggtaccttggaaagactgcatctcctggattttgcatggttctggcttaatggacaacatatcagtcattttttgaggaaaataaatttaaggcttggtcatcggtccttgagtcagcacattgagcgttttgtcaattagctcctccccccatctttatggtatggcttttcctgtaattacagtcaagatcctatagccggaggaaggcctgtcaattgagtaagaggctgatgttcatcgcacagtgacagcccattcggagggttttaggcctgtccttagagaggcttgttatttcctctttcggtactttgttgcaacccagctcaccgccatcagatgagtggaggtttcttatgctgtggcgaaacccagggggtcaagcccctcggacatgacgtactgcaaagtgaggatgtttcattgatttatatttttaaaattaaaaataattatttaagctgcatctgtgtgcttataagaaaagatatagaaagattagtagtagactgttgtgttcttttttttttttttgagatagactcttgcctgtcgcccaggttgcagtgcggtggcatgatctcggctcactgcaacttttgcctcctagattcaagcgattctcctgcctcagccttctgagtagctgggattacaggcgcccgccaccacacccagctaatttttgtatttttagtatagacggggtttcaccatgttagccaggctggtctcgaactcttgacctcaggtgatctgcccgccttggcctcccaaagtgctgggattacaggcgtgagccactgcacctggccagtagtagacttttgatagggttttttttctcaaggtgtagatttggctaggaagtcatagaaaatggtctttttttttttttttggagatggagtctcactttgtcacctaggctggagtgcagtggtgtgatctcagctcactgcaacctccacctcctgggttcaagtgactctcttgcctcaacctcccgagtagctgggactacaggccaacgccacggcacctggctaatttttgtatttttagtagagccggggtttcaccatgttggccagggtggtctcgaactcctgacctcaaatgattccctgcctccacctcccaaagtgctgggattataggtgtgggccactgtgcccggccaggaagatggtcatgttttactttgaaccaatctgtgcttggtttatttttttcagtgagtgtggattacgtttataattttcggttactagttaggtaaagaataaaaattaataaacacatttatagttctcagagattccttgagagaggaacatctttaaacggataaccacagtcttctaaacacctgaaagggtgtcttttgctgaactatggagttttagttttgctttagaatttttggatgattagacttgtacttcttttaggctatttttccacctggtactatttggctttactgactgccctcattccccatacaccaccttgttttgttcagattcccctaaatcttcattctcgtcccacctccccatcactcctgactacttgaaacacgacttctgtcctcagaaggcagcagtgttccctcctcccgttcatttttcattttcccgttgcttaaaaaaatcaagcatatgtttgcagtcatcactgatgttctgcctcctcttctaaagttatagatgagtgccaagttggcagagcatgtagaaagatcactgcagatgtccttgtcgtgttgaccttattggagaatttcctatctgtgatgacctgtaaatggaatttaagggaggaatcaaacgtgttagcacggggttggcattgcgtggctgttttcaattaacttgaccactatgataacatcaaaggtgtgtgtaccattctatgaccattgaatctccatggacatgttttgggaaatggatttgtcccattacactgctttctttagtgcataagatcttgaagggagggatgcattctatgcaccccaagtttctggtttactcgtggtttcaggtgtccctttagacaacatcactgacaactcactatgtaaaaccaaacaaattattagctttcttactgtgtgtttgcatttgctgtgcccagggaaatgggaagtgcattgaggaagaggccccaagacatggagaagtcactccaactttccggaaaccccttttgctgtgccatgtgcatggaaggagaggaatgaatgactgttgaagccagatggccttgctcattgattctctcctttcccgccctctcaagccatccagaaggagaatgaaatgctcaaatcaagggagttaactatggcaaagatgttagtaatgggaaactttggaggaaggcaaagtcagaaattattctgcagggagatttggggatgttggatgctaaggcccaagccgtctattgtatgccttttgctttggcataaaacaacagatgaccttctgttaggtgtatgtctgctcatgcttgagagtggtggtgtttggaaagactcaatagcatatgcacatgaggaagttgaccaaatgattccacagcacatactcatttttttgctctgattctagcttttcctccaattttattcagaatttgttcttttcttacctcacaccatatagaaaaatcaactcaaagtggattggagacttaaacataagatctgacagtgtaaaattagtagaagaaaacaaggaggaaagctccatgacactggtctgcacaatgagtgtttttgtatatgaaccgaaaaacaggtagcaaaagcaaaaatagacaactgggattacaacaatctaaaaaatttctttacagaaaggaagcaatgaacagagtgaagcagcatcctacagaaagagaatatttgcaaaccacacatgtgataaggggttaatattcaaaatgtacacacagcgtaaatgcaagaaaagaatctgatgtaaaaatggcccttccaacatctagcattattgtgtgttgaataaatacttgtttgattaggtctaatcactcttcatgattggatttccaaaatgtggactctcagcaggacattacagggacagtggttgggtctggagatgtcacccttagctgtttttcacaatgagaggttgttttatcataaataaatcaataaatggtagattatacaccggagttactgagaattataaaaaaattaaaaaagcccacattttaaagggaatttggtatttttaacaaagcatcagggggctgggagcagtagctcacgcctgtaatgacagcactttgggaggccgaggtgggcggatcacaagatcgggagatcgagaccatcctggctaacatggtgaaatgctgtctctactaaaaatacaaaaagaaattagctgtgcgtggtggcgggcgcctgtagtcccagctacttgggaggctgaggcaggagaatggcatgaacatgggaggtggagcttgcagtgagccgagattgtgccactgcactccagcctgggcaacagagcaagactccatctcaaaaaaaaaaaaaagaaaaaaaagcatcagggttgtcaccatgaagcaggaggagaaaaataatgctgttagacttcttaaagcgtattttgtggtttattttattgctctgtaaattgcaggctgtaattcatggggctcaggccagtgatttcacagttgatagaccaggcacatctcttcccaccccttccccacctaggggcaaggttttcaggaagagccccttttctaaaccacacatggcctgctcacaaatcttatgataaaactctacccactgagaagcacaaggtgtgaggctattgatgaggagttgaaggtgacagagaccgagaaagtgctgcacacctttggcctaaagggtaatgagcaacacacaaggattgggagatgttcatggcaagaaaaattcagaagggacattgttgtttcactaattctgtaaaggagagcagcggcatttacttaggccgattccccattctctctttctgtttttaaacagagacagatcttgctctgttgcccaggctggagtgcagtggcatgatggcatgatcatagttcactataatctcgaactcctggtttcaagtagtcttcctgccttggcctcccaaaatgctaggaatacaggcaggagccactgttactggtctgttttttttccttaaatacataggcaacttcctcgattgtctctcctttattggcattgagagataagcacaataatgattgttaagatggaatattatgaaggctcaaggaatacttctgaaggctttttgtctatgaagtacacgaggtttcttaatagtttggcctctggcaaaaatggttttattgtagtttcatccttgttgagtcaataattaactgagtttgattaaagctgaattttcctaagtatgaaaaccatgtgggcccttctctttcctcgtgatgcacggtgatagtgcgtatctaacacttgaaggtgtccacgctggccctagctcagtgagatggctttgctttgggggggtgagggggcggaggtggtggaaaggcagcaagctacgatgttcttatgtgtgtggccttgcttctggtggtggggtggcacacatgctctgtagtctttctggatgggtttggcccacgggagaccccctggctgtccaccagcccctttgtgatagtctcatagtcttatttgtcttttggcttgtatcccacctgttcactttttaccatagctaacctttctaagtggtcaggtgggactcatggagattttccgttctttggcaactagcagcgactgcagattactcatcagctgtctccttgagtccacaatgccgggcggtggacgggcttcctgcctcctggcccagggcccctttgccggctcttagtgtagagcactagttgtaccatctggtagttgtttgtgcctgcgactctcttccctattaggctttgactccttaaggataagaaccatgtcttattttttttaatctgtagctccagtatccagcccaggacttgacaccagcctctgtcaaatacatccgtggaacgcatttgtaagaaatcgaggccaaggcactggaagtcccattgtctctggatgctgagaccttgaatttcatgccatggacccctcccttacattccgtctttaatgtgctataaatagacattcctggccttgcctaaataggattaagtagtaccaaatggtccttaccgttctgaggcctcactgagactcattttgaatctttaaagaaagcagtagagggatggagaagaagtgggtcaaaacctggtttctgcctgtgggaaaatacaaaacaacacaacagcaaagcagactagcatggttcaaagcacacattgaggtttttggtgtgccattctaatgcatgagctcattttgagccaaggatagctttttggtgtagaattttgccagtcctacggtcaatgcagtactaattgtgtgtgtgactttgtgcagtggggaaaggtggggctttaaaataaaacagaaggtatgaattgcttggcatttgctgtggttcctaagtctccattccgcttgccaagattaaattgaattattcccgctgccattcagttttactctgcacaaaatacagccaacatttttgcatttctttcttccttcctccttttcttctttccttccttccttcctttttcccttcatctatctttgttccgcttttgtttgtttttttttagatcgctgcatgctgccgcgttgggttaaccatggtagcattttaccatgagaagccatagcaagatgtgccaggtgcatgctgctggaacacctggctgaggctccaacagcattttcctatgactgagggtagggtaggtagatgactcattacaatttataaaatggggggcttagcttgggtatcatcgtggttattccaagcagtcttccagctggactagcttttcgggaacacgtgtgtgtttgtgctggaagccccagtaatatcatttaattcgaaagcttttttctatgatgaattattcaggcagtgtttaccaaaattgtcattgatcagtacagacccagagagcatgtacaacagcgcctgtgctgggcctgctaggagtcgatattttctggctcaaagaagttccaaaagaattcaaagccagtgtgtctctttctctggacggccaagtgatgcaggtaccacgcttaggtctgctggtgtttagcttgacttaaaacccagccagggaaatatgtttcactttgctggggtgcaggtggaggaggctattattcttaggcatttaacagtgaagaatgttgggcagggcagagggtcagctgaatggcagggattccaggtctcagttaatgcccacaaatttctgaactttgaacataaataccctcactgcaatacatgtttttctttctctctctttctttctctttttttttttttgaaaaacttttttggagcagcacctgcatgttgtaaaaacacaaaataaaaaaaaaataaataaaagcagaccccttggttcagatatctttgtttgtgtaaatgttttggcattctttatgaaaatcttcagattttcaagagcttaagatgacctcctctagccggctgcagcagtgtctaggtatctgtgaatgtgtaagaaattgagacagcctgcaaaatagctcacccagcttttctttaaagttccaacctttttgctggctctctttcaaactgtactgctcactttgggctgtacgttagaaccacctgagaagttctttttctttcttttttttttttgagatggagtcttcctctgtcacccaggctggagtgcagtggtgggatcttggctcactgcaacctctgtctcctggcttcacgccattctcctgcctcagccttccgagtaactaggattacaggcatccgccaccatgcttgggtaatttttgtacttttattagagacagagtttcaccatgttggccaggctggtctcgaactcctgacctgaagtgatccacccacctcagcctcccaaactgctggaatctgagaagttacgtgaaactagcgatgccctgggctaatgaaatcaggctccatggtggggaaggatgttgcggtggggttggggtggcaatgaaaggtgaaaaccactgtggtcccacctgcccatcgtcagatttcggttcctctcagagttaacgtagaaggtttctgggggcatggacctgagtcttatcccctttgcaaaagtaagaattgtatcgtagcctgactcagggttttagccaacttctctggatgctaatgctattctcttctttatacttgtcttccttcccaggcacacatccactggagctttgcagggcctatctgcccttagccctccaatatccttttcattttctttaatagttttattgatatataatgtgcctaccatataattcatctgcttaaggtgtacaattcaatggcttttagtgtattcagagtttgcatccaccatcacaatcagttttagaacattttcattaacccaagaaaatgaccccttagtcatcaccccaaatacctcctctctccagttcctggcaaccactaaccaatctacttgctgtttctatggatttacctattctgcgtacctcatataaatagagtgatatgttagtcgtctcttgtgtctggtttcttcctcttagcatcatgttttgaaagtttatccctgcgacagcatctaccagttcatcatttctttttgtggctaagtaatacgccattgtatggatataccacattttgtgtatccattcattagttcatggattttgtgtctattatgaataatgctgccatgagcatctgtgttgtccacaagtttcagcatggacttctgttttcattccaatatcctttgatgacatgtcttggcagtgatgtctatgacactgggcaagtgtcttaaaatgttgtgcatcagaaaaaagtcatcattgccaaggccagcagatctcgaaaagggggctgggatacgttggtgatttttttcatgctctacttacagtatgactcgtaactgttaatggctgagctcctccttaggtgaagaaggaaggcaatggcgttttctattctgggcctccctgcttccagcgatagcaaggagcgaaatgagatgctgtctaagaaaggaaggtgctgcgatctttgattactacacagcctcggcagtgtttgtatgattaatgagtccatgtttcagacgttcccatttaatgtatttgagccttctaacaacattgcctttcatatgttgctgactgtttttgagatttatgaggcctaactcgcaagcgatgtgtgtctggattaagagaacctgagaatctctatttatgtctgaccccaggaaattccctttaagctgcttatcagaggtgcatgctgagagcatgatgggaagatggagtcttccatccgctggtaaaatctggaatctgctctcatttcattttcactgaactgaaaataaggtaacagaccctcaggtctacctataagtaccttccaactgttccacttttgtaaatttagttcagataatacatatgctgaaattcctatatcccccccatactccagatcttcagtgtggaatttaaatataattccttattgtaaaaaaaaaaaatttttttttgatcaaggtgattttgataaactaaatgcatctttaattttactcacagcaaagcgattctttattttctctctaaaagcataattgatgtgccatgatctttgtctttgcatttttaaaactgaaagaacatttccacaccattagaaataagatttcttcttaaaaatattcacaaggtgcaaacacttacatgtgtatatgcatgatttcaccaccagggggcattgtggtttgactgtccagttaaagagcctgtgttctatcagtttacccagaaactagaaggcctgcgagtatttctgattccttccaagaaggattcatatctggaagagaacagatgtcgactctttttcctctctagcaaacagtagtgttgtcaaatttgctaaacttagccagttgaagattaacatgcaatatataatatgcatgcgactaagtgtacaataaatagtaaatcacatttttatgctttctctgaacttggaagctgcaagttatgttttttttattccctgggtgtgatgaaataaataacattcaaatacatcttaaagatgtcagtcagggggaaaaaagtgcttggcaactgtgtttgatagatttcttttatgattaattctcctattaagttttaatgacttcaaagatacaaagctagaaactacaaaactaggcatggttaataaataactgaaataccaggtgtatagaaatgcatctgtggaaaaatgaaatcatgtattctctaggatatattaggaaatggctctttggcaagtctagagggtaaagtatccctgaagggggaaaaggtttaaaaacagtaaactaaagaagattgtttttctgaaagaaattcccaggagaaaggtactttctgagattcacatatgtagattacattgttatgaaccaacatttataagcaagcttgatctctcagaatgcgtttgtctatctcagattttcaagaatcctcatacaaattgtccagggtttccacctcgcagttttcttccagggttgctatggcatggaaagtacattgctattttgttatgtaaatgctcaacagactggctcattccagaagtgggcgtcgtgatgccagtgtcttcgtaatactatctttctttcccctttagcacccagaacttatgaaatatgactcggtttatcctgaacacatctctgtgcatcggggaggatgggagaattaattccagtttctcaattgcaaaagtgaggctggtcatggggcttggaaccacgccacggacgcatgaagcctccccgtttacatgccaaatccagagcttatgcatccgtgctcagggctctctgtggtaggcaacagctggattatttactttctagaatatctcgagttcttaatctgagcagtttcgaaaccaaacccacattaattaatataaataatgactgggaaacgttgcaggactccccggaaaagaatgtataaattgatgtgtttttgtatatgcttatgtatatgcctttgtgcacgaaaggagataaatggtgtatttcacacagttccttctcctcctctaagggatattattgttcctgaatttttctgagccgccgaagcacaatagggtttagagcgttcacaccaggcagcccccactcttcagaacttcaaatctaaagatcttttaaatacacagaacttacttttgaaagctgtggcccatcccaaatgaattctaatcgtcagcctctagaatgcctggagtgagaaaacagaatattgttcttttctgtttatattatttcatactgagttaatacacttgccaagactccgaggcagcttctggcttgacaatgccttctttaactagcctagtttctagaataaagttcgggtccaccaggccctctgagtggggctcaggacactctgagatggaagagactggagaaagccaatctgtttctccctgaaaatcatcttacttttttaacgcttcgtacctagatttggcctgggcagcccagggagactgttcaagcactggatacctagactctgctgggctctagagaagtgctgggctacagcgcccagtgccctacctcttggggccagccagcctcaccaaaaaatcacgcttctggcttgctccaaactcaggaagttgctgggaagtctggctagcaacaccctcattcccagtcctggccatgcctctctgctctccctagcacagggagcatgcaggcttaaggctggaagaaaccccaagcatttggccaggaagaggcaactagttccagctggcccacatactacactttaaaaattacccagatgatctgattctgtagagagagtgggtggagaggactccagggccatggaggaagattcggcctttctctccctaatcatgagcaatgtgatttggagagagaaggacccggttggctctgcaaaccgcatttccttggctgaacgccagaggagagaaatgatccggcaagaagacacaccattccccgtcagccccttcccgacccttgcacccctggatcttctgctgagtatcggattggtctgcgtccaagagctcctcgcttggccagcaggggctgcctggagaaggggaggacaggcttcgagttttttgggtagtgacttctgtggacgtgaaaagactgcaccagaaatcggaggcagccctccaaacataacttggcctcttcgttctccctgtggacacacaggctgtgttctcctggccaagagtccaagcgtgtttttggcgcgtgctgacactctatatcgcttttgcttcggaaacgaatctggtcagtgacttagccactctataaaaatgaagagcagagctcgagtgcttataacacgtcatttttacccaagacagagaagaaaaacgaaagagagcctgagcattcctttgactccctccacccccggaaggtatattcagagtctccaagactgcctccgcccactcacatgtttatggcccggtgagaccgcatcctccctttctatatctgtcccttttctggatgcagggacacagaatcccctaagtgggaagagctttggagtggaggctgttcaaagttctgtggtgattaattattacctacccaaggtctggtcattgctatacttgagttcttttcaggctcaagatctctacctttttgtgtgtttttttttttttttttttttttttttttttttgtacagagtcttgctctgttgtccaggctgtagtgcagtggaacaatctctgtatgctccctgcaacctctggctccaggtttaagtgattctcctgcctcagcctcccaagtagctggaactacaggcacctaccaccacgcctggctaattttttgtatttttagtagagacgggatttcaccatgttggccatattggtcttgaactcctgacctcaagtgatcctcccacctcagctgcccagggtgctgggatcacaggcgtgagccaccgtgcacgacctcagggtcccttctaacctgtgctgttgtcataaaccctggaggagaagcaagatctttctagcaggagcaacatcatcccaaataaagtgatagactttgatagtgttcttctattcattcaaccaacagagaacaaatgaaaagaatcaggagtctattgaggagacagaacatgagtgatttctgtgtgctgactatatttaaagacaagattagcagtaatatataaacgtaaataagaatttttttccccagccaagaaccatagattggacttcacattcaaaatgtaaattgtgcctaggaaacatcaatgcttattttaagcaactgacccttgggataaaaataaaaagtcaaaaggaaacaaacaatgttgctgagaagtgatagaatattctagtttatatctcagtcattttacagctctggcatttctgggtaacactttagaatacttccactccggttggtccataaaaagctgcctgtgtttttatgttttgaaaatacacgcagagagacccactgcatgtcctattaggcatcttatccttgagtaagcaggcatgcaacatcagtgtcacacacatatcacccccatactcgacattctttgagaaatgccttggtcccgtctccagccagatcagcattgcacctcttggcatgcgttcttacctgttgaggatttgcttgaattataatatggtagaggaggaaacacagtcttactgtgccgtgtgctgagcgcagagccattctcagcatcctgccttgattaataaggcgtgaaagatcctccgaattcgcacctgttcagacaagcttgtccaacccatggcccccgggtcgcatgtggcccaggacagctttgaatgtggccccatacgtatttgtaaactttcttagaacatcaggatttttatgcacggaccttttatgcatggactgtggtgttttttgatttttggttgcgtgcgtgtgtgtgtgtgtgtgtgtgtgtgtgtgtgacggagtcttgctctgtcactcaggctggagtgtagtggcatgatcttagctcactgcatcctctgcctcccaggttcaagcaattctccgtgtctcaatctccctagtagttgagattacaggtgcccaccaccaagctttgctaatttttgtatttttttagtagagacagggtttcgccatgttggccgggctggtcttgaactcctgatctcaggtgatcctcctgcctcagccacccaaagtgctgggattataggcgtgagccactgcgcccggccttttttttttttttttttttttttttttttaacgctcatcagctattgttagtgttagtgtagtttatgcgtggccgaagacaattcttcctccactgtggcccagggaagctaaaagattggacacctgtaaacaaaaacaacacagccatctagctgcaagacgtagctaattgctctgcagaacagggttggccagcctggccttgatgtcggagtgttctctagacctcacacccagtccctattcttaggttttatttctcaaaccaggttttgcctgagaaattacagcaaatgattcagagcacaatgatgttgctcatttttgataagtagttgaaagctgatggtgccctccatttcaaagcaacagaagaaacgctggtggtcatggagaaagagttgggaagcagagcgtgaatgccgggatctgcagatctgagcactatgcctgcagccgatgtctctccacagggctgatctggtggctggggtgcccctggtcagaaggggtgattactgtttcctctctctccttggtctctgtcaaacctaccaactcttttcaggaatgcagatatttaattatcttctgctgttacatctgcatcatgtattggctggctgttcaaaagtatcctctctaggcaaataacgagatttcgccagcaggatctcccgttaaaggcgtgcatgtgtggctttgtagacacgtatgtgtgtgtgcgtgcacacctgcctgcccttgcacagtgggcactgtttccagtgtgcagtgaggccctcccttcgtgtagaacaggacaggacaatgacaaagttattcaattaataattgaagcttgccgggcatggtggttcacgcctgtaatcccagccctttgggaggccaaggcaggcagatcacctgaggtcagaaattcaagaccagcctggccaacatggcaaaaccctgtctctactaaaaaatacaaaagttagccgagcgtgatggccagcacctgtagtcctagctacttaggtagctgaggcaggaactcgcttgaacccgggaggcggaggctgcagtgagctgagtttgcaccactgcattccagcattggtgacagagcgagactcagtctcaaaaaaaaaaaaataatataataataataataatcgcacctcaatactccgtagccattttaccgcatgtgactattagctgtgcttttgcggttatctacgtctgttgtgtctatacggtggagtatttgcagacgctctgccagtgtgcaatgcttcccagccctgcattcagggataccaacttgggtgctgaaaagcagcgatggcaggactatttacaccacggaaacaggcaaaaactactgatcaagccttcactgttttgtttatattgtcttgacttagaaagtgattgcaatgttaataatgcagattaaattgaagcgtacagtgcctataaaccattacattatgaatagtataaaaaattgaggaagccgtgtggctcacaaattcagcactttgggaggccgaggcaggaggatcacttgagcctgggagttggaaaccagcccaggcaacatagtgagacctcatctctttaaaaaaaaaaaaaaaaagaaagaaaaattagctggcatggtggcacatgcctgtagtcccagcttctggggatgctgcagcgagccatgattgtgccactgctctctggcctgggcaacaaagagagatcctgtctccaagtctgtctgtctgtctgtctgtctgtctgtctgtctctctcggaaatattccttcagtgtattagtaaagaagttacttaggagtcacttatgcccttgaagagtgagtgatgtatcaaaatatgtctgtctttattgtttcactttcatccttctttttttggagatggagtcttgctctgttgaccatgctagaggtggcgcgatctccactcaccgcaagctccgcctcctgagttcaactgattctcctgcctccgcttcccaagtacctgggattatagacacccaccaccatgcacagctaatttttgtatttttagtagagatggagtttcacccttttgattggttggccagtatggtctcaaactcctgacctcaagtgatccacctgcctcacctcccaaagtgctgggattacagtcgtgagccaccgtgccggccactttcatctttctgattaactgaaaagtatcaagcaatacttacatgtaactgcactttctcatcaactgcaaccataatttagctatggatacaagagttgggcacaaatccatgaaagcattgagtgagaatcaattggctctgtgggatttacaataaagaatgttgtttatttttatttgtaaattgtgtgctacagatccttcgtatcagtaaaatgtatgataaacatatgtgtgtatattcacacacaccctttcattttggcaggagtgtttgttaaacatttaccacagcagtggattcacttccatcagctgctaactttcaaggatgtttgaggatgcatgacctgtgcaatgcacctgcttcggtgcctggcacagagtcgcaaagccacaaagatggtgcttgttggttgtatgtgttgtttccatctgatatcaccattgaggggagcaagatgacatgtgcctaccccacgtgtccagcagcaaagccacctggcatagtgggctgctcagcgtgcctggttcatactgcgtgtttatagtcccagggtgttttcagagagcaaaagtcctttatgattagcaaattgcaggtcctcccctttctgatatttacagcccttgcaaccgcctgtacaaaaatcgggaaaaggcagaagacggctgtcattaatgtaaaagcagctggttacctccccctccccagcgcacacatcacctcctagtacaattagtcaccatgtcttttcccttccgtcaagccttttagcggagttcacagggatgccttcggtccagacactatgaccgttgacgaaggatttgaaatattttgagaactctgaaataatgcacaccagaaacgtccagctgaaaacaaaaagggaacaagatgacattttgcaatcccatgcacgttgcaggcacgttgaatgtgaaggtcagtagtacttcagagggcaggcctgttgcccccaagcctgttgcctaagaaatgcccaggccctttgaacaaaatggattcgagtgattacagcacgtcctcacttacatctcccaatatatttcttgttattctcgttgagtactgcattcagacagaggttgccaataaagtttattgtaggagctaagtgtcaatatctgtagtaccccccgcctagggtgctgctaataaaatgccacagatagtctgggagaggcatgaaaatttgatggcaaattgatttcaggttcatcttgaaatttgtcctcagctggactcgatacttctggcagacatgggatggcttttgtcagaagggtctgctggaatgagacagagatgtcttgatctgaatattaaatacaacatgctgtttatgacattatccgtttactgctaaaatacccagctacttctgtttacacattcttctgcgttgaatgggtaagatagcatctcatagatccactttacatatgaaaagaagttgtatcaaacttgctgggcatcagaaataaagggttttagagacactggcttcaaacacaagttattccatccaagattctaaacttagcaatgcaacttgcacttaattttaaaacgctggaaaaataatgataaagattgtgtgatcaagtatagcagccctgtggtgtttcctcagaatggtgtattacagaaaaggaaaaagccatatacatggagaagaaactcccgatatttaatattatcaattgctggttcctgtaaatttgcatttatggatcacattataaaagcaattactcttatggattgttcatgcagaaatgcactatgatgataatatacttttaaaagtatatttatttccagaattcaatttgtaagaggtttgagggaaaaataatactgagttttgagtgtttctgattttaaaaatgtgttgagtagaattaaacgtgttcaccaaaacccattttatcactttaaattattgggcaattaattgtatttacttagcattgaatgcatgattagaaatggaatttttaaaaaagcaatactcaagtggagtgagttcatttgttcattcagcaaataggacttgagtcccctactatgtgcggagccttaaaggatgagaaagatttctgggtgggacttcaatgagactcatttcgcaggttttcatgttattatgtatatgtggtaaataattaattttttcacaagtacttgcactagtgatgctaaaataagcttgactggcttgtaaatcaatgaaggttactgttgcattgctttgaaattgaatttaaaaacagaaacagagcagtccctttgcttccgaatgcagccctcccattggaatcactttggaagaatctggatctgcgtgttacccagtcttacttttcaggcagtcccaggcaggaaggcccattagtgaaaagagccctgcatatgctgtgggtcatcacagctgctgctttgcacatttaggagatatttgtggacctttcattaggacaatttttatggcccgagattaaaagttaaagttaagtagtaaacgtaatgaacatgtgcctttggagattccaactggtttgtattttcattctctccgttggtcatggcccattgaattttgatgatagcattaaaacaaatgcctcaaatcatttttggaaggagacaggatatgaattgacaaattaataaaataaattatacttcaaagatgctaaattatctcttctatgtaagtaggaggctctcttttcagatgtggaatttgtaggagcttgaatattctcaagagagggtatgggcaacatttgataaaagatgtaattattgggtcgtaggaaataatgattgagatagggtatccactgccctggtgggggaatcagtgaggctaggaatcactggaaaatgacattccttgagactccttcaatgggtagagtttgctttagcttttcatgtatcttactgtatgatggttgcttttgggttgaattccaccttgggttcaattcaacatgaaagttaaccttttggtgaaggaatgatccaggggaaatagtaaaatattagcctgtcctccaatacaaattgcctgtgagtcccactgatacttacaaatatacagaggtggtgtaaaaggattctgtgtcaaaactattaatatttgagaaatacaatacttatcagagcctttgtatgtaaatgtctcatatacccctctaagaaggggagcgaatagtattttccaaacttacgtcaccacttaccatccacctgcatactttacacgtcttggaatcaaccttacagggaacacttggtcgaaaaacagtgttttctaaatttatattacagttcccactccccccccccccacttgtatcactttgtatgacagtcttcttgggaacatccattgggaaactcttcccttgcaggtgtctgttacaagtcctggttcacacagtgttgcgaaagaatagttgtatgtcacaattttctttatatagtatttattgagaaacctattctgttaatagaatgactcaaaatcagccaaccccataaatactgctcaagcatttagaaagactttctctatagaggcttcagacgtcagaaaaaaacttagagagtgactttcagatacagcaacctagtctatgttatagaacattctaaaaagagcagattttaatatctttcctcccacacttgctttgactccctcctttagtaattagataattatgtataataagcacattaattatgtgcaacagctgccattgagtgtgtgcatgtacaactgcttgaaaacagcttgtgagttcactattaggtccatgaaatttttctccttggcaggttttcactattagtttgcttgacaaaggatagatacattttccatgtgtggaggtaaaagcagtgcagtgagctaaaaagttagcaaaggtgaagtggtcctaatctgcggccctggtacacttagataggcatcattgcctttcctctgagctcttggtgctgataacagcttccttgaccgataagtgtaccagatttccttacctgtcccagggcaagatagcaagagtttcttgatgcatttaaaaaatgcatttagtgttggcaaaaggctggcaatttattattaagtggaataagcagtttaaaaacagtatgtacagggtggttttctggctatataaacacacaggcattgaaaatagatatacataaataatgttactataatttgtctgcctcccttctctcagaaaagaccaatgaattatctattatgtgccactcactatttgagtgctgggaatacagccccataaagtgaagtttcatatatcaggtagcaagatggccatggtctgtgttttgagaatcacaggcgtttttgaggctcatggctataatcccagcacttggggaggccgaggcaggtggatcacctgaagtcaggacatcaagaccagtctggccagtgtggcaaaaccccacctctactaaaaatacaaaaaaaaattagctgaacctggtggttcacgcctgtaattgcagctactcaggaggctgaggcaggagaatcacttgaacccgggaggcggaggttacagtgaaccgagatcgtgtcactgcactccagcctaggcgacagagcgagaccctgtctcagaaacagaaaataaaacaaacaaaaaaatactattccatagctgactattttctgaaatgattttgttacttttctaatgagaaaaaaatagatctcgtgtgtggagggaattgaagatgtaatttcagactctgcgtacagctaagctcatcgtagttacttaactaacacttaaggaattaaatggcatatctgtgtttgagaggcacactgagatgagacaccagctctttttatttatttctaatggtttgcttggtgtactggtcatttccccggaagtgtgcaagaagaggtaggtgacttgcatgttgtctatgaacgtttttagaaacgtctggtggaaccatccgggcatcacatagctatctctgtgcagagccaggccggatgcctaggtgagatggaaagcttccgtcagctttcttgccggcctctcctcgcagccgctcccttccacacctgccttttcacctgccagactgcgcgttgcccgttgccctaggtctgcgtgttcagcacttctgcaacagtttcttctgcaaaggtaacttagcggagggtacagggtcttcttccaataagtcagcaccttcagttaaaaaaagcaataacattctccaatcttggcagtctggcaaggtagaaagacacctgaaggtgaacatctttggcccatgtgaaattttgttacgtgttgttaggtttcatttgtctctcagtcaatcagtcaatcaatcagtctctctccttccatccccccttgtcccccttttctcttctctccccttccctgctccctctctttaaggttttctcacagattaagagagtagcatgtgctcatcccaattattgaaaccgtgcaaatgaatagcaagaaaaatagttcttggcgtgcccctttctttccgcagtgcccaggccagaagtacctgctgcccaagaccacagctgacagcgccccgggagtccttcacactcttctctgagctcttccatccttaaacagacatctatgccaaatgcagggagggtttgctgttggcttttacaagaacactgtcctgttatgcctgctgctctttgcttggttttccctggacggtcacaaacatacctccaggtcaacagttaaagagagaacccacttcttctaatagttgtgtaatattccatactacagatattctgttatttatggtagctagatttctattcatttttaattcccatgctcagagctttccagacatttggaaacattttagaaaattgacatcatctcttcaaatatctgaactcagatttcctctgtgatgttggaatctttaaaatatcatgcatacttggcctgtttctacaattttgttccccagccatcgttctccattttgcacgtgtattgtctcctcctattcctctgtacccttcacacgtgcctgcagggtatatacttttgcacaggcaaaagtccagctgaaatgatccttacttagcataatttaaacgcgagggtttcctaatgctccttccatttaaataattcaaaaatccgtggcaaggtacctgaaaactactaagagaagagaggtgttaatggacacatcattgaggctgaagccaaactgtgtgattctgtctgcagttgagaactgtaagaaaaagatcaagattaacattattattattggtgttacctcatgtctgtacctttttggagacttgggtctgtttcccgagaaatcatttttcctcctccttgaaaatagtgaatttcaagtggttttaattttaactgcattatttgtttgctttatatagtttttaaagttttatgaaaaagtcttccatgtgttttttatttatgaaatcggggcagccatccttcaaatatgaagcaggtatctgagaatactaaaatcttacagtgcattttataggagtgtgaatgatttttctgcaattgacatatcaaggagcttatcatctattattaagttaccttttcctgaaacaaaatatttgtcagatgtaacttggtacccaaatgccttttcttgctaaactaggaactgtcacacacacccacccacccacccctttattcttggttctctcctatattttgacatttgaagcatccacagaaaagtaatagaatgagcaattgaaaatcaccagaactgaaattatttccagctatgtttaaatatgaatgtcttgttcgacgcttcgcatatgtatttatggctgtgtgatatcattatggcatcctaatgaatgtctactgaattatgtgggattcaacaggggatacaaatggatttgaattctgtaactgtcatattgtggtccggagagggtggaaactgaagtatccctctgcgtcgccacatctgtcaaaagtcctcagcgctccccgcaatccatgtctggtggaagcgcgaggtggtgaggatggaaagggcatgcgttgacttcatgttgggacgggtcttaaactaaacacatgtcacgttatggagctgtttaccttggctttgaggtttatttccttctggattaagagtgatgtcgttttatataacaagaagtgaaaaaaaaaaagaatgatgttacacaacctattttttttttttttttttttttttactctgaatgtgtaactttaaatgaagaaccaggacacctcatcctttagtcttttctttactagtgagtggcagatatgtgtggaccacagagatggactgaaaagagaagtaacagtccttggtttgtattccagcccccaccttcctatgtctttgagcttggtaattagatgcttggagcttcagtttccccatctgttggatcagaacggcagtatgtgctctccagtattttcataagagtcacatgaaatatgtacctacagagtctatcactgtgctttttaagttggggcttaatatgtggtagttgttgctgtttttgttattattattattaatgttattttttgtttgtttgttttttgagatggagtcttgctctgtcacccaggctgaagtgcagtggcgtgatctcaactcaccgcagcctccgcctcctgggatcaagtgattctcctgcctcagcctcccgagtagctgggactataggcacctggctaatttttgtattttatattagagatgggatttcaccatgttggccaggttggtcgtgaactcctgacctcaagtgatctgtccgcctcggcctcccaaattgctgggattacagacgtgagtgaccacgcctggcccataaatgttatctttatataacatactcacagctcccttaggagtacttttgtccatttctacacaatggaaacttataattttagccttagcaacatgtatttactgggcatctagatttcatttatttaagaactttttattgaatgccgattgttcagcagccaccatgcaaggtcctggggaaccagtgggcagccacacagagaaggtcccaatggcaccagaacaaggccagcttcctaggaggtgtctggcttcaagacagggatttcctttagctgggtggtagagaaatggattgcctgtgatttcactgtgcataaaatgacctttcagcccttaacctgcgacatccacatgtgttctttggtactcacgggtgttatggttcatagctgtggtcttctgaagtataggaaaaggcagcttacagaaaaaaacttgcttgtttactgtcttctgagctgatttctcacctactggcaagtggataggtctagtttttgtttagctgtttttctaatttaatcttatacatgagacagctatagatggatgtatagtctttgaagtggggccagttggctccgtctattagctgtgtggcttttgtgcaggtgacttgtggcccccggcctcagggatctcatctctaaaacgaggctcttgatgttacctgccttacccagctgtgaagattaaaagggttttgtgtgttaaaggacttgcggagtgcctagaacccaatgagggccacagagcttgctccgattgctttcctgaaggcagtaagcatgttgctctggtaatagtcatcttcacggccatcattttgatcacattttggcttagtttcttcctctaccctcttcccacgtcagacctttccatggaaggtaaaacatgttaacagtctaatgtgtttccttctaatttttttcttcatttatattatacatctatgaaatatatatatatatattacatatggatatatagacatacacagatgcatatttagggtgtgctatggttagaaagtttgcatccccccaaaattcacaggttaaaatcctaatcctcaaggtcgtgacggtactacaaagcaggacctttaggacatgataaggtcctgggggcggagggtactaatccccatgaatgggtttagtgcctttataaaacagacccaagagagaccgttatccattttaccatgtgaggagcccacaagcaggtgccatctatgagccagagtggacccttacccaacaccacatctactggcccctttatcttgaacttccagcccccagaactgtgagaaataaatttgttactcataagccacctaagttatactattttgggatcgcagcgtgaatggactaaaggtttttgagattcttttttcagtagtttcacctaataaaacatggaatcattctacgcatgctgttctgtattgtagtatggttttccacactgagaacatactgtgaccatgcagtcatttcccagatggaacttattgagggacattcacttagtttcgaaaggtttctccctccactcccatcccggccacagatagtgatgcaataacatccttgttcgcatgtccagtctgaagcttttattcctatgggatgagttcccaggcataggattgccaggctggactctaaattttgaaaatggatttttatcattctgatggattacggtgaagagagccaaagtcttgatagaaacactcaacgcagtgaattttttagatgtaaaagtggatggtacttaaggatacgcacattagaaggagtaatttgaccagcccatcacagtattaattgattttcatgtctcgaagacttctgatttcgttttcgaggctggaaaggcaggtggaaagcccatcagttttacacacatattttgcagacaagtattagaaagtaactagcctgcttttactaatggttctgtggaagaaacacagcttgaataaatgtcgtcttggatgctcagcacagattggcagtggatgtcaggattgtctggtgggaaggctgctgggactcactctagactgggagtggggtggggtggggcagggcaggacggccctggctgattaataatgtttgttatgaagtctagggtacgtggggagagcttcatgaatccctgcattggccacccctgtaccacggccaatgattcaccctccctaaatcccagggccagatattagaacatctgtgatgaggactgattttctgttcgtggcctctggaagtccagtttttctgagctcaggggagccttggttgtatcttataggcaagagacgaatttacattttgccatggtgttaacaagcaaaagaagacaaaagagctcaaaatagacagtggcgtgctggggtcaggggtgctggtcaccagggcgagcagttatgggtgaagggctgaatttgcagggtcaaggagattgcctccaggccccttctggaaacacactccctgagccttgtagaattgagttgattctgtttaactgcccagtgaagaaatgacttccttgctttaaaacatttgacagctgtcttatataacttaattcttcattccagtggcttttggagcagcctcaaaagtcattttatcttcttggctctttgatattatttgtagtaatttatttaaagtaattagagacgggatcttgctgtgttgcccaggctggtctctaactcctggcctcaagtgatcctcccacctcagcctcccaaagtgctggaaataaggtatgagccaccaagcctagccttgatattattttttaatgggggtgtgtgggtgggtggtgatggggatattccagcagaatatcagaaacagagatgaggaaggcagagagagctcaaagacaaggctcaagttcatattccaacgccagtacctgccacctgtgtgaagctgggctaattatgtgtttaggtttcctccttcgttaaatagagttctacttatattacagggttgtcatgcaagttgatgaattaaatacgctaatatatataaattctgagtaagtattaaccaaagaaatggaacatcaatattggttcccagtctagttcacaggtgttatcaagatggttacctttctaagtgtctttttatttcactagttccaaaagagtatctctcaaaatattaggtagtatttagtcaacactttaacacataacttgtttttttttttggcataagaagcccatgtgaaaacacagttgaccctaagcctatgaaaaatgacttgtgtgtgggactggggtggctcataggagaaggaggatattcgtctggatttttactggtatgtatatatttttgggtactggagatggggacagtgagtatttgaagctcacagcaggcccattttgcaagttttcaggaaactgaaattcagagagattaagtattttgccatgaatcactttgtagtaagtgggagagctgttgcaaacccacgtctgtctacatccacagcctgtgctcttttcatatacaagggaatatggaggagaagggaagtgatggaaggctttaaaaaaaaaaaaaaaaaacttcagaagctgatttgagatttattcatctttggtgtactttctttactaaggcaggttgtagactcatgaaacctagaaggagttgaaaaataagggttaggattaaaaaaaaaaactagtgaaatcaagacaccattttgcttaattgaaggcttgcggaacattaaagcacaacaaaaacctaattctttgagtgtttctgaggccaagccttttcccacaaggcactgtgtacacggttctggaagctctcctctgtttgcacagtagtcactcatcctgctctcgggctctgcctgcagtctcttcctctgtctccgatgtcactcttctctgtcttcttcagaagctgtcatatgacctccagatttctctttgactccctgtattaccattagaagacatctacactgggaaattgctcagttcctgtttttgattaatattttatcagccgcaagaggaaatggtattctatagcaacactaataagtaattgagcagatgagatgctcttgctagctttggtaaaaagtcggggcaaggttacaacagaggagctctgatgagacttgggatgataaagtcaagtcgaatatctggtagggttaaaaatctaacagtgggccaggcgcagtggctcacgcctgtaatcacggcactttgggaggccaaggcaggtggatcactcgaggtcaggagtttgagaccagcctggccaacatggtaaaatcccgtctccactaaaaatacaaaaattagccaggcatggtggcatgtgcctgtaatcccagctacctgggaggctgaggcaggagaattgtttgaagctgggaggcggaggttgcagtgagctgagatcgtgccactgccctccagtctgggtgacagagtgaaacccatcccccaaaaaaataaataaataaaaattaaaaaacctaacactggtacgagaagaaattatgctctaaatccttctttgagcagtggcttacagacctaaatttatcaaaggtggtggcagtaatagtaataattaccatcttcatttaaaggcacgtatctaaaccaaaggacctaaataaaatattaatttttcatagtgtttaatatgtgccagtatatataaattcaaggtaaggtagacagctgtaaactggatcccctgctgtacccagcaaatgctgagagccctgcttcccctcttgtattcaaatggctctataagagaggaagtagtacagctatcagtaacaatgccatccggtaattaccgaatcataaatgtttggggagctgaaggtcacgggcttagtagcaattctagtctgatgtttgattccttgtgaattttaaatgcttgtactctctatctgggtgatggtgttttagttgccagtggacagtctgatggaggtgggggaagagttattcttccatatttatttttctccaccttgggtgaaaaaacttcgcttttcgtaatgtggtacagtgtgtgcttctgtaaatggaaatggtttcagcacatcacagtcatgcttccctgttgaaagatgctccgttttcccgcatacatgatgtccagcacaacgtctgatttatgagagcatgaccctgggggcctctggaacagctgctcacacactccctttaggaggcccaggctctcaggggaggcccatagtgcagctaggagctagagttttaggatgaagaaattacaggtaagaacacagccccattttaagaaataccagtgatttctgtttttccttgttcttctttccctcagtattttattaacatgtgctactatacaaatacacaattcacttaggactctgtttcgtgtggatcacatgggagctttcattaaattgtggtgattccaatgtgagtggttatcaagtcaacatcaaataacatgaagtgtgttttagtcggcaaacatcactttgtaattctctgatgtgtttgggttgattcccttctttctgctctttttctctttataaagtaaacatttttattgcaaaggtactgctattgttagtttctaaaggcacttgtcatggtgtgactaatattagaagcagacacagccatgatgagcaatactctttttttgtttatttttgttgttactgctgtaagccactttcttctccctctccattaaaatgcaacttaattggtaaagtttagttgactagagatttcatttatttatttatttatttgtttatttatttatttatttatttgtttgtttgagatgagtcttgctcttttgcccaagctggagtgcagtggcatgatctcggctcactgcagcctctgcctcccgtgtccaagtgattcttctacctcagcctcccgagtagctgggattacagttgtgcaccaccaggctctgctaatttttatatttttagtaaagacggggtttcaccatgttggccaaactggtctcaaactcctgacctcgtgatccacccgcctcagcctcccaaagtacttggattaaaggtgtgagccaccgcgcccagcctgtatttatctttttaagtaacaaagtattagcattgtgataaataatatttaatatatagtaagggaggtcaaagtatgaactattttgattttttatgggttttttttttttttttaaagaatgcgttgattttgtttttctttcttttttttttttttttttgaggcaggccttaggtctggcacccaggctggagtgcagtgacgtgatcaaggctcactgcagcttccacctcctgggctcaagcaatcttcgtgtttcagcctcctgagtagctggaattacgggctcatgccaccacacttggctacttgtttaattttttgcagacatagggcctcactatgttgcccaaactggcctcaaattcctagcttcaagcggtcctcctgccttggtctctccaagtgctgggattataggcatgagccactatgcccagccaaattttgtttttcttttctttttttttttttttttttgaaatggagtcttgccctgtcccccaggctggtgtgcagtggcatgatctcggctcactgcaagctctgcctcctaggctcatgccattgtcctccctcagcctcctgagtagctgggactgcaggcgccagccaccacgcccggctaattttttatatttttagtagagacggggtttcaccatgctaaccaggatggtctcgatctcctgacctcgtgatccaccagccttggcctcccaaagtgctgggattacaggcattagccaccacacccggcccagattttcttataaagtcaaatgggagatacttgtttgcaggaaatagttcttttggttcttacttttccataaggattgagtctcaaaatgtctggtagcatccactgcattttgtaggggacaataacaaagaagatgccagcaatatcttctatcttttccaacattattcacctctcccacccaaggacaatggtgggctggacagagcattcaatgaccgagaatctaccataagctactagggccacatcttcccctttcttctcccccaggtttgtcccatttgtactgactctgacccaggttgtcatgacttgagactcactagaagtttcagaaagatgcacactgctttaaaaaaaaaaaaaaaaagggcaaggggaggtgtgagaagaaagtataattctttttcttctaacgggagatataaaaatcatataagcatgatttatcatttgattggaacattgtattttatggttgcagagcacatgtatcatcctatctgcttctgacacccagtaagcagctctggcttttataattttgatgaaagaggtttcctaacagtatttcggtgtgcatgctcacacaccagccctggtcatcagtgaacagattcttccaggtcttcattgtagcggaagaaagtgagatcagagatcccgaggaagggcttcagtttcaccagtagtggagctagggagtagcggggcagaagccgcaggaagtcagtgcaggacgccggaggccactcctaattgcttcatgtgttgttgccgtgctgatgaccttggaggcgctgctggtcctggatccttgcgaccttttcttccaagaggaaatgtggtgctgagccccccttccactggctgtgacaaagaaggacccctcatgtgggggcctaattctagtgaatccccaaaggtacatgttgaaatagggaaaaggcccaggtgaggctgtctatgtaatagagaagatccattgcaaaatgaaaatatggggttctagccaggggcagggaacttaatctcccttttccatgggcccaacacctgaatctagggcaaacaggtgtcccccagattggatcctctgctctaggacacattcttgtcctagagcgggttgggcaagaggcttttctctcagtcaccagccccaaaccctgtggtcttgccagcccaggacgtgtcaagactgcagcctttgctgacctgtgaccatctccaagtccatgcccaggcccctactaggagttgagggcaacaggggcagtgggtctctcctgcttaggaaatttgggttgagggtggcagtgatcttgaggggggtctgggagggaggagccagcctggcctggtctggcctggcccagtgtgccagcgagggcaggtgcaatggctcacgcctataatcccagcactttgggaggccgaggcaggtggatcacctgaggtcaggagttcaagaccagcctgaccaacatggtgaaaccccatctctactaacaatacaaaattagctgggtgtggtgatgcacacctgtaatccctgctacacaggaagctgaggcaggagaatcgcttgaacccaggaggtgaggttgtggtgagccgagatcatgccattgcactccagcctgggcaaaaagagcggggtaaaaaaacaacaaaaaaatgatgtaggaatgaacagatgaacaaccccacacaacctaaggacgactttgaatcaattcttctaagctggtagcagaagccacctttccatttgacttgtatctcgctctttttttctttcttttttttttttttggagacagagtctcactctgttgcctagactagagtgcagtggtatgatctcagctcactgccacctctgcctcctgtaatcaagagattttcctgccttgggcccctgagtagctgggactataggcatccaccatcacacctggctaatttttgtattttttgtagaggtggagtttcgccatgttggccaggctggtcttgaattcctgacttcaagtgatgagactgcctcagccagccaaagtgctgggattacaggcatgagccatcgcgcccagccagacttgtatctcttaatgagtttaactacatttaaccatgtatgtgtcagtcctactatgcaccttacagctcactaaccctgtttaataatgtatgttgttacatttaatctttatggtagcctcatgaacaggttcttgatcaggagtgatattgcctgccagggaatgcatgtcaatatctggagacatctggggttgtcagttcaggagggtagaggataggggggaaaaggtgctactggcatctagtgggcaaaggccagggatagtgctaaggatcctgcagtgcaaaggaccatgcccaccacaaaatatcagcagtgcccaggttgggaagctctgtgccattgtgcaaagattcaaggtggctatgtcacaggactggtacatgtcctttttttttttttttttttttttttgagacggagtcttgctctgtcgcccaggctggagtgcagtggcgtaatctcggctcactgcaagttctgcctcctgggttcgtgccattctcctgcctcagcctcccgagtagctgggactacaggtgcccgccaccacacctggctaattttttttttttttttttttttgcatttttagtcgagacagggtttcaccgtgttagccaggatggtctcggtctgctgatctcgtaatccgcccacctcggcctcacaaagtgctgggattacagacatgagccaccacacccgccctacatgggtattctaacccagtctagtgatagtccaacctcctgtactatgagtaattagcaaagaattaacagcagaagatcgctctcaccaaagcccatccagaaagtggctcgtattcaaggtgctaattagggtgttttgttgccagtaaaaacatgagtcagatttcatgattgattcatgatgactttaaaattaatgctgctgttatcatacaaagtagtggtaagtggaggtaagagaatgtttttgctttggggtactaagtcatcgttataataaacacacagtaaacccatttatctcaggcttaatgctttcttgtttcttctaagcacttcttaggtgcctctgggctttttaacattctttggcagttgtaatttattaattgatttttaaatttggccggtgaaaatgaactttaggtaggggtttgaggaaaatgaaaaggcctatttgtttttcagtggctggttcttcgtgttcagcattaaggattggtagaaatcaggcaacctctatgtaacctcagccatcttggattcccagcttactcacatcatagatggagagtcagttgtttagaaaaaaactttcttttttttttctttcctttttcttttcttttctttctttctttcttttttttttttagggagggtctggctgtattgcccaggccggagtacagtggcacgatcttggcttactatagccttgacctctctggctccagtgatcctcccacctcagcctcctgagtcactgggactacaggtgcacactaccatgcccagctaagtttgttcattttttgtagatacagggtctgactgtattgcccaggctggtcttgaactcctggcctcaaaggatcctcccacctcagcctcccaaaatgccgagattatgggtatgagctactgtacccgaccaagaactttctattatatagattttaattaaaaacagtcctgttgagtggcctctttatcaaatgcattctcacataacctcatagaagtgagccctcttactgaattatgtggctggggttcttgggtatgttttgttctattttctggttggtggttttctttctgtcgggtcccgtgggctctttctggacctcttctcagaatgtttttcgttttttttattttttgagatggagtcttgcactgtgtcctgggctggaatgcaatggcaagatccctgctcactgcaacctccgcctctcgagttcaagcgattcttctgcctcagcctcctgagtagctgggattacaggtgcatgccatcacacctggcaattttttttttatttttagtagagatggggtttcaccgtgttaggcaggatggtctcgatctcctgacctcgtgatccacccacctcggcctcccaaagtgctgggattataggtgtgagccaccatgcccagccctcagagtgttttaaaatgcatactattaaatacctaggattataaagggagccagctatacttacatatagttctctctgtgaccctgtagaatgcactgaagcaaaaataacaggtaatgctaatcataaagttttacaaatctcctgaagagtcttgttggtttccgtgttgatgaagcaggaaatttccctgacccctttgcaggcaggaagtggagtgcggatgctggaactagctggctgctttggtgccagtagaggtgaactgcactcacttgaaccccctgcactccaccccttctgggaggaagcatgcaggtgagcaggtgcaggagccagggtaaatgcttttgggcactggcaggaatgaactctgtactggccctgggatagcatctggcaggggatgcccgtgacccctgaaaccctaaaaggagtgttacagtcagtgctcttttagttttgccatccacggacggcttaagtgttaacagttcagtggagggtcagcgtgacagccttttgcacccacatctgggttcttgtccagtgtccaggaggaacgaggtctcatgagcaaattttaaggatggcagatgtgggggattttattgctgatgaaagtggctttcactgggaagataagctaaaaagaagacaaagcaggaaggtaattttcccctggagctatgccatcaagctgttcttctgaagtccagccgcttctctccaactgtggtctctaatttccagctgcttctcctcttttcttcaatgtgccagcggagcctggggtttttatgggtacaggattgggggcaggccgggccatgggtggttgtggaaaaggcaatatttgagtggaaaaacagggatatatgttctcactttgggccacagttccaggcttgaggatggggccctcaccacggacctgccctcttctgcccagaatttccctgcctcctgtccctatcattgatacctgcaattctttgtacatatgaaatttaatatggtgagattggcatctagctgctgctagagatagtgctcataataatttttaacattgattgagtgtggataataatccaggagctgtgctaaacgttttacaacacattatctcacttaatttcacaactccataaagtagttttcacttagttgagggatgaaaaaagttaggctctgagaattgatattactctgcaaatatggaattggaatttcaaagcaatctatggtctttatcacttctccattaactgtccttgttttattaatgctgattactttttgatttggtttggttctttggagttgtttgcatttcatgagtcttggcatctttttggtagagaaccttgctaggttctcacaatgtagaaattaagcagaaaacagaggtctcaatttgccttttcagcgtgaatgcagactcttacattcagtgctgggagtctttcttgagggacagtgagagcgaggaagggtttccattctccgagatggatggttgcattagtatttatttcctttttgtttttccttaggatgagaaagaaggcagtggagcccttttccttaggttagaatggttctgttggttgaattgtgcaccctgtttggttgaaacaattggacagtaaggatgtgactattattgttgctctctaatactttattatgtcataccaaaaattatcttttgtattttgctaccagttcttttagtttctcttacatgtatgaagttggatagttagaatgagatgaaaataaatgggctgggcgtggtggctcatgactgtaatcccagcactttgggagtctgaggcaggtgaatcacttgaggtcaggagttcgagactagcctggccaacatggtgaaaccctgtctctactaaaaatacaaaaatttttttgtattttgggattcggtttaggtgatgtgtgtctgtaatcccagctacttgggaggctgagacaggagaatcacttgaactccagaggcagaggttgtagtgagccaaacttgcacaactgaactccagcctgggcgacagaggaagactctgtctcaaaataaacaaacaaataaataaataaaaattgtttaaacctgccaactacaataactttttcagtctctttctccctttcccaccttcccaaaagggtgggaaatttttaaagtaaagtaataaacaaataagttttgggttgggcgggagattagttagagacaggatctgtaggtcagaagtggtatttgggggagtagggagttttttttttttttctttttcccttatgcatttgggagtggaagagctgtcagattctgaatttagttagatttataatgctagagacattcagcagtctgcctttccctttctgttataaaatcatgtttttattgaattacattttaatattggtatcactttaaaatgaaaatgagtacttgcaaaatgtatttttgaaggagttgggtggtggtggggggatgccattttggcaacagatgacttcggttcaagtcctctctctgtctcttacttgctttgtggctttagaccagccacccactcagagccttgaaatcctcatctttgaaatgaccatagtaagttcctgcctaggctctcccctgaagctgaaatgcatgaacatgctttgtaattttttttaaggattgatactagctagggtgttgataagaaacagcaggcatagttactgggtgattgagaagagtttaacaaaagactgtattagtctgttttcatgctactgataaaggcatacccaatactaggtcatttacaaaagaaaaaggtttattggacttacagttccttgtggctggggaggcgacacagtgatggcagaaggtgaaaggcacatctcacatggcagcaggcaagaaagaacttgtgtagggaaactctcccttatgataccgtcagattccttgagacttatttgctattgtgagaacaccttgggaaagacctgcctccatgattcagttacctcccacctggtccctcctgcaacatgtgggaattcaagaagagatttgggtgggtacacagccaaaccatatcaaaaaccatttataaaactctaagcagccttaaaggaaaccaccaagggaccaaggcctgatgaagcaagagtaggagggaacagatgcttggatagggcaggtgagtcacaggctgatgggagctgccaccgtcagtagaggtcctgatgacctgggagggtgggagccagacagatgggagtatcctagcctcagttcctttccatcctcagaactcctcccagtgcctctcaatggctaaaccaaccaaaggttggagctcaaggaagctcctgaggctatctttacaggtcagccagttgggaacagagttgacggagaggggacaggaggtgactagatttggaaggaaaattagaaaacttttggccgggcatggtggctcatgcctgtaatcccagcacttttgggtcagttgagtctaacataggggtgtccaaacttttggcttccctgggccacattggaagaaaaagaattgtctttggctgcacataatatacaattgttgatgagctaaaaaaaaaaaaaatccccaaaaaatctcataatgttttaagaaagtttatgaatttgtgttgggccagattcaaagttgtcctgggccgcatgtggcccaccagctatggtttggacaagcttagtctacaggttcttcaagaggggcttgagcatttgaaagacttctagtgggagagatcacaaggtacaactagaaaatcctgggctggcctgagaggcagacctgtgattattttgctctttgaaagttgtccttctgcacccattttccccagacctaacctcgatttgtgctccaggtctgagcagaaatgttattccctccagaaagccttccctggatgttgagggatgaagttgtaggcccctcccgaatgcgtcctcagaactcgctggttctcgtcctcgccctcagcatacttgctcattgtttgtttccatctctatcatctctgtgagccctttgaggatggatgtgtgtccatcttgttaacagttggctccccagtaaccagtacagtgccagatacagagtagtaaccctacattctagcgtaggcaaatattctagtatttgccaaaactagaggatgaatgagtgatgggtaagagagttctcagaaaaatggatataaacaatattgtaaatcatatttggaaaataaatattagaatcattgaatccctgagttatagaaaaatttattaatagcgctatctggctactttttaaagtgtggacatcctcgatgtattagctatgcatctgtggataggaggcttacccactctgagtcttgtcaaataccaaacacaggaaaacaatatcttcctgagaatgttgtgaagaatatatcatccagtcagagtgaatcagcttgcccagtgcttggcatatagctgctcaagaaatattaggcattctttgttattataaatcccctttgtattttaaaatcctcatgtatcactgaaacaaccaactgaaaaccattgagaggctcatggtgaaagaagacagacagtgtaatttccctggaaactcaattttgattcagacgtccacagcatctcatttctgcctttaaaaaatttcaagagtgacattttggcatgactggactcacaggtggagaaggtatgacaaacattctggaaatcttggaaggtgaaatatagggaagatggcccctatggaggttcattgtcccccaccttattctaaataatgactttcttaaaactacatgttttgggggaatgtcctgcaatattgctttacatctttttatttttttatttcattttattttttttgagacagagtctctgtctccaggctggagtgcagtggcacaatctcagctcactgcaacctccacctcccgggttcaagcgattccactgccctgatcagcttcctgagtagctgggactacaggtgcgcgctatcatgcctggctaattttttgtattttagtagagactgggttccaccatggtggccgggatggtctcgatgtccttacctcatgatctgttcgtctcagcctcccaaagtgctgggatgacaggcatgagccaccgcacgcagcgtattgctttatattttaagactatacactgatatccccgagcacccaagttcctgtccgctggtagaattcacaaagctggttttatgtctccttctcttcctcttccagtgttgtcttttccctgcattgagatagcattgcatggagatccttgtactcttcgaacagaggctgcagatggacacaggatctgctcagggagataagatcacctgctaattctgctttctccatcagagtctgaatgatcagtgatggggaccagagctaggttaggtctctggaaacgccctctgtctgagtccgggagatggatgatatgggtaatgacttgctgctttatcttctctccatctccttacagcagctccaactactgacttttattgtgtggcagctaattgtaggattctatttctgtaaagagaaggcaagagaggaatgcagtgtccaccatccctgcagccctttggcgccttccccctcccattaccttgaagtagagggaaaggggacgacagaagaacccttagaagtaagactttttctgtctctgatgccacggacctttgaaatatttttttgaaaagaaggcctcccttggctgataccttctgactgttagtgaataaaggaagtttaaacaatctcttccctgtaatcattaatctcgtcttctttgttacaatgtatgttgtggtctttgttacaatgtatgttcacgaattcctagaacactgttcccgttggccatgggatcaggggaagagagaaggaagagagaaccagacacaagttggagggaatccatctccagtgctgctcagaggtatgacctagagcaaggggtttaggctttcttggactcattttcctcggtggtgaagtggggataatttattgacagtggaccgtgaggttctgcgcacaaaattcgttgcatagcacctgatacacacaaagctttcaggcaaggttagtttcgggtatttccagccttagtcttggctgtgggagccataatggagttgttcagaagtttacagctagtgtttataaattgcttgccatggggccttgtatacagtaagcattcattaagtgttccctcctattatatccttaggtttaagatacaggcaccacaacataaaccacccccagagtacacatgcatgggtgtaatttggtgccattctcctcccttttgcccccaccaaaatgaagtttttagtgtaaatgtcatgtagattttaaccaaaggttgattggagggtctgagtttctcagctaaatgaaggcatgaggactgtatccctcctgaagggtgtgatcagttccatgagaaagaagctgcgagctgtggggcatccaagataatgtaatctgccccggggtcctgtgagggactggccgacaaggcaggctgaatgcagccttgcccactgagctgggttctctctgctttaggtcctctctggaggtgaagagggaagtccgctgattgtttttctcttggtgcaacttcgcaccacccttacatatcccagtgtatatggtagccaaggacagtactgtttgagcctcccccattaagtgtcaacattgaatcaatgcaatcccatgcaaagaaagctgagcatgggattgtgccggtttagccagctaaagtgtggtctctgatgctgatcatgactatgaaaagggaaaatggaggagaatgatgacgaaggaggaggaggaggaaaaggtgacttgcctctagctgatgtggattatttctcttttttaatttccatgtctgtgtagcttcatcatagatctcagcttaaggacaatgaaagtcgtttattgagtacttagtatgtgctggttgcagagccaagtcttttttttttttttttttttcctccttttttgagagagagagtctcactctgtcacccagactggattgcagtggcacaatctcaactgactgcaacgtgcacctctcaggttcaagcaattatcaggcctcaacgtcctgagaagctgggactacaggcatgtaccaccacactcagctaatatttgtatttttagtagaggcggggttttgccatgttgtccaggctggtcttgaacacctgacctcaggtgatctgcctgcctcagcctcccaaagtgctgggattacaggggtgacccaccacacccagccagagtcaagtatttcaagtattagagttgtctgcctgcctccctgtctccctgccttccttccatctgtttgttatctgacttaatctttgaaataacccaatgatacatgatatgcattttctaggtagatagatgaagggttaggaagatgtaacttgtcctaaatcacgtgtcttctaagcggtggaactgattttctcactgactatagatgttgagcccattaatgtgatacctactgccttttaattttaaaagttctcattgttttatcgttttcatcattatcatatgatttacctcttctcttgtgtcttataatccgattggtcatgctgacatactaaaccatattgtttgccactgggaaccaattcatctgtgaaaagtcatacagataggctcgaagaaagagcttggttgtgatgttgttgttgtgacaactgtctcgggggctggagttagagccagggtcccagctgccacagttcatgtaggggtagaccagtgcttccttttgggtgatgaggaagctggatttggcagctggttttgtctggatttgaaagggaggtaatcaggggtgtgctgggagggccagaacgatccacccacgtgttggtgccacccggcagtggaaaagcctctggcctcggccttctccggaaggttgtccgcggtgccagtgagagctgcttttcaccttacagcagccccggcctatctctcaggaggcctgctgataatcagtaaatgaaattcacctttccccgattcttgaaaacggaaaagatgagggttgaattatagggcaaatcatgaacactgtcttttttccagcatggtattttgagcggcacagaagggggtaattattttatttggaagaacaaatttaagtttggcagttacctgaaagaaaatttagtgattgccagtccattctctagccttctgaagaagatagattgtaatctttaattaagctatcactcacaccaaaaaaaaaaaaaaaaaaaaaaaaaaaagcggggcaaggggttggagaatgttcatatcacattattttggatgtctggggttgcacctggaagctcagatagcaatatctaggcacggctgccagcgctctatacattgacgtttgtttaatattttaatttccccatgagtcttaaacctctgcgtggtgtgcaagttgaggcctggtgtatgcacttcggccacgggctttcccactgtaatgaagatggaatgactccatggatgacctttccgtgcctttgtctgtagcctgccctcctctttaactgaacaccttccagacgagcatgctctgaactcctgaactgctcattctgttctctgagagaattgctcaagctgcagtttatcattatatgcctccaaagactttgtgtttcctatgtttgacatcgagatagaatttttcataaccctttactagtaataaatttgattgttaagggaccaggttaatcttatttctaataccagcatctgattttaaaaccctgatttaggagcattttctttctgctaccttcctaaaacgcatgggtggaaatgtataaaatatgtcacctgatattggaggattgtttatttctgttcatttggtcctgaatagtacctatgagatgcatttgaaaacttaccttgtttatatgtttcttctgttgcaatttcttccattacctggaatagctgctttggacggcaaaccaagcaatgccctttcacagctgtgggatgaatggggaaagaagtcttggtaaggaagcaattcagagaacatggaagcatctcatggcagcagtcacaattttgtgttgcgtaatatttcaggaacttgcaaccctgataacttgtgcctgcctgtctgtaggcctttaatgatgttttattgaattttggttttcccctagactttgcagtgcatgacacatagtaattgctcaataaatatgtgttcaactgaactatggtggttaggttagtaattagatgcacagacaaaatcacaggaatctgcgtgagccttgtcctactggtaaaggagtcttgtgaggattaattgaaataactcgcaaaaatatccagctctctgtttccctgctaggggctcttgtcataggagccattgttgtagccttagaaaacatacagcattattttagggggagaggttagagtagaattttaaagagtgcatttctcttccagtaagcaattctgcatcgataaaaagtggagaaagaataagtgaaaaaatatttagttaattcttgttgacagaagtaggacttcaggtccacatatatttcattgtagagtgcacacatgcatttttaagaatttcccgattctcttccacgtgtggacagattggcacatatgtgtgtgtgcaaattgtacttgcagtggctgcctgggaaatgaaatttctgcaccttgccagagcatgttttccctctaaagagaggcagctcataattagtaatgctaatgtcggggtgagatgcaatagataatctaacaccagcaatgatgcccagagcatttatctttgatgctgggaatgcgttcattttctttatcttgccattactgtacctctattgggaaatttactctctcttcatagataggatcagatccagtacatatttataaaaccacacttacatttaaatacaggcctttcccatttcacagtgtttctagctcccctttccaatacatctctctctctctttctctctctctctctctctctctcacacacacacacacacacacacacacagccaaatcagacaccaatataaactgtagagttaacattctttttccaccctcacactttttttagctccgatctgtgttcaatttctgcctgagagagtgatatattcatatatttaggtatagttagaaaaagcaaaatggtaacaatagaatcttgatgggattgatctcctgcagcaaggagcaacagaaaaaaaaaaaaatggaatcaagaacccaggtgctttttataggttaattgtgcagggttatcatgtatctctttaaaatcaccatcttgattctgagctttggttctacacattagaattgttgcctgggcctggatttttccccttgcatgttgcgtgtggtagtccagcacatttgctgattgcaaatatacttgtctcttctcatgggcattactagtactcaggaaatcattgatgtggggtaaaatgagaaaaggattagttttattttggacagataaacaacatgtcattttaccaattgctcattaatgctgatatttcccgtgggtctctgactctgaaatctgcatggagtggttacaccctgggcttgttagctcctacctgagctctgagtttctgtggatttctataggctcctgcaaattttatctagtggatattttgttaaaaaaaaaaaatggggtctcattctgttgccccggctgcagtgcagtgacatgatcataactcatggtgacctcaaattcatgagcccaagcgatcttcccacctcagcctgagtagatgggactacaggcatgtgtcaccatgccaggctaatgtttaaaaatttttcttagaggtagagcctcactttgctgcctaggctgatctagaactcctggcttcaagtgatcctcctgccttgagctcccgaagcgctgggaccaatagagatttctctgagaattaggtcccccactattaataaggtcattgtcagctgagttggggaggtggcgtgggtagatacaattaatttagattttttaaaaggcttttgagaatattcggagaacctaatatattttgagacctgacatttattttaaacgtgaaaagcaatttacaaaattgcacatactctataaatacacttctgttataaaaatagacacgtacggccgggcgcggtggctcacgcctgtaatcccagcactctgggaggccgaggcgggcggatcacgaggtcaggagatcgagaccatcccggctaaaacggtgaaaccccgtctctactaaaaatacaaaaaattagccgggcgtagtggcgggcacctgtagtcccagctacttgggaggctgaggcaggagaatggcgtgaacccgggaggcggagcttgcagtgagccgagagcccgccactgcactccagcctgggcgacagagcgagactccgtctcaaaaaaaaaaaaaaaaaaaaaaaaaaaaaaaaagacacgtacacagacaaatgttctgacagaaatacactgagatatctacagtgcttgtctctggataggatagggtataatttaattgtttatagttaagttaatgaacttggccagacagacctgggatcaaatcccgcctctatcatgaattggctgtgaggtgtgacattgaaaaagtgatttagcctttgttcccctccaggtccttatctgtaaggtggcagttacaataatacccacctcccagggttatatgtcaatgggttaggcacagacctaggaactcagcaaatggactactatgaagtattagctttttactgtttctggttttctgatttttgtctcctgttgtgaacatacgttgcttttgtaatatgaaaaataaaaaataaaagttaaatttgttttgtttgtaagaatcagttgaggacagatgggactatttgcatggattggtgtcatgtttgaagtcagttaccagagggtttctttcaacagagtataccaaaaaaaaaaaaaaaaaaaaaaaaaaaagtaaattgcacagaccccagcttaggacctggacttaatcttcatgatgtttgtaaagtaatacttcttggagaaacctcccaaatttctatcgacactagacatctcaggatttgaaatgttaagctaacagaaattgttcatcaggtgtatctccagccctccgtaaacactgccggatggatgaacctacgtaatgatctcctggtgccattttcctgactgtagatacttgggtaaggaggagactttgactctagatgacatgatgtaccctgtgttctgcaagctggagaacatcatgtagaatctgaaaattaggagagagaggcaatcagaagaagacagagtggtgttgcagggacctgcagtcagcctagtcccccagtttgcgtttgaatttggtcccagattttttttgtttttgttttttagtagttaaagctgagagcaaaccacattgcttactattgtcagggaatgaaaactatgcaacagaagccgatgtgcagaggtgaccgtgttcgctggaattgaacttaagcaggttcctaccgcacagatccacacaggagggattgcgtaatgcacccagcagagttgtgctcaactgtgattttataaaagacacagaaacacatattaaatagacaattcttctatcagccctctaaactggcataaccttgaatcataattcaatgaatgcatttctgtgagaagtgaaggtaataagctccaagtgctttcgtttcctttctttctttcttaatgcagggaaaattgagatgggattctcagttaaaacccaaacgacgggcctgggggttgtcacaatgtgatccctgaggatgttagccccaatgtctttctgtagccagaaccaatagaaaaatgagaggaggagagtagaagcagaatagcaaacaatttttcctttcatggtctacctgtgtgactgtgtatatgtccagaaggggatgtggttggggaagggcatagtacacatatttgagcagagtacatgtgtttcatttcttgctcatacgacatgtccagtgtgggctggcatgttcttctgcacagtccctgagggacccggacttatagagtctgtgatctcacagctgctacatctggcacagatggccttcttgatctccagttagggcgagtcacaacagcaattaaatggtttggtctgaagtgtcacgagtcgtttcctcttggctgcctactggctaggccagtcacgtggccctgaagagggtgggaatgtctcatccccctgtgggcttagaagaaaaccagaggtctgtgcacactatggatttttactacaatgatgccctttcacatacagcgagaaggattaagaggtactgtattgttggttgataaagtcaaacttgtgaacagagcaaaagggcattgcttggtcattgcagcttccacccatgcaccttacacagaagtttgggccctaacatggaaacttttcaacactggccaaattctgtttgaagcactgtattgagcataccatatgctgaaagacttggaatgcaaaaacctaaggccaagggcacttctcaatattaaaccctcagttgtaatggaggcatcaagactataagacccaagaccttaacttttgtgctccttgtcttgtggagggaacatccatcctcaaaacagaaacctgtgagatcccttgaatatactgacaatacactgatgagaattgaatgccccataaattgcatctcccgcagggcctgataggtgccctgtcttcctgcttatgactctgaaaccctgtttatttgtatcaaggacggttggtactttaatcatcaataaactaacatctcaacagcctgccataaatttcttgtcaaaaaaagaggttatgattagaatactgtgattaaagagaatttgtagatagacttacatccctcagtttcaaagcttctagtagtagggcttagaggttcctagagtaggaaaagcctagccaagcagaaacccatgtttttgactttcaggatatttgtgaattaatttacttgcatatattggccaagatctagcataatctcttaatattcaatgaataaaaaattgagttttgagagcaaatattttggtaggaaatagagaactgacactaatattctctctgactataattgtaaaacagtagatgtctttcaccaagcgctaacattatattaattattaataaaatccaactccttaataatacaatcatagttaccatttattgagagcactcttctgaacattttgcattctttatttaatcttccctacaaccttattaagtagacattatcttcatcttattaagtagtcagttcctcatttgcagatgaggaaactggctgactgagttaaatgaatgccaaagtcacagagctgctgagtggcagagttgtaattcccatgcagaactgtgtggcatcaaagccattttttaactcattgcaatgcacagtgggttaaaatgagatgattgaaaatgagatgtggctgggcatggtggctcacacctctaattccagcactttgagaggataacttgagtccgggagtttgagaccagcctgggcaacagagccagaccatccatctctacaaaaaatttaaaaattagctgggtatggttgtgcactcctgtggttccagctactcaggagactgcggtagggggatcacttcagcccagaagttcaaggctgcagtgagctgtgatcgctccactgcactctagcatgcgtgacagagtgagactatctcaaaaaagaaaaaatgagattatggccaggggtggtggctcctgcctataatcctagccctttgggaggccaaggtgggaacatcatttgagcccaggagttaaagaccagcctgggcacatagtgagacaccagctttacaaaagagagagagagaaagaaagagagagagattatttctagaataagcaaaccaaacgtgaattaagttttcattctcattttagtgattctctaagtacatacccacattctgattccctcagcactttaggactgactgattagcagtaactgccctcccactggtaccactgtggccagggagtgactgcaagggtcaaaacttttgttggggagctgtttggactaagtgaatgtccagccccaactcagggatgttgtattggttctaatctctgcttctgaggaaatggttacctgcagggcgattgtggcctgctcctcgtgggatatattgagatggttccttttaatccatttcttttaaaaaaaaaattctttttaaagagatgggatttcattatgttgcccaggttggcctcaaagtcctgggatgaagagcttctcctgtcttagtctcctgagtagctgggacgacaggtgcctgcaaccatgtctggcttaaatccatccttaaacaagttcaatgttttatttccttcagataaaatgagagtggagagaccacagtgatgcccaggaatagtcatggttggcgattaaatagccattgagtctctattctgaaacaggcaccgtgttcatttgctatggctaacatgacaaaataccacccactggggatattaaacattagaaacttactgtctcacagttctggaggctggaaattcaagacaaagttgctggcagggtctctctgaggcctctctccttggcttgcagacggccgccttcttgctctgtcctcacgtggccttccgtctgtttcttggtgcacatccctggtgtctcttcctcctcttataaggacaccagtcctcttggattagggcaccacgcttatgacatcatttaacttagttaccctttcaaaggctttgtcttgaaatacagtcacatggagggttagaacttcaggatataaatttgagggggacgcagtttagtctgtaacatgctctatgctgggcacaaggaatgttatggtggataaggggaaaatggtccctaccctctgtcagttttttatggaagaagaaagacggtctttaaagaaatttacataattaatcacaaaaagctaatactatgacaaagaatgtaagttactaatacagcttagaacagatgactctaaccttgtgtaggagctagagaaggcttctctgaggaggtgaggttggaactgaagcatgaaagggaacagaagggggtcaggcaggagaaggcttgggaccaggaggtagagaaaacagtagtgtgatcagaactttaaggcccggttctgtatacaacaggtttcgggacttgaaaggcagcccacattgagtgtaactagaaagtgagggcaagagattgttcaaaagaatactggacccagagtttcatcactttgttaattacatctcatattgtgggattgcaattaccttgcccaagaaaagattatttacgattccattgtttatattgtttgttgaaataattaattctcaaaacttctggatacctgagactcagctaggaacttatttttaaaatataaattcctagtcccactccctaaagattctgagttagtacattcaggatggggtctaggaatcagtgtgtttaagaagtgcatcaggttcttctggtactgattgtccatgaaccacactttgagaaagctccatctaaagagataagttactgacgtgtgttaccagagagagcctagaaaacctgggcacaacagtagttgttaagaactaccagacctgggccaggcccggtggctcatgcccgtaatcttagcactttgggaggctgaggcgggtggatcacttgagcccaggggtttcagatcagtctgggcaacatggtgaaaccctacctctacaaaaaatagaaaaaattagctgggcatggtagtgcatgcctgtggtcccagctacttgggaggctgaggttcgagggttgcttgagcctgggaggtcaaagctgcagtgagccaagatcatgccactgcactccagcctgggagagtgtgagaccttgtctcagaaaaaaaaaaaaaaaaaaaaaaaaaaaaaaaacaactaccaggcctgttggaatgtctgccagtttcaacccacggggatagggtgagatgaacattgattgagcctttacattggagacactataacaaatgctttgcgtacatcagctctttcaaattaatacaattctactagagggggcactattagtatccccaatttacagatgaaaaaaatgagggacagagaggttagatgtgtatctaaggtcacatagctcacaaacgacacagcatgcacccaaatgccaggtttcaatgaccctgtggtgaagtgtgattgctggcatttgcctagtgttgactgtgctctagacactgtattagttacaagtgattctacttctcattcattaggccatccagaaagccttgtgctttagtctgtcctggctactataacaaaatatcataaactaggtggcttataaacacctgaaatctatttctcatagttcttgaggctgggaagtccaagatcaagctgctggcagattgagtgtttggcaacggcccactttctggttcctagatgttcacctccttgctatgtcctcatatcgtgggaggggcaaagggtctctctatctggcctcttttaagcccttaacccattcatgaaggctttgcctcaatgacctaatcacctcccaaaggccctacctcctaatatattatattggtgattaaatttcaacatatggctgggcgtggtggctcacacctgtaatcccagcactttgggaggctgagatgggcagatcacttgaggtcaggagttcgagaccagcctggccaatgtggtgaaaccccgtcttttctaaaaacattttaaaaattagccgggtgtggtggtgaatgcctgtaatctcaggtactccagaggctgaggcaggagaatcacttgaacccaggaggtggaggttgcagtgagctgagatcacaccactgcactccagcctgggtgacagagcaagactgtctcaaaaaaaaaaaaaaaaaaaaaaaaaattacgaattttgcgaggacgcaaacatttaatccgtagtactgatgtggatatgatttgagctaagactctgctgttgattctcttcaaaaacttggcagtagcccttggatcccattaattgcattcaacagtcatgtattttattaatttttgttcctaaagaaaaaaaaaatccagattgcttagaaaataaatgtgactcacgcagagcagaatccgaattttctaagtgatgaacatgttaacatattattttaatctaaagacatcctatccctgaatttagggggagacatttttttaagtaaggtttatttttaaaattgttttgcaaacattttaacagtacatcactgcctcattggatgaatcatatttttaactttcacttcccatcaatttaaacatcatctctcaaggaactgatgggccggttgactctaaatgattttgcctttcatgcagtattgttccatccgcctgccacagaagtgattccaggtcattccaatttatttaattaattttggagatgaaattattttgcccaataactagaatgctaatgggacttagtgtaatggtttagttcaggtttgttggtttgaaaataaacgccttcatttcaatatttgccttttggctgcagcccgttaactggtcacatgctgtaacctcattaacatcaaggcttaattgtaagttaatgtgcacctagtttttgtaaagaaggtttctatcttaactgccaagttttgccccccaaatatagccccaaactggcatttccaacagatggatgggttggtgtaatataattcatgcttttaaacatcatacttttatcggtgccttgataataaatatttgaacttatttttagaagttagaataaagtgaggaaaataaatctcagctctctagagtgtcactgtggtattgagatttgtggaggtgtactacatccgtaattgggagagattgccggtcgtaaaggagggacaatagaacctctgtagaatcaaaggcagaattaaaatctgcatgttaatagctttcctgccagccacgaatagattcattcttcacgtctcagatatataaagcttatttcaaaataaattctggggagcgttcaacctgattgaatctgctgtaagctctgttaatatatttgttcgagtcacttgcactcaaaaggtttttagacagaatatcacttttttatattattcatggtaatgtaattcccccctttaatctcttcagggtttcccattcagtcatgatatgcggttcagagaaagttggatcgaccattaatcatgctatctcgacttctgtgtgtctcctttttgtccatctcttaaatcagtcacttggcagcagcaagacatgtggccactccagaccatttgatcgaagagctcttgttaggagattaggctgctaatctgcaagcgagctaatggaaatcattctgggcaaggaaacaaaactgaacaacattagcaaaatcactacatattataggaatcaagtacattctgaacggcttaatcctacagtttagatatgaagcctaagggtaagatgaacgtcttagatgatctgagatatccaaatacctgtaacaaacatttgtatggtgtatgtagggcaggaaccccatcagaattggggaatctttaaaggattttttatttagccagataaaataaacaaggacagagttgactgagaaaaaagaaagaaaaaaaagaaaagtcaggagaggaggactgaaaattcccatcccacccccgcaacaatgaagggaaatgcctaggttgaaaacacgcaatacacattcaataaatgttcatggttgaatgaagttacctggtagggatttaatctttatttcaaaaagagtggctgtgaatctttaaaaatttctttggttctttaacattctcttcttcactaaacccaaattaataattccttactattgtcattaaaagttctcactggatcattccatttatactcagagtaacaaagcaaacccaattatttgagagacactgaaatgaattttgagtctagaacagcatctgcaaactttgcaaaggttcacatgataaatattttctgctttgtggcctacaaggtacctatcacaactactaagctatcatgcattagtgaaagcacatagataatctataagccaatgggcatggttgtgtgacaataaaactttatttagaaaaacaggtggtagactggatttagcttgtgggttgtagtttgctggcctctggtcaagagcacttgtttgtctgggagacataatttcaaaaatcattttcttttttgattttcatggttttagaacatgatattttctactatggatgaatgctcctcttttgaattttcatttttgtctgacataactcaaagtgcttgctttgggagttcttgttaaccctgacaattcttgtcaaatatcttactcctgggctgtgctggggatggcagcagagtggggtggttggatgggaaggcgggaaagagctagcttggagatgatacgcttttccatccttgaataacttgggaaaaagtcaggagtgtggaatgaagaattggaatataaaggctgagggcggacctaattttttttttaaggattaagaaaaaaggagtaagagagatggtatgacttatcacttggctggggactcagcattaattgataaatccactgtaaggaatgcatgacactgtcttttgaagaaagacattgcatgttaggattctgagtaacagtcaatatattcagtgaaacaaatacctaatatattccatgaaacaagtatcgtgaatatattccatgaaacaaatatcatgaatatattgtgtgaaacaaatatcgtgaatatattccatgaaacagatatccagtatattccatgaaacaaatatcatgaatttattccatgaaacaaatatcgtgaatatattccatgaaacaaaatactgtgaaatcataccactgatttttgaagaaacctaatgaaaacagcatgctcctatatcttttttctgggtgatctttagatatctcgtcttccaaacttttgtgtagcattgtctgaattttcccaagaaaggaggatgttgatctcctatttatttatatttatttaaatttttaacctttacattgacccagtgttgtaaggaaatgggagaatattgccctgatgtctgggaaattgggactcccatcctacaattcaagtgttggaatgttgcagggaggctgggctaaggtgttctgttcctgtctctggttcaaaggaaaggaatagcctagacctaaaggattctgtctggtagctgtttgctcttcgcgcctgtgctttgaatggtgaataccctcggcgggaggcaggcacctgatgccactgcccccgccccacctgcccccgccccgtttctcagatcacacaggcaggctgaggagcgcttaacaccccagcctcccatgaagcatcctgaaaaagcagactttgtcttcctccatcagctttgtttgtcctctgccgagactccagggacatgattgctcttcattttacgctcgagatcaaaataaacagaaaccactttcagctttcccgttccagggttaagtgcccaagcaggtgttgtttctgttatgtggtttgcagtgagcaaaaccaccccctcttacctgtggcagcaaaggcagggagactttgagacctggggagggctctctgctgtgttaacagaactggctcttggttggggggtggggggcacccattcttggcttcttataacacttcctttctcatgcattacctggggctccctctggaaagaaaatggtggagaggttactggcctgatgacccagggacccaggcagtccttacagggacccagaatttcacatgcaaatgtgacctccaattaaagctggacttgattaaccccatttcccctcaaaagatgatacttgtaatgccgttccgatgaggccgtctcactccgtaaactgtcatctgatttacacaaagccatctgcttccatacggggtgttttatttgggatccaggaggggagaaggcgcatctgccccctccatagcatctgaatcttaatgaataaaagcactgacacttctttaaaagggaatagcgtgatgctatttacagtttatacagttttgtaatccagctccatgctggatatttaccgtcagtcatttgaggaagttcacttctctgctggttttctgagtgagggagcgatgagtagaggagcagctggagggtccaggagccccctgaactgagtatccggtgggaggtcagatttccgcattcagaacgagagctcatacggcatccacgcgtgtctttctcatgcatatccccagcccgagtagaagaggacttctgcatctctgttagttctttctcctcctaagaaaaagcagattttaagtaacttatcatttgttcatttaattactcattctttattccttcttcattcattttccttttctccttcctttctccctctgttctctctgttttaacaggttttattcttattgtggtatggtaaggccaagatgaggaaatgactgctattgcaaagatggtttgttactcacagatccatggggactccacatgccacagggagttacctgggaaagccccagggttgggcaggaggcagagggagagggggagaactgtcaagagttttgagctggaagctattatcctcagcaaactaacacaggaacagaaaaccaaataccgcatggtgtcacttgtaagtgggagctgaacaatgagaacacatggacacagggagggaaacaacacacactggggcttgtgaggagtggggttgggggagggagagcatcaggaagaatagctaatggatgttgggcttaatacctaggcgatgggttgataggtgcagcaaaccaccatggcacaggtttacctatgtaacaaacctgcacatcctgcacatgtaccctggaacttaaatttttttaaaaaatgtttttattgtgattttcacaggaaagaaggggccaggcagggtaagcaggcttaggattggctggcttgggtcatttccatgggctctgggacacaggggttgtctttaggtgtctgacccatggctatggggtgattagggtaggtgggtgtggcctggagttcgagcccaataaagccagtggtgagggtgtggctgtgaattggttggtttgcatttgaactgtggttaccagtgagctgtctactatctctaagaatccgctagagccctgtaaagaaagcctacaagggagcaggttttaggcaataataagtgagcagtatggcgccctaatagaaggagggatgcctgtggccaatatacacggctcaaagttgaccatgatagagaacctttccctagaaggtctgtgagggaggaggcctgggagagacagcagggtgaccagagtaagtgaagtcaccgaggtgccaatgagtgtggccctgcaggtcctgcagacccccctggtggcagtattggtggtcacagctggcaaagggaagtgtggctgcccggagagcttggctgaggttggaacgtgggagtttaagagagcaaactcccacagcttggtgcagagagaaaagtgtagaaaggtcgggtgtcatacagcagagggctgtgatgctctactgaggagtggaagtgtttttctgagggcatcaaacacgccgtcaagcagggaggcaacaaatctgagttgttccacagatactttgagtgcagtacaagttggtaatgggtaacaggctaaaccatgtggcaccccttccctcttatcagcttcttgctaccatgcagaaaagtgctgaaggtggcctgccctaaggcagtagcactagagcagggatggggaggacttggtggccagatgcatgtggacatgatggaaagggaagagaagaactgtcaagattttcactatcagtggtataagccccgtagtaatatgcctagtgttccattattggaacactaagtatgtgggaattatttatatcctaccgctcaaagccatcaccaaggtctgatcgtgaaaattcaaaaaattgcaacctgaggcataaatgggttttaagctccatacagtaaaacctagcatatgaaaacagttctggctgatgggttggtagaagtgatagatatagatacatacatacacatatatgcacagtaatagatataggtaaagaccttgatatatgtacatatattgtatgatacatatccatgcatatacgtgggtgtacacacacaggtacacacaaatatatatgtgcctttggacaagaaaaaatccccaggacagtctcatttggcttttaaaatgctgcagttgaataggaccgtagaggtggcctaaggcagccttccattcagggcacgcagatttggttcctcagctcccttcttctctatttctgagtcacgtgggctgcacctatctgtcagaagcccactgcccacccagagcccctgactctgaatggtggcccagtgctttctgaagacagaggtgggacctggtgctggagacaatccattcctttcacaaagactgtaagccttacccaagcattaattttgctgcataggcggcctgttctcccacaaagcactgagtaagaagaaaaggggcccggataaaccagcagggcctggcagacaacttctggctcccttgccatttaaggtcccgaggaatgtggagacattggtgggggccagggtgggtttggaaggacggattttttcctctttgtctctatctctctttctctctgtctttttctctttctctcatagttaatgctatgattttgtaaaaaaaaaaaaaaaaaaaaaattctagtttctcagaatcctcattggaggcatgtgtatatttctaaatttaaatgtattctcctatactgtccggggaaaggaagcatttttcaaccaaactgaaagggaaaggtactcttttttattctaatactcacatttcccaaaacatatccttaatattgtacatttggcacagttattgttgaatacttggaaggcgatgtgtatagcatacagagctgcagctttggactttgtggctttaggtaaattacttattctctttgcacctcagtgtattcttctgactaatggggacagtagcaacatcgatgtctcggggcttctgtgagtattcatcaaggtaatatatgcaggccagtaccacattccccactaaaggagtgccacttttttttttttttttactacttgcattattgttgttgttgttgctgtacgtctgaagggctttagtcctcttatgagcaaggcaaaagggacaatgttcaccctttggactggaagtaagaagcccctgcagttccaaatgactccacatttggaatgatttcacaaggagtgcaaaagaagcctcttgtttgactttgcccacaaatgccagaggaggactcttctgagccatgccaataagaaaaatgagaatgccagcttaaataaatgttatcacaatctctgcagaatcgtgatgtctccgattcttaaaagtgtctactgcagggtatttattattctgtgataataataaatcgctgcttatgaaatgcaaggaatcgagtgtcatggaggggaggaagggaagtaacagggagaagaactgtgagagatggaggtccagccaggcccgggctattaatcatcgccctccattatttcctgaagattcattcattgttccataggtacctagagggtcaattagagaccacagacaggctttttcaaagacgcaagagggtcaattaggccctccttataattttctgctttaacagcaaatgccagcctatcgtgcatcagatgcaagggagtttggaaataaacagggtactttccctcctcctctaaaaaaaaaaaaaaagaaaaaatccaacacagagacatggagacagtcggcgattgggaacgcttggcttgctggctgtcaggatctggttcaaggaaggcaaagggaattttatcaccaactgggacttgagaggagcagagttcttctggtctcagagcacggggaacggtcagggaatttgtatgatggagcaccctgttcccatatctgagatgattcatttatcttgagtgccatcttaactacaattagagtacaattataaagtatctacaatggaaatgggtcttgaaatcaatcgcagctggaccggcgtgcggtgagttgccgtgcccaccacgactgctgtctgtgtttaggacagagttcaaccaaacgtaccggtgtgtgattttgcacaacactgctttgtatttgttttccctgagaccggcaaacacattttttatttattttatttttatttttcgagatggactttcgcttttttgcccagcctggagtgaagtggcatgatctcggctcactgcaaactacccccgcccccgggttcaagcaattctcgcacctcagcctcccaagtaactgggattacaggtgcccaccaccaagcccggctaagttttctattttcaatagagatgaggttttgccatattggtcaggctggtcttgaactcttgacctcaggtgattcacccacctcagcctcccaaagtgcagggattaaggcgtgagccaccgagcccagccggcaaacttactttaaaacacattgcaataaaataaaaagaaaagggattgtcctaagtgagaagcagagatgaaaatgtggaaggatgattgtgagaagtccacattgctccatttggacttcctttttgtagtgggctattagattttgcctctgcttgtttctgaatacccaagcttgctaacacagggaaagaccaattatcatgattattattatttaccttaagacctgattctacctatctatgatcacatagacatttggaagcaaagagaaatgcttttcatgtgggaaaaaccaataccaacttcagtgatattatttctccgccccccgcaccgggctcttgggaatatctcttagccctcaattgtcacattcattcagcagatgttagcacgtgcaggcaccattctaggtgttggggatacatccaaaaacaagcaggaaaaccccattctcttcatttctggaatgccggagcactgggcccatggagcccgtttcacttacacgtttttgtcgtctttgagtttccaagaagggagtggcactatagctgaagaggatgaccctctatcacagcctttgctaaaaccactgaaaactgtcttatttttcattttgcccggaaatgcgacacataagtgcattcctctagggaaggatttttttttttttttttttttttgagacaggagtctcactctgttgtccaagctggagtgcagtggcgcgatgtcagctcactgcaacctccgcctcctgggttcaaacaattctcctacgtcagcctcctgagtagctgggattatagtcacctaccaccatacccagctaatttttgtattttttagtagaaacagtgtttcaccaggttggccaggctgctctcgaactcctgacctcaggtgatctgcccaccttggcctcccaaagtgcagagcaggaatttcattggatttctacactgctgctttttcagagcctggaacagtgccaagcacatagtcggccctcagtgagcatttgttgactaacttaggtcacagatgtggggctgtgattctgaaggccccggctcattcttggctttcagagaggtttgctttcactcctgggcagcagctgccctggctgctgccaccaccgccttcccggaggtcagctttattttcagtgtttttgcccttccgatccctgggtaagaagtaagaaaatttctagtgcctggagtctccatcctcgtttcccagtcatatcctagaagctgcaaattgctggcttgtggatgtctttggtttggcctgctgaagtttgttttggattttttaatgaaataaattagctgtgaacatttaaaacttgggagacatcccatcaaaattgggatttcctgcttatctcgacaaagcagatctggcatcctttgcctgcattttacatttggctacagttggctggacttgagcagcggctgcccctctttagctggggcatgtgccctgtggtttgccatagtacccatcaggcctgcttcactcattgtagaaatggcctggcctcctaggcattggagatttctgttatgctcattcatgagcttgcctgcttacacctagctgttgtgttggttctcataggtctccctgattccagcctccaattcactgagctggcctctgccagtgtcacttctccccagtcttggctttgatcaagcttggaaaggcctggcctttgtgttgtcacattcttctgcctagagtatgccttttccttcaccaaaccaagtggctctttcggaagacttgcctgaatcctagaccccttctctctacaaccttcagtctgagttgggtaccttgcatcctcctttgttcccatactaacccctacaaccatggtcattttgtggttatctgtttaattctctgctggctattccaggctgtcagctccctgactacaaggactttgttgctcacaatcatatccacggcatccacacaagatctggccgctacgtggaaggacacatagttccgtctggcttggagcctagcttgggagagggacagtagtggggaagggtgagcttggagatagagctgaccttcccaggtgcttcagcagttacagcaagattctagatcttaccctgacagtcacagaaagcactgggagcgtttatgaatgttgtggtatctcacataataaggggaccatgcatgtattttagaaagagccctctggcttcagggaagaacgatggatttgtgagggtcaggactggtagcaggtgggctcctagaatagtcccggcaagagatcatggaggccagagccagggatggatatagactaagacatgcctgtagactgagtgtcgaggagcaagtagatcaaattctagcatgagactgggagaaagagatgttctccagccaatggatttatgaaatgaatgaactttttccctttcctcccaagcattgcctggatcaccttgttaatatggtttcttattaaacgtgctggaaaaaagaggctctaagtgcgtatgcttttaaagcaacactattagcaaatggccactggcttcatttttcctgtgcatatatttttgtgtattccgggaggattttcttttctttttctttttaatcctcctcctcaagggaaacattcttctcacaatagcttcctggtagaaagttctaactaatgactttaatcgtgtgaatgtattgcagaaatggacaggacaattctcagcccattcatcttacagacctcaagtgaacaggcacaaaacaacaggctccaccctccttcccccctctatctcatactttacctcaatttatgacttggcttacaatccgttgcagaaagcctagctccccagcttctcctgaatctacgtttttctattttgtctgaactagccaaggtctctggagtttgctgttatattgcttcagagaaattagtgacattgaaaggctgttgtcttttttagtgtacttttggttgttaggagaaatttacaaggccatttttttctcccgtctctgcagttcaggagattatattagaaaatattctatacaaaaaatatgcatagtagggcttttctccagctagtagctcagaataagtcagtactactgaaacaggtaccttttgtggaattgattctgaaatctgtttggatctgaaatctttctttcttgcctttgagtaagatacggcagagaaaaacaattacactagctgctggtctgtatttactggttagaatagaatattattaccatcaagaataacattagtggccaggtgcggtggctcacgcctgtaatcccagcactttgggaggccgaggtgggtggatcacctgaggtcaggagttcaaaaccagcctggccaacatggtgaaacccccgtctctactaaaaatacaaaaattagccgggtgtggcggtgcatgcctgtaatcccagctacttgggaggctgaggcaggagaatcccttgaacctgggaggtggaggttgcagtgagctgagatcacgccattatactccagtctaggcaacaagagtgaaactctgtctcaaaaaaattaatgataataatgttacaataataataatgttagtgatacatatcattttgaaaccagttcttaagcaattaaaaaaaagcagctatggtgattgagtttttgtgttatgaattttatactctgaaggcatggtcattgtgaatgccaaagaaatgaacaggagaaaattttatttgaaagctgggattgttgcatgctgcagaatttttttttcttttgctattgctgtgtaacaaatgaccacacacttagcagttcacattcacatcttgtttattaactacaattctctagatcagaagcctagacacaatgtgactggcttctctgctcagggtctcttggggacaaaataaaggtgtccgctggaggaacatcctttcctgcatgctctgtggaagaatccactgccaagctcattcaggatgctggcaggattcagatccttgaagttgtaagactagggcccctgtttcctactgacttctgctggtggctgccctcagctcccagaggcaacccacattccttgacttttggccccctgcatctcaaagccagcaacagaaactctcttgtgcatggagtcccctcctgctttgaatctctctgactttccttgactttgatgtctaggtctggatttcaagggctcagaaactctctcatgcatgtagttccctcctgctttgaatctctctgactttccttgattttgatgtctaggtctggatttcaagggctcacgtgatgaggatagtttctttatcttaagggcaactgatgtggagtcttaattaacactggcaaaatcccttcatgacagtacctagagtatgaattgactcagtaactggaagaatgcatgcgtacaccatggaccgggaatccgggaggccaatttagaattttatgtatcaaagccccatttttttttgaataacagaaaaaaaaaagagacctgatatttggagagactttttcaaaagcagaaagtttaatataaaagaaagggggtaattgaagaagatataaactgcaaagaaaggatgttaggtagagcgccttatagggaatcagaggttttattacaggcagacacggcttcacctgtgagccgagcaagtgattttgcctgcagagaagaacgcagggttccttctatggctcaggatcttcagttaccagcagtggaagtgaattgaaaatagttggtctcttgagtgacctgatgcaactcattatcttctctgtgccttaacgtctctatctaatttcccattaaaagtaacaggaaaaagcgcaatgacttttgcaccaacctaacaatgggttgacattcaggattgctataatgatgaagcaatggcaaatggagtctttgtttttagccccgtggaggcatatgctgggcactcaacaaacatcacttcccctgcccttttctcagatagagttatccaaacaaattggatgctcaactctggatttgatccaagctctctggaaatctctagcttctcaaactgtttcgtggtggagtgccttttgggcacaggagaaggaaataagagcctcgcgaggtttgggaatgctgcctctagctctcacactgcatgcagaattcctactctgagagctcactttatctcaaaaacccatgcatattctgcatctactctgaattccgcagtgttgtgtgttactatacgatctagtgttttcgttgcttacaagttagattcacactccaggaatgtatctgttcccacatcccctgatgctgagcataccagagttaagggaggcaagcaaggcccctaacctcccaggttcatggaggtacccattctgcacttgttgaccttgagcttgaggactccataaatgtctgcccttggcattgcacgtgcctccctctgggctgaccctgctgggcctgtcacttactcccattggagaggcctgtttccatacatagctctttgtcagttgctcacactcggtcaatacttgccttcctttgaggccatctgcactcactgacaatctgatcgctcccctgaatggaggtgaaagcatgcaagctaggagttaagatctttaactcagggaagaccctgtctatggaagtgctgagctcttcagtgtcatcacagaaaagcatgagcccctccctggtacggagtcatcacatcccatagctgagcgacgtcggagctccacgatggggaggtgacacatagtcagttaattacataaagagaacttgagcaaactcttactctgccatatgctgtgcagatccctctgaaaagctttacagatgttcttttttttttttaatccctccccctatctttctttctttgcacccacgatgctctgcacttcaagctaaatataatgtatctgattttacagcatacatactaatcaggtttgaaagttgtcttgtgaggctttaaaaagctagccaagagcagtgcgatttctccaaaaggatgtctgcaatcaagatgattacatgggaaaataaatcataatttatattgctgaaaatgtcatttgcaaaacactttgacaatactttcctttcagtctattttcctgtgtatggggtaagtgttgcccttctgcaactttccttttattttatttatttatttcttttcaatactctgaatatcactggagcagctgcagattcagggcagtatggggtggttcaggaacagaactgacaggtattgaagccaaaaattgaacaataacaacgtaggagggagaatccaaagatagtatgtgttcaggatacgggcactcgtgtgggtgaacacacacacacacacacacacacacgcttttttttttttttctttttttttttctcctattgcaatagaacgtaaaggtagatttttagaaccaaatgccttttaggaagctacctctcttccaccctgctgcctttgtgttgaataaactatattaaattatccaggaggaatgattagtgatctgattcattaatatcccttgttattaagaactgtctgtatttgtgtcctggttggcagatattaagtccacagataccaataattaatatctatggttgattgtaaaaatggccaccaattcttccctgtcccctgcatatgtacatccttgcactgtgaaattgtagatctcgccctccaaaggtgaagttcgtttgtccactccttgaaccaggatggcatgaaacttgatttgaccaatgaggcatttggaaacacggcacaagcaaaggcttgaaacgtgcttttatgttggtgcttgcccacttgctgtgctacgaacccttttacttctgggtgcgaacaagcccaggctagccttctgggcgatgagagacacaagaccatgtttccatattgccccagccaagagccaacctacagacgcaactgccttgctgacagcagacacctgcccagctgagcccagcccaaattgctgactcatgcaatcttgagctaaaaataagtagctgttgtttatagccactaatatttgtgatggttcattgcacagcaaaattgaatggagacaatacttttgaaattgactcttcgggagctgttgtaaagaagtaaaatgtgtagtgtttgcccttttcctcagctgtaggcctggtatgcagaagtattcagttatttggtgagtgaaccctcgctgatgccctggctagtgttttctgtctcaggaagcatgaacatttcatccagggttatatgctacagggatattcaagaaattgaagatccttgaaaatctagtctccctcacaaggatcaggtggcaggatctaatgggaggggtagagagtgagtgttaacacacagagaacccaggagacctttctcagaggtctcatatcaagaaaagatcatttctcctaagcaatcaatttctttttaaatctgaacctcatatctgagaatattcccttcttttatctggccactcgggagctcaaaaataaatttctggcacccttcttcctggctccagtaaagtcatacaaccatatggtacctctctggcaactaatttcacctatttccttatttgtttaaaaattttaacttaaattttttcccctcaagatctatttacggatcatcagttttattttttcttttctttcctctttttcttttgctcccttttctccccactcttgactcttctctagtttttatatgcagtttgtatttatccatgccatctgaaatcctccttcctttttaacaagacaagtagaaaacgaaaacaacatcaaaggatacactacacaattgttggagccctaggaaccgagagaagagtacaagcaggttcttgaactgttctctccccagcaactataactggaaggaacctcagtttgtccattcattcattcatcagagcagcatagcagagtagaaggaactctgactttggcattggtgcctctaagtttgaagtctaactccatcactgtgtttctttcctcttgctgatagctgatttgttataaacaaattaccaaaaacgtactggctttaaacaacacatgcttatcatgttgcagttctggggagtcacaagttcaaaatcagtctcacctggtcaagatgtcagtagggcttgttccttctggaggctctaggggagaatctgtttccttgcgtttttcatcttctagaggcctcctgcattccttggctcttggccccttcctctggcttcaaaccagcagtttaatatcatcacatctcctttactgattcctcttccgttgtcccatcacattctcctcatctggccctctggccactctcttataaggacccttttgatttcattgggaatacccagataatcttggataatcactccatctcagggtccttaatcacatcttcagagtcccctttgccatggctgatgacagagtcacaaatttggggaattagtgtgtagacttctcttgtagggagtcattattactctaccacaaccactaattctggacttcacgttccctcatccatagagcagggataacaatatcctccaggctatccgcggaagtagagaatataagctttatccagggggccactcagtgatgggagtcttccttatgaagctgtcccagctccatctctcaggactgaaatgtgggtaagaccatcacatttttcatcccccgccccccgcccccaacattgactgggcagatattcatacaatggcgattgttttgtctgcctggatggctttaacataataccatagactgggcaggttaaacagcagacctctattcctcacagtctagaggctgggaagtccaaggtgaagccatgggcacattctgtgcctgcctgaggctctctttctggttcccagatggatgcctttgtgtgtcctctcatggcagagagaggaaggggtctggaacctttctcttataaggatactaatcccatcgtaccccgtcccccatgatctcatttgaaattagtcacctcccaaagccccacctccaagtactgtcacactggggcatagggcttcagcatatgaatttgggggagctggggagaggaacacatacatttagtccataacaactatctcacttacctctctactaagtgattcagaaaatagcaagtatagtagtgggagaacatggtatcagaaccaggagagggtcctctggctttctgagttctgccaaaaaccaagttttgctgccttgggcctgtggcttctcctccctgattgtcgctggccttgctgtaaattgtgaggcatccatgtgaggcacaggatggttccaaggaccaactgaggctgtctgtgctgaggctgggagggtgtaagtgctcagaggcagccggaagctgtggtttttacctcccaagactgtgcagagcttccttcttctgtagggagaagtctctcaggacagggctcacaacagtgcagtcaggagattggaaattttagtgacaccaaagtgggctttacttcctcctcctagaattcctgccagaaaggtggagatgtgcaataaactgagcaccgatagagtaccaagaacatgctttttgcacattgtttgattcatcaatcagagtggggcatggctgtcatcagttcagagttgaaagaattgaagatcaaaggggtcacgtctctgtgaatagtattagtaatagcagcagtatcgatagcaatcatagtaattaaaatggaagcaaccaccagtgtaatcatagcagaaactcacatgtgtgtgctttctatgtgccaggcatgaggctgaagtcatacattcattatttgttaatcccaccctaagtgataggtgtattcatcattctcagtatcagaagaagaaactgaggttcagaatgacccagtaaagatcacaagcccaaccctggtgaagggcgtgattggcagaagcccaatttaagcccccatcatgtcctgacgctttcccaaagctgagctgcctgccagggtctttgctcttccactgccaagaagtaaggttttggttgggcgcggtggctcacgcctgtaatcccagcactttgggaggccgaggtgggtggatcacgaggtcaggagatcgagaccatcctggttaacaccgtaaaaccccgtctctactaaaaatacaaaaaaaaaaaaaattagcccggcgtggtggcgggtgcctgtagtcccagctactccggaggctgagacaggagaatgtcatgaacccgggaggcggagcttgcagtgagcagagattgcagcactgcactccagcctgggcgacagaaggagactccgtctcaaaaaaaaaaaaaaaaaaaaaaagaagtgagttttttttgtgtattctgaaaggttcccaagctcgccgcagcctgctattgtatttaaagggtgccctttgctgcgtaactagggcaaagaagaaccaactggctgttccccactggctgtggagagttccagctcatccaccctgcctctgtggctgagtcggggagaaaaggacaaagtttttctcccgcaactgggccaccaaaccagcagagcctccagccggggtggtctcgaggaggcccattaccggctggagtgacagagtgtgtcaagcctgcagctcgtcccgtgtctaatggaacagaaacaagcaccctgctgcccttgttttccagtggctcaccggggctctgcgaggtttattaatcttagcgtataatggaaaatgtgttgccatgtgaaatctagagcctctgttcactactccgcgaattgaaggcggcaggagtctttgtctcatttacacacagtgcctgcgagagactcttagggcagaagaacgccgtcgtaaaaatccgtgcggaatttgaaagtgtgcattaatgcatgtgaccagatggttctaaaatatgccactttcaccaaaaatcatcctctgaaaaactcttctgaacaacatcggctgtgcatagtaactgccttgagtggggccattttagaaaatatatgaggtacgggatgaagatgagggaggaaaatggttcctacttatcattactttgtccctccaaaagcctgcatgcgggaagaaaaatccacccagtgcaagaaccgtggcagtactcagaccatttagaatcactttgagttattaccaagaaattgctaaccactgctttccaagttatatattaaatttttcttttttttaaaaaaaagcttccaactttttttttttttttttttgagttggagtcgcactctttcacccaggctggagtgcagtggcccgatcctgggtcactgcaacctctgcctcctggattcaagcgagtttcctgccttagcctcccgagtagctgggattacaggcacccgccgccacacccagctgatttttgtattttagtagaggtggggtttcgccatgttggccaggctggtgtcgatttcctgaccttgagtgatctacctgcctcggcctcccaaagtgctgggattgcaggcatgagccacagcgtccagccccaacttcttaaaagccagaaacaactggctgttagctgtcacaatattaatactagtgtgtgcaagtaagtttgttttctgcttctgtcttacacgttttacgggctatcagtagatgcatctaataatcctaacactgtcatccttatacttgaggtcttattgtccacttctaccttagctatgtaaacagatgagtaacctactctggatttacccagatagtgctgttaggcaccacacacgatgagattggaggcacctgggtgtcagcctcttgggctggctcattacaggccactctgtctgaggaacactcaggtttgcaaaccgtttcttaaaattacaggatacctagggacctgttggggtgggagggaagaaccctatgggcagaaatgtgactttctgtagcaaagatgtactgtttcccactgagaagaatcaaaaatagaaaagtgcttccttgtctctctatattgttattaaaacaagtagatgcattttcattgaatcaaggcagttttcctttataaaatgtcctatttcatatcactgttcaaacttgacatccacatttgagttggtttaaaatatcactgttttgttgacattcacctgtattatacatttcagttggtcaagtcatttaatttatcataaaccatttaaggagcagttggagaaaagggggaaaaagttaaatgttaatgattcttttcgtaactgcaattttatcggctcctttttgtacatatatgattatgaagcaatttgcatgaaatttacaccttttcaaattttgaaaattgccttgttgaaaaagaatcgctgtacttctcaatactacactgattaatcacagttatagagtagacataacatttttattaaactctcagtgagcaggaaaattagcacttcctgcaataacgatactaatttcattagtgaacgttttcatttataaagtgcttcttccttatcttgaaccttttatcctcttcttattgaccaaagagagggcatatctttgggagctgctaataaaccatattcgtaatatgatgtgacctcatcgacaggctgctgcttctagctcatcatcttccttgatcataaatacccatcggtacctcttgtcacatggtgctcttagagcttcctctttgaatttcacatgtgataagagatggtttccatcctgaagagcttgcagtgggatggttatcggaaagattaaaactctaaaactaacaggtggatataaatataaagaaaatacagtattttgttgatttatgttcatataacttctttattggtaaaagggagacaggtgagaatacaggaaatccttgtggccttgtttgccttttttagaaatttaactttgcaaacaaactcaggggaaactagtgaggtggaaataaagaatgctagactacgggtctggggcccaagtgttttattaatataaaaacttgcgtataaatgtccagtttcaccaccaaatcctttctgaaacattggtagtagatgaactaatgcaacaatttatttttctttgagacaggatctggagtgtggtggtgcaatcataactcactgcagcctcggtctcctgggctgaagcgatcctcatgccttagtctcccgagtagctgggattacaggcatacaccaccatgcctgcctaattttttttaatttttcttttatagagatgcagtatcgcttgttgctcaggctggtctcatatgcctggactcaagtgatcctcccgcctctgcctctcaaagtacagggattataggtgtgagccacgaagcccagctgctgcagttactcaaccagcttcctactagaagccaggcgtttctcaagcttctgaagacacaaaggtgaaccccagacaagccaggtttacagagtgtgcatttcagtgggggagccagccaaaaaatcagtaaacaccaagataaaatatattccagtggcgatacattttcagaaacaaacaaacatggcactgggctggaaatgaatggcaggggagaaggcgggcggggcaagctttggaaagcacgggcaggtaaggacagggtttcaaaggtgagaaggagctggcagtgtgaatagccaggggaaaagtgttttgggtagaaggaacagaaagtgaaacggtgccctggcaaggcaaagattattcattgctgaagagactatgttgcccagatgacttgttcatgtaatctgtgatttttaaatttagaattgaggtttgaagggaagtattgctcctttctttatctgcaatgggaaagcttactgtagttacttacagtagaagagaaatgtacatttctgaaaatccactgaggaagaaaggggcagtgatgattctaaatgttaataatgcagacagcctttgctttatgtatcaatttttgtaaatgtgttgcttaaatagatttttatgagccagtaatggtttagaaaggtaaatgacttgcccaaggtcatacacccagtacacttgggagccaaaattcatcatagatgactttgtgaaatgtcccattaaatgtgtatatatatatatagtgtgcattacagcttaacagacacacattcatttgacacattatgttttaactttattaataagtttttgtgggcataggtcttgttttgccaacttgacatgtggattttaaagggcaagtgccttagaatacaaactgtcctataaagaataccatattatcgaaaggatgttcaaactcatcagttagaggcgttgcagttggctgggtgcagtggctcacacctgttatctccgcacttaaggagtccaaggcaggtggattacttgaggtcagaagctccagaccagcctggccaacatggtgaaaccccttctctactaaaaatagaaaattagccaggcgtggtggtatgtgactgcaatcccagctactcgggagggtgaagcaggagaatcgctggaacccgggagacaggttgtagtgagctgagatgtcgccactatactctagcctgggcaacagagctagattccatctcaaaaaaaggcattgctgttaatacaacaatgataagttatttcacactcaccagattggcaaaacgttaagtactaaggtcataacaagcactggaaggatgtggagaaatagggaattttatgcattactgaactgaaacagccattttggaaaatattttggtattacgtaataaagtagtacttagcaacttatgcaatttggttcctataaagatgccttagagaaactgttgagaactaggaaaagctcaggaatgtttctggtgcataatttgtgatagcaagaacctgaaagtcctccaaaagccgtctacaatgaaatggggaaattaatggtggcacattcctgcataggagatagcagtgataatgggtggataccagaacgtgcatcaacacagaagaatctcagcaacataattcaggattaaaacagcgtttacagctgggcacagtggcccacacctgtaatgccagcactttggaaggccacagtcggcagatggcttgagcccaggagtttgattccaacccgggcaacatactgagaccccatctctactaaaaatacaaaaattagccagtgtggtatcatgtgtctgtggtctcaggggtctcaggtacttgggagactgaggagggaggacctcttgagccgggaaggtcgaggctgcagtgagccatgattgtaccactgcactccagcctgggctacagagtaagactctgtctcaaaaaaaaaaaaaaaaaaaaaaaagcatttacataggagaatatatacagtatgattcaatttatagaaagcttaaagtataggcaaagctaaacattcaggatatttgataaaactataaagaaaaccaagggaatgaagaatgcaaaatatgagctagtgttttcccaggtgtgagggacggggcatggttgggaggaaaacagaatggtgccatggcgagagatacacaggggaggtattggaaagttctgtttcttaaaatgagtgacaggtacctaggtagtcattctatatgttattaaagtgtacacacattgcttatgtgaagtcttgttatatgtggcacatatcacataatctgaaagaatctgcttcctgtagtaaaaattaaaaaaattatagccgggcacggtggctcacgcctgtaatcccagcactttgggaggccaaggcaggcggatcacgaggtcaggagagagaccaccctggctaacatgatgaaaccccgtctgtaccaaaaatacaaaaaattagccaggcatggtggcggggtgcctgtagtcccagctgctcaggaggctgaggcaggagaatggcgtgaacccaggaggcagagcttgcagtgagccgagatcgtgccactgcactccagcctgggcaacacagcgtgactccatctcaaaacaaacaaacaaaacaaaacaaaaaaggtttaagaaatgttctagtaccttgaaaccaaaataggtatcagatacttggctgttttgttttttcttcttagccattttgacctgtgagattttatgtgatgaaaacataagaatgtggtattacaccctgtgatttgaattttccatactccattccattctatatgtcagatgcatcttcctaaaacacacctttgtcacatcactcctctgctcaaaaacattcagtggctccctgggccctctgggactaagtttataatgctcagcttgtcattcctttgcccagtgtactctctgtctcactaatttgttcattattttaatgcattttcttgaatacacttctgtagacagccataagatgggtagcaggaatgctgcactgaaccataatccaaagctttcatcaggttcacttgcttcctgtccttgccacaccatctgctcattctcgatctccacttgaacacacttcacattctccacttgtgtatcattcactattcttgctacataaattaacacaaattttgcagcttaaaacagcacacatttattatttcatggtttctgtggatcaggaatctgagtatcagacttagctgggtcctctgcctagggtttcacaaagttgcaatcatatattggccagggtgtgttctaatttggtagcttgactggggaagaattggcttcccaaatcacccagattactagcagactttatttccttgtagctttttgactcggcctggcttcttgctgactgttggctgttggctggaggtacccctcagctcctagaggcatcaacagttcctgaatatctgggcttttcccacaaagcagcttccttcatcaagccagcaacaagagtttctggggcaagttggtcaacaagatggtgtcttacatgcccaatgtaatcatggaagccatgtatacctcatcacatttgccagatttctgctgattaataccaagtcagaagtcctgcacacattcaaagggaggacactgcacaatggtgtgaataccaggtggtagggattatgtggggccaccttacagtctatcagccacaacttgaagtatcttctctcctctttgctgccaaataatgtctctgaagactgtaagacctgaatcctatctaaagttgtcggtggttgcttccttcctgaaagcaacaagaagcccatgaatgtcttatggcctgaagatctgccttcaaagactactacctgtgttgtcacaaatggcaagatttcatcctttttatggctgaataatatttcactgtatatgtgaaccacatttttaaaaatgcatttctgaacctgaaggacattatgttaagtcaaataagccagacacagacagacaaagacatatgatctgactaacaatgtggaatctgaaaaaaccaagctcatagaatagaaacagagagtgagaatggtggttgctggggctagggggtcagtgaagtggggaggtgttgatctaagggttcaaacttctcgttaataataaaccagttctggagatctaatgtacagcatgagtggtgatggatgtgttaattaattcgattgtgataatcattacacaatgtatatagtaatcaaatcattactttatagaccctgaatatattcaatatttatttttcaattatatatatatatatatatataaatatatatatatatatatatatatatatatatatatatatatatatatatatatatatatatatatatatatatttaaagctgtcatggaaagccttaaagttaaaatacgaagatttttgagaaaaactttgcatattttaattgctgtctggaatcctccttcagctgggatgagaaaccatctctgggttagttctgtccctggaggtgagggccagacaacacatcaaaactgactttttattttttttcaaagttgttaagactatctaagattcagatctccctaatactgttcctagttagtatttagaacgtatttgtttagaggatactagcctgaaatagccctatctccaggttgtctgatgcgatgaggatgtggtgttaatcttacacctacccattagtctataaaactcctgagggatgctcaggaaaccaaaaaggatgtctgcatggaggacaagaaggcacaaatcgtctgatttcaccccatcctaagatcttgtgacttcagctttgttttggactggggcattggatctcccacatgccctctcttaagtcgtgcatttgacgcatatttaataagcacctactgtgtgccattagagaccatgatacagttttgaaagcctagcctgaataatggatgacaccctcctaaagccacgatttggtcttgattatttttagcactatgaagaaaaatttcattaaatcacaactctatttacttttaacccaacatggtgaagttatcaacatataatgcctgtctatactttcagatggaaaatgcctagataaatactgcatgggacatttttaaacatgtaaaaaaatcaattttcgtaaggttacatctttttacctctttatataaaacatgctatattaaaagagagattaaattttaccctgtggagtaaaatgcaaacacaaaattatttttttcatttttcagagcatgtactggattatcatttatttatgaggctttttttaatctagaatatatggaaatcttttcttgaagcacaatataatattgaattgggaatgttgtctgacagtttccctcttaccgttgcatagaatgactctcctgtatgaatttttaaaagaaacttcaatatgctatgcatttgaaagggaagaagtaatcaccataatcttgaggtatcttttaaataggcttccttccagttcttctatgtttcaccaacttttctacaacaaataatgcatctgtgatttttcagaactcacaaaatgtccagctttctttcttttattcaaaatttatacttcataattgaagttcacctcccaaaagacatagcttggtttagcatagagctatgatgtgttttctctttgttccttttgcacactttccttgtctggaggcgttgggcttggatccttcattcttcatgaggctgatgtttttccatttcggtttccttaagtggtgaagctgcacaaccatgaaagcagtgaccacataaaaatgctgctttgaggcctggtacctcatgcctataatcctagcacattggatggcccaggcaggagcatcacttgaggccagaagtttgtgaccagcctgggcactatagtgagaccctgtctctactcacataaaaatattagctgggcatgatggctcataggtgtagtcccagctactcaagaggctaaagggggatatttcttaagcccagaagattcagactgcaatgagctatgattgtgccactgcacttcagcctaggcaacacaacaagaccctgtcccttaaaataaatgctgccttgggtatcttaatcctttctcaagattccttctaaggctaacatttctttgccatccccacactaccatctgctcacttttatatatcttgaccattttatttttcatcccatcttcactccatgtaattagttagctattgctgcagaacaaatcaccccaaaattcagtgattagtttataggtagccccatttcacccatctcattctatagctcaggttgaaagttgagtcatgaattggggaacattcttctcttggtgtaaattagtcaccagtgtctcatagggttgggctgaaacttaacacatcccatcactttgattggctaaagtcagttacataaccaagcccagcttcagaagggaaattgtatgccttacaaggaggtgagaggatggaaaatgaatatttgctgaacagactttctgtccagtttgttgtatttggtggtggtgcagggcaaatatatgtttaaaaccttgttcagatttttagctttcttcagaacagagcttttaaaactgagcatttgtcccctaaattccagcactgcggccatgagtaaagggtgccctgaccacgagcaaatcatttagctggctcacctttcatgcaaccttgaattcaccaggaaggaagttcatgcagccctgggtatgatgccctaattttgagccaagccagctagagttcaagtccaaaccattccacttcctagctttgggacgatgaacaatttacttatgctttctgggctttggttcctaaattatttaaatggggatgattacatacattcatcattttcaccttctcaaagaccttctggacaattccccaattcatagctctgggagacagtgtgttgacactctatttgaccacatcttcctagcagtcttgcggaaggtgccactttgcgaacgatctgttgctaggtaatgtcaatgacatgactttcagtttagcacatgtacagatgaccttgtttgggcttgtgccgttggtaattcagtttcaggatttccgtttgacagaatatattcaagggtggtttcttgctatcagttgtacccttgtggccacagtttttccagataaccaagactcactaatattttcacaagaacatttgtcacctaggtccagatttcagaggaaaaaagtataccgccattgttcttgtataaactttataaaatatttggggaacatcactagccacctgcttccgaaagtacttagatactgtgtcatcttaatacaagacactatgcactaattaagctgttgttgatgcttttttgcctttttgacaattaaaaataatctcataccactggattagtctcttgcctttcaattttatgtttatatacaaatatatgtgcataccaaattttatatatatatatatatatatatatatatattttttttttttttttttttttttggtcggagtctcaccctttcacccaggctggagtgcagtggcgcaatctcggctcactgcaagctccgcctcccgggttcacgccattctcctgcctcagcctcctgagtagctggcactataggcgcccaccaccatgcctggctaattttatgtatttttaatagagacagggtttcaccatgttatcaggatggtctcaatctcctggcctcgtgattcacctgccttggcctcccaaagtgctgggattacaggcgtgagccaccgcggctggcgaaaattatatattatacacacaaacatacacacacgcacacaccaaatttaaaaagacagatacataggcagttgttatgcagtgtttgaaataaatttattgccagctatgggtcatttggaaaaagatcaatatgatgcatcaacataacaagtaaatggaaatgaatacaaccgcatggttttctgaaagcacggtttcctgcgcggcttccagaattgcatccctgacatttggaacatgtgttacatgctacagaacatctgtctgtgaacaggttaatgggaaaggtgcatctctacaaacaaatattacctgtaatgctgttgtagctttgttgattgttgatattacttatgaactttcttgcttttcagaaaccaccaccacaaaagaggcagtaacattagtattacattatacatcttaggcatttttttcctttgcccttttcgtaggtttttgtttgtttgttttttcttgtcagccacttcatcatgtttggtctctcgtctttggctgtgtttttctgtttctagttattgtgggtgttaaaaatcactttaatgattcagcaataattaggaagtccctatttgtgggtgttactttactaactaccagggatgaaaaggcaggttttgctttgttattacgtcacagtttcgtcaaggagataagtacttaaattgcagtagagtgtgacagcatatgtcgacggtgtgagtgatatggaataagagtgagacagggaggcagggcaggctccaaaggcgaagagatgtctgagccaaattgaagggtaaactgagttcaccaggcaaactgaggaagggtactcaggctgaaggatcatgggaggggaggagcgtgagttcctcttaagtgaatataaaccagggggtaggaaacaacatgagatgaggctggcgagagagaaggatgctaggtgaggtgctgtggtgcgccagagactgcggaagtggctttctaattaagaaacagaagccaggaaactcctgtacttcaaggttttggagtgggaaagttgaggaaatgtaagagatcatctctgtctctatcacattaccgacggagaagtgggataagaactatgtgtgttttcacttcttctttctttagagaaaacaaatatcatctgccttgctaggtagttgtgagaaatgaggagataatatctttaaatctcctacggtgatacctggaacatgatggtgcttgggaaatgtctcttcttctgaaatgaggctgcctcgaagactcactggaacccaagcaaagtgtctctgcatttcactccgagccatcgacttctgttctgaatgttaaaatgcaggtggctgtgagggagtcttctgagtcatgccagcgtttaaggcgcttgctcttctttgtgcacattcctgcttttctcaaagcctattgaaagcaagggccatgtttgctgttttctttgacagaggaaattttttttttttttttgagaccgagtcttgctctgtcacccaggctggagtgcagtggtgcaatctcggctcactgcaacctccacctcccaagttcaagtgattctcctgcctcagcctcttgagtaggtgggactataggtgtgtgccagcatgcccggctagcttttgtatttttagtagagatggggtctcactatgttgcccaggctgacctcaaactcctgcagtacagtattgcaccttcctcggcctcccaaagtattggaatatccggtgtgagccactgcacctggcctccaacagaggatttcagtcaatgctgagcaccaattacagattgattgcctctgtgattccaggtaaataaccttgttgtggagctgagtctttcatcaaaaacaaggactcctggcagatgcccagaggcatttataagcagtcccatcacgaacaaattgccaaatgcaaggcctgaacaaaagacacagaaaggatttctttatcgtaagcacacttctctacattacctttacaatccaacaactctggtattagtaaattatagaaacaacttttgtaacactatcttgtttgcagagtatatgaaaaatttgaagttaaaattcagctccacgaatactgcagtggtgagaaaatggcgacaaagattagtcttctgtgagaagtctgctaattattcttcatttaataatgccatgtatgatggccttcattagaatgaattcttctcaacacctatgcctctttcacctcagacatgccttctaattttctttggtagtgtctgcccacccaggtggtaatttctggtcataagtctaatttagtagccagctaaaggatatctgtgaacccttcgcaaagagtaatctattgaaaaggaacaacaaaaaagtatatctgtgaacttattaaatgactttaatcatatgaaaatcagccatcagccttattagagtggttgattttttttttaatctaagagctttcttggttattttctgttcttaatcattgttgtatatccttaatgcgcaggacatgacaccgtataacaagtgttttaaaaatatttacaattctgatcttataaaggaaaaagttacatatggtcctttgaactaattgctaaaatgacactacattaattagataattaagggtcttgagcatgtggctattgtattcattgggctggaagccaaccttttctatagctgagaaaatgggttagcataattcaaaattcaattgctgtaccctttttcatatgaatagataatacagaatgagccttaaatctgggttggaaaaactaacaggaactggttttattttaattgagttttaaagcacttctaggccatctcattgtctttatagtttaaccctttgaagttgtgactgccaacgtgctagtcttgtcgtcttacacgttaatggtaatgatctttttagatttattgtgaacctctaggaatgttttttttaaccagtaaatgcactgaaacatggaatcaaagtctctttcccgtgggccccttttcattgggaataaatgctacccatagattgaagtagtttataccagtacattttttaggtgccttaacttaccaaggttatttgtcaggaaaattatctcttgtaacaccaggttccctacctttagatgacaggacttaatacaaaagttttccccataccaactagtagtgtaagttgatttcatatccttttatttcataaagttttgcttatcgggtttgtcatcctctatttgaaattaaaatgtgtggtctcgagatgaccttaaagtatctgacccccaaatctaatcactcctagcatctgtgaaaattgacaaatatgtcaggtataacttggggcatcaaaacattgttttaaatatttcgtttgtagacaaggcaaagatcattttcaggttagtcctctgagaaggaacgctgggtgcagaagcatctttggtttctctgctctataatcggcactcattatctatgggtttatacgagcagaaaatgtacagttatatgttcagcacaagtgaattattgattggatttacggccagaagaatgttcctaagtggtcaatacatggccaaagtgtgtcaggtgaaggtaaaaatcaagtaagatctatacttttgatagcaattgctgttggattatgttacgcttgtcatctgaggttactgttgaatatagataaaaatgttaattgtattaatttagacaagaatgtggcttcaatgagtatttcttacaaagtgggagtatcaatttttcttaaatgtagagatttagtttttcaaaaattatattttttatatgacctgacgttgattggcttgcctacattctcttttggtgtatgatgacagtttaaaaattcggatgcattttgcacagaattaagacgttatgtgcaatccttgtgtttctaattatatgttgatcaatgacacctttacaaaactgtcatcagtctattggtggttgattggtccaaccttagcccgatacctctatctccgcttagtcattcctggtgggtgactgatgacccctgcttaacagtaaacttgttatgcatagggttgttagaaaagtcttcatcaatttgagccaaactgtggctcccagctacttccatcaggggtccttattccaccctttgattgcaaaatgccctgaagacctggtatgtcttatgtcagttacaagaggcccttctagtgatgtaccgggaacctcctatgggaaccagagctctgctaattttggggacaagaaatgatgaaaagaagtgccttgttcttggggcatcacagtctcatgacagagtgcatgttgtcaaatgcgcgtttaatcttcttaagctcaacttcatgcaagagacctaggaattcacagagtgaagatgatttctccattcccttctccgagcagagctcttgaagaagatgggagttaggagaagtgaatcttttgttttcgaagcctttgtccttgtgagtctcttaattggggtgtcttgtaatgcaaagtctttaaagatgtgtgttcctgaaactcaggaggctgctctatcccatggttcaaccaaagaaccagggccaaagcagtgctgaaggaacaactgattctcttggccctccttagagtgagggtacaactggctccaaaggaaatgttggcacttccagagtaattctgacagtactcagatttgcttcatgtacccattctagaaccttacctactcaagtgtaagatgagatgccactgtggtatcttcaaaggaatttagaatcatgtcttaatggctccattaagaagaattctttttctcttttctctgaaaagcatcccaggtcataaaatgtaatgtgggattgtaggttttgtgggaagatgcacttggcagcaattccttgagaggaggccttgaaatgtcagggtcccccattcatcttcccaagctgggattgacccagtgataacataatgataatgcagctgctttcaatgtcaagccatcaggcagcgggttgggggggttgcttggcccaggaacccgtgccctgatgtggagttggtaatctagagggttttgagttaagtgcttttgacatggaaaatcaggagccaagggcgaagctgccttttaaatgctctttctgaaagagtccactgcagatgtaattgagcctctcaggtgaagagctttattcgagcaaagctggttagtgttgcatacctgtttgggggaatattttaggcatcctcacaaaactgctatgtgacattgctgaaggtccccagcctccttgctcccaaacacttcaagaaggaaaatgctgttgcagaaatgttgtctaagctttaccattcagtgtggcccagatcaacctgtcccttctttttgtgatcacagtgtgtaattataaagttatttgtgtgtttggtttatgtcttccacactggactgtaagatccatgagatctaggaccacgtctgtcttgatcatttctccttctctaagactaacacaaggcctggcataatcattgtcatcaccatcaccatagctagtatttattgccatatacagttatgtaaaacattgtaagaagtgctttacatcagttattcccaaccatggagtcatgagtcaaagatggtcaaattggccaagatgaaggtgtttgcattttggagaccaagcacttgaatccataaccccaagatgtgactttccaggcttgggatttcgcaacacgtcgcttaatctcttagcttacattttgtcatgagtaaaactgaaacagtaattcccatgtgctgagtttgctgtgaggattaaagacaaggactgttctaagcccggcatataacgggagcccattataagtgaactgaggtgttattttaatatataccttttaaagtttgagtgttaggcatgctgttgagtgaaagaagacagactgttaccagaggacatattctgttctatgataccacttgtgtaaacgtgaaaagcaggcaggaattttccatgtgagagaagtcagaatagcagttagcttaccagggggtggtgatcttaaaggggcaggaaggagccttgtggtatgctggaaattttccattcatctggtgatgtgatcacttggccgtgtgcacgtgtaaaagttcaagctatatgcttaatatttgtgcacgtcggtgcgtgtaagcaatatctcaaaacatttgagagaatttcccattcattgacagaatttttctcccgcctcggtcaaagcacacagtgggttttcccaacaactgaggtgcctgagggttgggtgccaaagaggcagaaaggccgagatgaccgcttgacctaattccctattcagctgaggcctccacccctggcctgttcaaaggcagttacggatcttttactcaaaacctgaacctaaaaagaaattctttagccatgtccgtgtgaactaaattcagcgtcagatgtacaaggctgtggttctgaccacccccgggctatttctgaccacaggacagcttaaatggtgtggcccataaaatgtaatctgcaaactcaggctgaatgttgatctatttagggccaagagaagaccaggccttggcagcagttctccctgaggtaggatcttaggtcgaatggagaccatcaccctggctgccagccccaggaggctggaaattcgttagcattctttatctttggggatcggccacttacttgtggggttgactcttacagcctttgaccacctcccaaaagctggattcactgatgggcccccaactcaactttcactggccaaagtacttggggttaatttagcaaaccccaggatccccagagggtccctcggtattgtggttttctcctcgcttccaccttatagtggctccaccaggacctcttgactcagccagcactccttctcaagtcacttcgcagcacaatccgtttgttgttgctgttgttttttcttttgttttgttttgggtttttttttttgtttttttttgttttttttgtttttttgcctaatttgtgcttggcttctccacagaggcctggttctggtcccttcccctgcaaccccaaggcagggggcagattcccgtatcatggtgctccttggcctgattctgtggcctttatattagaactcaccttctggaatcttttattgtcttgttctctcttccaagctgcgcatcttccttcccttcagaggtttggtgatcagcgtggtggctcgtttctataatcccagcagttttggaggccgagactcggggatcccttgagcccaggaggttagagaccagcctgggcaatatagcaagatgtcatctctaccaaaaaacaacaacaacaaacaaacagacaaacaaaattaggccaggtgtgatggcttatacctgtaatcccaacactttgggaggctgaggtgggaggattgtttgagccccggagttcaagactagcctgggcaacatagcgagaccctgtttcttaagaaaaaagaaacatttaattaaaaattcagaattggaagttgcattgagccaagatcatgccactgcatttcagcctgggtgacagagcaagattctgcctttaaaaagaaagaggtttggtgccaggacgccatgaaataattactctaggtaacctgaggctagacaaacctctccatgtctcagtttccttcctggcaaaatggggaggtaaggccagatttcttctcctttagttttgtttttctacttgaattctatttgtcatcctctgtacctaccacctgccagttgctgtattagatgctgttttactcattgtctaattgaattctccaacaaccttgcaatacgcttgttatctccattttagaaacgagaaaatggtgactcagattaagaaacttgctcaatgtaaccaagtcacaattttaatattaaaaataatgagcatttattaagtgcctgttgaatgtgtaggattttgctaaatctttcacataatctcatttcatctttatcatagcccttatggtgaaaatgccattattctttgacatagaggaattttgattcaggaaggttaagtaatgtgcccagtatcatctatgtataattgatgggtctataatttcagactcaggtttgtttaagtccaaaaatcatgccattatgactgtgtaccatgttgcatgccttcatatccccaatggaaaaatcccttctcccacttttcttaaccctacaagatatgccaagattctatagcatctgaatttgaaaacctctactaattcatgaggcaatctatttgataatggcatgatttagttagtgttccttttttagagataaagcctcaccctgttgcccaggctggagtgcagtggcgtgatcacagcccactgtagccttgacctcccaggctcaacctatcctcttacctcagcctcttgagtggctggaaccacaagcagatgccaccatgcctggctaactttttttttttttttttttttttgtagaaacagagtctctctatgttgcccaggcttgtcttgtactgggctcaagcaatcctcccatcttggcctcccacagtattgggattacaggtgtgagccactgcgtgaggcccagttagtattctttacatttttaaaataaaatttcagagaaagcaaccaaagggagcataactctgataagaataataaaaagaaacaattcagcaactctcttacagatttttatcatcatcccattcataattgattccaaacgtgcatgaatctttcaagataagtgtcttattgattatcctgaaaacaagcgatcacttggtgtcctgagattcgctcactgccctcccctgattaccgtaaacagagatgttgatgagaagaaatgtcactttctttggtgttggatccataggacattttgaggaattgggtgtggggagtggagggagtgaagtgacccagatagggaggtgcttgatggcttgactgtggccttcaccttgctttttgtggagctggatatagacatttgttggccagctaatactgtcttgatctgttatatgatccttaggccaggactttttcctggtaattgtgcaaaatgtcccagtgaatgccaattccttgctgtcaggaaacattaagtttcctaagtgacatcctttttctgcatgtttacttatggttatgtaaatcaagcgggcctccccattggaaatgatggcagtggttacaagggacttcacctggtcttttgtagttgtggcaaatagataagatacaaatgtgacctgcaattcagttcagcattatgaagctgtatctgctccctgggtggtggtcacagccctgctttgtggccctaacccttgccttcctgctggcgggccttgcacaggtgcagagagggggttagtattggcaagctaattggataaatggtgaagtttcccctgggtggctccattgctccaggtgaagctcttgaaatactctgtagatgacaatagcctcaaacttgaacaggttcttgcagttggcaaacagaaggagaccagactcataggttttgggtgcggataatggataatctggctattgcatttaattcccagcctgatttattgaggctgcctttggtgaaatattgatttatatcttggggggccaggatggggctactctgtactcagatgaggcttgctctcaggaagttcttgttcagcagcaaaaatctgccctgtttgggctctgaaagttatttttgtagtggcctcacaagtttcttgtagcaggtcatgaagaggaatgaaatactataatcacagagcttgcagaagctgcctggaggaccagttagtctattttttgtacatgaggatactgaggctcagagaaagtgaggtcattgagtcacttgagttcttgttgagtgttctttcctgctgaggtgtcctaggtgcctcttaatgcctttaacatctgctaagagtatgtcacttattgacgtagcatcactttattgagcagctactatgtaccaaacacttagcatatgctttttggcattaggagctgaacccagagtggtctctgtggagaggtgcaggtttacccagggtggtggtagtggtgatggggtggtagtgatagtgttgatagaagaagaggaggaggaggaacttctcaggaagaagtggcagttccctcctttgtttcttatctctactgtttagcagccactctccaaagcctcttgctgggaatgtggccatcatagaagtaaatgagacatctctttcatctgcaccaacctccttattaagaccttatcagttacctgtagattctcccactgttgtacttgtttctccctcaaccaattgtattttagctctcaagttttggcagggttgagtctagtatttctgttgggatccggggagcatatggagtgttgtttgttattttttagagtttcttattgcggtaagtgctcaggagggaacagagggagaaggatagaggaaaagcaaagcaaaacaaaatagaaaagcacaaatgaagaatatttagtccattctgtattagtcctccttgatggggggacacatgccagccaggttacctgattcatctagttgtgattttattgacagtcatttctaccttgttggtatccgcagaggttgtcttgaagggggctgatgccttctttcactagctttatgtggctggcagttctgtcctgccactcttttcctcatcatctcagcctccctgcccatggcactcaagagtccaccttggcagaacctgcaactcttcagcgcctccctaatgaactccttgcaagggcccttggttaagttacagtagagaagtggttgcttaagcaagtagtttccggtaaaggcataaagatagcccataattgggtgataaaatacctggattgcatctaaaaataaagacttgtgaaggtaaaactgtagcttacagtgtgcgactgtttaccttcttttggtttcttctcatttaataggttggtcatctctctgctggctttttcccccttttttctcccttctgtagaataacatgtggaccattaactatgatgctacttcttagctgcaaggggggaaaaatggaaaactccaggggaagagggtctttacttagggagttggcatttgttggaatttcccaagaacatttcatgattagtgacaggttatcttctagtttacctgaaggctatggtcactcaacaaattttgtgttgcttcttacgtgtcacgcactgtgataagtcctaggattatagaagtcaataagctatgatgcctatccttaaggagagaaacacatataggataggaaaatagcttgccatgtctgatagatattaggcattcagtctctctctctctctctgtttattatagatagaaataaaaaaattataaatagaaatttatttctcgtggttctagaggctggaaaattcaagatcaagatgcagacaggcttggtgtctggtgagggctgctttctatccttcaaaaaggcaccacgttgctgtgtccttatttggtggaagcaagtgtgttgaatattctaagaggaatctgaaagtgttatagtattaaggaagacagatccaagatggtggcaatggtcaagaagggtgcgggaagaacccttcaactctaatattatttgagctgctcactgataaataaataggattttcccagttggggaagagggaaaggtttttagggagcagattagacaagaaacattgaaaacacaaagtgtatttcttgatacttgttaacactaggtgttgaggagacataaccaagttctcctgcagtttgtgtgttaaggcagatggaaatgtcttgtaactcagtaaaacagtttagaaatttaaagcctttggagagagtaagtattgagaaggcacatctctacgttgttgacgtgaaggagttgcaaggtcgggtagatgggatcagtgccaggtctaatgggcttcatttgcaagacctaatttctagcagatcatggtgtaagcctcaaatgggaggtgtgcctgggatggttgcagaggagttgttaagagctcagactccagcgtttagacaacaccagctgctacaaaggacactgtgcatttctaaatctgagtttctgcacacgtatggaggagtaatatggcacctcctcatttggttgagatgctctggggtacacgtacaaggcgctcaactcacggtggctccaccagtatgaaaatgtgttatctgccctagtctgaagtacagaagtcaggtggtgagaggtgacatgccatgatgtggttctgcttctctgagattgtctgtcagcttttccctcagtttcacccccctttctccctttttcaagatggttttagcacttccagacattataaccagatagcctattgctagagaacaaagcaccttctcttcctatatgtacctcttgggaacaagggaacctttccccaaagcccctcaacacacttaggctgacatctccttgaccagaactgtatcaaatttacatagcctcaaatgaagcatctgggaccaccaggattgggtgtttaggccatggaagagtaacagcccagtacacaactgtctccagtggccagcacgtagaccttccctcacactttccactctctgcatcccctcttccctctcatgtatctctattacatggagcctcactttatagtcctcattaagagactgtggggtggtagacagataacaatgttaacatcaggcaaatgggttttggatttaggttaccatcatttatcttctctgtaaccttagacgagttgcttgagttctctgagtctcagctgaccaagctctaaaatgagcataaccatatcagtttgtgtttcctgttacagggagaaaagactgagataactaaagtacctgattgagtaactgctctctgaaggtggaggctggactgcttcactggacagggtggcctggggttattctagtgcagtggtagctggtgacaaaactcaaagaagatgtaactagagaaaaggtactcagtgcagcctctgtgagctaccaccactgcctctagttttccagaaaaccaccactgaccactctctgtacagatgcgctcaagcgaccataaccaccagtgttcctaacaatgcgcctattgacttcttatttcaatagatatccagattgattatccctcaaggtaagcatcgattttacctttgtctcagtcaatatttacctctgaggtcaatacgtgtggatattcacctcagctgcagtcaatatccatttcgtattacaatatatgatgtgcatatgtgaaaataaagaacagcatggtacaaaaaaggtctgctaggcaaagaagctttttgcaaagcggatgtgtttttgttttattttttgtttgtttgtttttactgtgtcactttttagaggtcagattctatttcactaaataggacatatgtgtcttctgccaagatgtggaattttggcaaggctagcatgataacaaataaacattcaagcagtcacttaatgatattgaattgaacaccatttctcagaagttcctgtattaaattacaaccataagaacatacacaagcatgcagattgtaagtgtgatgagaatggaaacattccataggacgcagagttattcctcaagcccctggactcgcagagaatcaggtgtatgaagcaagaggaagaagacaagaatcaggaggcaaagagaaggaggaagaagcctcagtggggttgcttctttttatttcttagagccagagctggaagacaaggcctggcatattttggcaggcctggatcagagcctaggtgtgtaaattaggaattgcatttcgctgctgctaacaaggacccaaacatggtggtaaattcttccacataaaacaacagaaaataagttgttttctggccctgggctggggtggccactccaccgtcatcgatgatccgggctccttttctctttctgctttgtgacattgcttctatcttcatgataactcgctgcccagaatgaccaggcagcatgaaaacgaaaaggtggagagggaactaacttcttcccttttgaagagctttctaagaagccccacccaacactactgcttctctcccagtggtggtgatttagttgcttgagcacagatagctgccagggaggctggaaagtacagccttcagtcctagcaccaatgtgtctaggcaaatacaaaagctctttagccaaggaagaaatgacaacgaatatttgggacccactgggagtttgtgccaaaccaggtgtcattgccctccccaccctaccttgctcccctggagtgtatcctgattcttttgaggatcacttgatcctgattttttttttatgtgtatagatgggatttcattatattgcccagactggtcttaaactcctggcctcaagcaatccagccacctcggcctcccaaagtgctgggattataggcttgaaccaccatccctggccttgatactgatattttattgtcctaactgacagttttgtctgcccagcattttcccccatcacccttgtactatcccattttcctttgccatgcacctgtcttcctcttcaggattgatcacaaaatcaaaaccattcctaccagccagaggtgggcacatgacccaggtcagaccagtcacagttcctgattcccggccacagtgcatgatgggggaatgagcatatatcaaaccaggacagtccaagtccttccggggactttgctgccacagttgacagggggaggtatttgcataacttcaccacacacagctaagctggtgatcctgctgcttggcagcatcttcccagcgtacaacagaggaaaactgcctgttgtagttaaaaaaaaaaagagagagagagagagagagactgatacacaaagagaatcagaaaggagtagagatgaaacaaagatagagctagcatgattgcaagctgaggacatacgaggagtccctgggtcagctgggccatacatttgtaagctgtagacaaacaaaaatgatctttgggttccttctttagcaattggagttggaggaggatgaccttagtttgcgtctttgtcccactatcattatatccaacttgtgtaattagaaacactatttaagtctcagtttcgtctcctgtcaattgggaaaatatcgtgaggcggagatgtgagatgtgatcacgtttataaagtctgcggcaagaggatgataaagtcacttctcaactccttctcaactcctcctcctggcttattaatgcccatcctttaacctgtcctctgctttatctcttggaatccttagggcctttttaaccccatatacgaagcaaacctatgtgtatgtgtttgtgtgtgcatcaattcatatggtcctctgcagccttgcaaagtcgattcctgacatttccgtagactgttttttttgttttcagcaatactctccagcagcaaaacccaatccgctcatattcttgcatttgctgcagcaaaacctgacctctctttgtgttacctgagtcttgacgaagaagactgaggaaaggccccccccccccccccgccaaattgtcccgttgtctcttggctggtcttgccagctggcacacagcttcctctgaccaccctgctaggtacaaatcccacatgaaaagtctcaatcacctggctcaaactcatagttttcaggtggcataagccatggcattttcacctcctttcctggttgtttccagaaagggatgatagccccagtgcagtggctctgtatttctcagggcagcgtgggacctcagggtttgtcatggaccacacctttctcctttgtccctttttataactcataggctacctccaacttgacacttatttaagtttttatttattttatttagcattcagaaaactctatagcctcagtctctcgggatgtaaattaaagcaatttcattttcatagtttctctgtttcaaatccctcattgtttatttaaatagcagcctatgcatattgcaagtaaagaattataattaagagaaccagaagggcctgtctctcaggaaagcagtgatttcctttcacaataaccctatccttactgttgaagacttgtggaaaagggacatggcccagggaaccagagtggtttgggaaagcactttgtcaagaggcttggggaccccagggtggaagctgccatgcgcatgaggctgtgttagcagaggcagtggcagaagaagacattgcaaacctgcaaaagcaacctctgaggatgggtagacatatacttcattgcaggcagctgctgctgaaatagatttggagtcagatgtcatattcctgccagcaggtttagcagtcgtgggactagggaagtggcaatggcaggagcaactggaaatgtctttttttttttcctcctttttcctgaatatggaaccaaagcctgtgtttttcttgctcacatgtgagtcttctccttgcttcaaccctccccgctgacagccacaagactcctgcctccctgcagcctgtggaacgtaatattcgttgggatcatacattgaccaaagatccgccatgtctttgcaactaacatactcactcatgacttcacgtggctatgtacaagaccacatctctcaatggtgaggtcctcaatctctccctccccaccacagttagctatcagagatatacggtgtccttaagatagggcaggcagggccacctgccccccagctgaccagtgtggatgtcttgatgatgagccatactcagagtggccctaggatggctcctcagatagctgctggcagaaacctgcactcagtacatctatacatggtgtaatgattgactcaagataattagcatagccatcatctcaaacctttattatttgtgatgagaagattcaaaacccgctttttgaactgttctgaaatatgcaataccttgttgttaactgtattcacctttctgtgcaacagggcaccagaatttatttttgctatctaaaatatcaattaaaaatacaataaaactaaaaagaaacctgaactcaggagagtggaaaagaacttcaacattcaaaggggataagacatatactcagagtgggaaaaatactaaatggtaggaagatgagaagttttttactctttgttgtttctgctcattttttatattcaaaatttctaatcatgtgtgactatatatgtattatacatggtaggacttatttttttaatgtgaaagaatataaaacaaaatacgatattatcttttgagtgatatcaacaaaacaaaacatgatatccaaagtcaccctgtatggttggatactttgggtttgccatcttttcttttgttcatttgtttcatgcaatagaaacgttttgagatcctgtctggctgggttctgctaggcctgggtctacagcagtttgctgtcaaggtcttggcccttcaagagcatgtagtgtggtggggaaggtgtacatcagtgaagaggtaatccaggtcacggtgggatgacacaggctgctgtggcaacccacagcaggaatagccagtcctgccccagcagggcgtatcaggggtgctaaggtgacttccaagattgaggttggcgagatcgtgacaggtgtgcaagatggggtgttccaagactggggacaggacaggtgtgcaaggaccagccagctgaggtagaggaaacctagacctatggaacatgctgatttcaaggtccatttgtggggagaacacggactgtgtcattggaagccagcagggagaatcagttgagaggtaagccgggcctagtagaaagtaagcgaagccctttcattaagtgaacgaagggtgcatggtgagtacacagccatgaaaataaaatgatataaatcagcacggtttcagctgccctcatctttctactgtgatctcagcagtgatggggctggctttgagggttggagatcacacacacacaatcagccagctctccaaagcaagccccacactctcttgatgctatcctcaataaacatgcggtctaaacagtaaccatgttctagctatgcagatgcagtttaaagacaaatcctttgagcctccagcatgcgatcccctcccaatctcattgctgctcccctaccctcttctgcgtagaagcgctggagccaggtgcttacgacctgggtgctagtatctttgtgaaaactgctcctgacctattgctttgtttattttagccggtgcctttgtagagggaaaacagcttagcaagcatttagtaggtagatccaaagtccccaggagctgttgggaagtccataggtgctgtttccattgctttttcattccttcatatattaatcaaggagtcagtcaatcaattaaacggatactattagcacctactgtgtgccgggcactgtacttggggccatatgcactgctgattcattcatttggattctacggtggctctttacccattgccatcattttgtaggcagtgagtgcccgcatcagtgggcgttttatgttgcaccattttctgagcaatgtctttggtccaccattaagcatttgtggccgcccaccccacaatatgctttgctttctgctttcagaaacaatactggtgacctgttttaagaaaagctgaaaagccaggacttagatttttctggaaaccttcaaattaacctcattaagtttaaaattgtttttttctcgttcatctctcttgcttttatgctttccaaacccctaaattgtggtgcctcagtgatcttctataacataagttgatagtcaataattgcttaatgggaatcataaatatgagtttatttatatgtgtatatatatatatatatataaaatatatttccatgaatatactgaatgctaagccctccccactttttttttcttttttaaattcagaaatttctagttgtgtttattcccctcgtcagcatactttatcatatcagagccttttcagacactgtaaaactactgagttatgtttgggtcatgttttgcggtatgccctttaatagtgtagctttagaaatgcaattttcagcctctgcttattagaatatgataaagtattcctggtctatgtccagctccactaatctccagactgcgcttcatgaattaagcatgaagattttagtcaatgtgctttcaaagaccaatgtttagggaatcatggattttctacaagctgagggagaaatctataataggaggaactgattttcaaacatcatattctcaagaagaaatgaccacttctggcccagaaacagaaaatatttcactatcagaattttctagaaccagttaaaaccacattgtgctgttaggtttaataaacggattgtgttttaagatgtgtaagactgtctgtcacgtgggaggatttcaaatgactgcttattttggaaagctcatgtagactgggttaaaatcgagaggggaatgcaaattgaatttataaggtattattaacttcttcctctttccccccgccctggcccctgtgcattttggttcattttgctctgatacaattcagcaaatagccagatatttcttgccatggcgagagcttagttgggggagagattttgaccaggcaggctctcaggtcggtgccatcggtgacgccaacacacctcctggcttggtgtgttttgtggcatttggcaggcaaacgttttgaaaagaaatctcctttcaaaaatcacagcactggttgaagcaggagcatctctccccttaaatgcaaaaggagttaatatgccagtgactacagtgtgcctggaaaggtcactggaggcatttttgtctggggcagcccctggagtcttggcttttgtgcttggtgagaccttatctggcctcttcattgtccccttcatacaaatagatagcttttagtgagcagctactctgcctggcactgttctaaacacatgacaccaatagctcactcagattcccgcctctcaacagggaaactgaagcacaggaagtttcagtgatgcacttaggcaaccagtaagtggcagggtcggcattgaggtcaagactggttggacccctaagtttgaacaatcaaactggactttggggctcacagtttgtttcatgtcaggaaggtgtccgatcagaacctgaatgccagctcaagctgctctcagctaaactccaggggttgctgatggagacttcatcccctcctccagtcccgggatcaagacagaaatgtaaatcacctccaagaatgggtctgcgtcttgcacattttccttttgagaaagaggaaaattctcagctggtctagctttgtctgtgaacctccgggatctctcaggggctttaaattaattaatcaatccacagacattgaactgaatctccaccttgggcttgagactctgcaaagtgcattaaatgggaaggaaaccaaagggcctgctgccctgcccccgccatagcctaaggctgtggccatggctggggaattggcctgtcagttcaatcaggcagcccctctgactggtgtttttcactaagctggccccatggatggccctggtcatgtgtagacatggcctcaggagggccacattcctctcatttccaggcctccccacttaattgttcctgacacagtttggggagaaatgcagcaaaacccaggcctgccaatcaacatttgctcccgagtctcagagcggcccctgaagagacaggttggaccaagggacatccacagatgccttgtgtttaggaagtggggtgtgggcaacagagggagaattgttacccccgggagactgggggtgctgaagaagagtctcagtctctgcactctgggtcttgccaaaacctctgggattgggtgtggtgtccatgttgaggaagggacagtgagctctctaaatgacagtgggtcaaccaccgcatttctaggactcaaagatgccgtgggggtgtattagtctgtttccttgctgttgataaacacatacctgaggctgcataatttatgcaggaaagaggcttagtggactcacagctccacatggctggggaggcctcacaaccatggtggaaggcaaggaggagcaaagtcatatcttacatggttggcagcaggcaaagagtgagcttgtgcagggaaactcccccttataaaaccatcagatctcgtgagacttgttcactatcacgagtaaagcacaggaaagacttgccctcatgattcagttacgttccaccggggccctcccacaacacatgggaattgtgggagcgacagttcaagatgagatttggatagggacacagccaaaccatatcacagggtcacctgtaggttaccgtaaataagagaaacagaccaagtagagactcagcatagctggagggggggccccagatgacggaaacagccccccagctccagccatttgttactgggttgtttccaacagaatcaaggactcggatttttatgtgaagtcatctccattttaagtattcttttctttccccccaaccctccgtgggttaaagcatccatgtttacagaatgaaagatgagggcaggataccacttctcctagggatcatcatcattttgtggggctatagtccagagaggtgaaggacccatcttgtgactgcacagctaccctgtggcatgactgagactataatcttctggattcttcaggaaaccctggtagctgatgaaactgccctagaacgacagcaagacaatagggccatgaaagcataagccctgaagtctggacactgagagaattctaggcttgacttctctgtacagccatcttgggagtgctcaaccctttgaatcggatgtctagaatggactcagatgtcactgtgcaggtgactcacgcctagaatcctctgcctatcgtgacagggagaagcctgtgtgaccctgtggccatctcagtctctgcagggcatctgtagctttggaggtacctgggcaagagactgcctttcctactagagcttctgccatccctctgtcactatttaaagcattgcctgcaccctcaacctcgttcagtttccacataatacctggggcagggatgtaaataccctgattttatgtgtcaggccttcaggactcagggtgtataagtgacatggctcctcgcacagcagggatggagaggcaaacccaggttggcctctctgccactcatatagaactcctttatcaccaagattcctttcttcttcagtgccacctgccttattttactcacccagaaggaagccgggtccctctttgcccctttgggtgtttgtgaaaagcaagttgcaaactctgaattctataaactgttggagacagattctggagagacactcaggcttagctctagaaagaaacgggtaagacagaggaggttcagggcaactgtgttgccttccttgactggtgcatgggaattccccagcagagagaaaaaaaaaaaagaaaggaaaaaaaccagaaaggagaatagaatctattatctccaagccattattcacacacacataccccaccgccattttccaaattgtaaggtctttttatataagcactttccgttaaaggggaagaaatagctttacccgtggtgtaaaatatatactttctaatgtaaatcaagaagctatgaataccataataagaatgtggtagtatattaattgatggaaattgtagagtggaatattcataatcagcagaagtcttttctctggaaggaacaaaggattaagttagggagacagtaatggtattgttagcaggctatttcaatgattttctctgcggaagagtagggaaaggtgacattccaactgggaatattcgactctgcagatccctactcggagtttttcagccctgttttaagtgccgagctgggttttgcctcatgatccaattgttttattagcgaaatcatcatctgtttcattttgctttggtaatagtgcagtgtctgtctaacaataaattatagagtcaggcaaacaatggtttcgtattagggatataatgaaatatcttattaaaatgcagacttccttaggttcctgaaattagagtcttattttaaaatgattctgttgggcttattacacgcttttgaactaatcacactagtagaatctctctttagtcagagcatagaggactgtgagagttacctcttacttcagtattttcccattcgtattttattctcctgttctcttctggatagatctggatagattttttttagacagagtctcgatctgacagccagactggagtgcagtggtgtaatctcggcttactgcaaccttcacctcctaggttccagcgattctcctgcctcagcctcctgagtagctgggactaaaggcacgtgccaccactcctggctaattttttatatttttagtggagacggggtttcactatattggccaggctgatctcgaactcctgcccttgtgatccacccacctcggcctctcaaagtgctgggattacaggtgctagccaccacacccggcctcttctcgatagatcttatttggctgacaacgaaagctgttgtgctggtagcatcatccctttccatgcaaaagataaactgaaatctaaagtagccatatccttccggccaggtttttcaagtggttactctgttctgatcattgtcatgacaggaatagtgaaaataacaataaatcatttttctttaacgatccatttactgtatgctgggcactgcacaaaatggtttacatggtttatcttgtagcgttccatttaagtctgctaagagtagatgctatcattctctccattttacagataagaaaattgaggcttagagaaattgagtaatttttgccaatcctgagacttgaatctccgctctgtcttctgcatacactttttacttgtcattgctgattagctttctctttccatctccctgatcagaaccattctgcgttcttagattcaacaaaatgtaatactccaccttgccagtatctagcgtgttttcagaaattgtgaacggggtggaggtggagtactaactgcaatcagatgttttatttgtttatttatttttccttcttgcgttgctcttaagcccccactcttgggcaaggctctgtgctatgctgttttatgcacatcatcttctaacagcttctctgccacacctggagaagtgccaatatcattttcatggcacagataaggcattggatgctcatagtttaagtcatcaggtggtgactggaggagccagaaggtccctttgggcctgtcctctcaccagcatcaactgcaccaaaaagatctcattctgagtatcagggatgaacgcccccactgggtgatcaggcaaactacatgcattttaaaaaactatatcctgctgggtgcagtgcctcatgcctgcaatcccagcattttgggaggttgaggaggacggattacttgaggccaggagttcgagaccagcctggccaacatggtgaaaccccatctcacctaaaaataaaaaattagctgggcgtggtggcagccacctgtagtcccagctactcaggagactgaggcaggagaatcgcttgaacccaggaggaggaggttgcagtgaactaagattgtgccactgcactccaacctgggcaacagagtgagacactctcaaaataagtaaataaatataaaataaaataaaaaatatgtcctgtaatgaaattgaaagagaacactttgtttcttatctagttggaacaagtggggtggggacagacaagtgactgaccactctccatctgactcagtgtcagtagactctctcaaaaattagaagctggctgacatagtggctcacacctgtaatcccagcacttcaggaggctgacgtgggaggattgcttgagcctaggagttcaagatcagcctgggtaacatagggaaacccttctactacaagacatagaagaaaattagttggccatggtggcacacacctatagtcccagctactaaggaggctgaggcggtaggatcgcttgagcccgggaggtggaggctgcagtgagctgtgatcacgccactgaattctagcctgggtgaccgagaccttgtctaaaaaataaataaataaataaaattagaatctgaattttgaagacacaaattcagatgcatgtggatgggcccaaaatactttgtttacatgtactccaaatgtaactcctggggcacccttccttattttctctaccacaccaatgccttcatggtcttacatcttgtcctcttaaccctgacttctctagccctcatgaatgctttagtgtggcagatgttactgtacatgggccctcgtttattcagcaaatattcatggagcccttgtaccaagcacggtgctgagtgatgctgtgagggtgagcaaaagagaattgtcatctgttaaatcccagaggtccgtctgtgacaaaactttcaccattcttttgtaaaaattagaaaaatacaaaatagtgagtttttcatgagctacgttgtatcaattttaaagtatttcttttaggattctattatttaccctttttcttcaatgttaaataccatttcctttaataaagatttaaaaaagattccttccttccttcccccctccctccttcccccctccctccttcccccctccctccttcccccctccctccttcccccctccctccttcccccctccctccttcccccctccctccttcccccctccctccttcccccctccctccttcctccctccctccttcccttcctccctccctccttcccccctccctccctccttcccttcctccctccctccttcccttcctccctccctccttcccttcctccctccctccctccctgtcttcttccctccctccctcccttctttccttcctttctttccttcctttctttccttcctccctccctcactccctccttccctttttccctccctctctcccttcctcccttcttttctttcctttttaaatgctgattttgttttctttttaaagccctcagttggcaaacttaaaagttgttaagtctgtgttagcctggctagctttttttttctctactagaccttcaaagtctaggaatgcctgatgtatctgtatcctgtgagtttgccacttcatgatatttgatatgtcattgtttccccataattttttcattgttagcgttgtctctccagcctcctgcttcctcttcctctgtctccctcatggtgtgtcttgctcaggcatgtcttatataatcaatatttagtgatttgacttcttaagtccttaaaaaaaaaaaaatccaggtgcaaaacacaaagacagggctcatgtcaagggagggaacctcgctcttctactctcagtgaaagaaaggcaagaccactccagcctattttttttttctttcccttggcccttgtcaaaagggtagccagttttctgttaccattgtgctaactgaagaatggaaaatatgcccagagtttaaaaaaaatcaaccaatgcctgccctttctagagcaacctaattaacaacccaaatgttaaaatttctttatttagaaactcagctatccagaattacaactccgcctctcgtgcttggaggcatagttctttgtcatattcctgagtgtctacagatgatgaaaatagccagttatctttgcccttcatggaaaggataggaagaagctctgatgaagcaatgttggggcactcatggttaaattgaacctttcccctggttaagtggagtgtgtgtgtgtgttgttctttttttccagcaccatatttggccctataattaatatgcaagttcaaatacctcttgcatggagcaagaagctgaaacatgcgcatttgtaatagactcagcatctgaattgaatgggcagctttggctggagtagtactgcagcttctcgaatgcctattgtcaaaatatatactagttaggagacacattctgctacgagggatgccctcccaaattaaagacactgttcagtttacgcttaacatttatggctatcaaactactagtccacaaccaatcatcatggtttcgttaacacagtcaaaatttaccactgggctattattaaaacttaatataattaatgtaaaaacacatacttcttttcaacaaaaactggctctctttgtagtctcttttttaatttggtgcaatcacttaaaaagtttagcacatttaaaattttacatcattttaaaattgtttctcttttataagaaggatgctatttactattaatgtagaagtacaaaggaaacggttactttggatttattcttttggaaaattagaatgtgggctacatgcttttcagaagttgatgaccaagagaagaaagaaagaaaaaaaaaagggtgcttgatgccctgctcctgctatgtccgggaatttcttgtacccttcatatgagcccctctgaacaaaagcaaatcctgttgacctgtcagcttaaaaagacaagaaatatgccacattccgcaggaataaggagaaaagaatggtgcgaaaatcagtgacacgaagttgaatatgtgaacacatccagacaaatgtgaagccagcccgattaggacgactgaaagggcatttccccagaattgcagttttttttttttttttttttttttaaataggggacgctattgtcattcagaaagccacaggctgttctgaaaacaggcaaaaatcaatagcccacttgttgaggataagtgaattagcctgtgttgaatgtaactgagtacctgaacacttgagtgggcagggattgttggggagaaaagacaattgtcttttatgtccacagcggttcacatcgctgattaattatgtccaatgatcatttttgtgcaggactaatgggcagactctgtttttgtttttgtctgtctgcccacaacctggtgaactgaatagagttccccacttctcagaacaatgcaaatggtggccaaggggctgtggaagagttgccagaaatggaatgattcagattggatgaaaagttgattttattaattagttaaaatacaaaatgagaaaacagaaaacacaataaatacacagttaataaaatacttcatattttattataaaaacattaattactttaataaagcggtttatattttcaaatacaatatttaataaactatattaaaaatatatacaaaatagttgtaagaatcggggctcctgtgagtacgtaaatgaaatacgcttacatcatttacttctcttcccttttgtttgtgagtccagagacgatggaagagtttggaaagttgtcagcttatctttgcatatatttgtccaatgataattaagcacaaattgtttcaaaaatctttcaaaaattgttataaagatttttattggtgctaagggctgtaatttagcaaagtcttacacctgaaaccaaccaaagggtcttagagtgtgaactgttgtcttagacccggagaagtctccaaagaatgaccatccgaggcattcagctggcgtaagaggagtgactcatttgttcttcttttttttttttttggctgtctacagagaaggaggatataggggcccttaagagaaaaactggagtagggtgtgtgtgtgtttgttttggtcaagggcagagtgtgctgtgtcagggtgtttcattgcattttcatatttgtcatttctctttggagcgtgtcttttggtgccacggaaaagggctggattttctatcgggtacaataggtacctgcagggcttagggtacaagagcttgtcggggacctgcacacatgtttgagacctgtaaaaatattgctggctctgaattatggaaagaaaatcgcaaagttaaaatctatcaaagtataattaaatacctacaaaacataatattatgtcactagtcaaccgcaacacaaatcttatatcattagatttcagtgatattgaatgtgggagatggaaccattttagtgcatttgatatgatgtgatgtggctttctccaagcctgagagtgcctgaaacccagagaggtcgtacgttgaccatgccacggggcccttcctggtaaatctaagcagaaatacaccatgcatgagacagaacaaagaaaagaactgtgaaaatacactcaggaccaggatgctgatacagtcatgaggttcagcttaaaaggccagtttctctactgcagaataatgaggtctatcctgttttgctttctttcaaagcccttaccatttatgaaaccagattgcaagtctgtttgaatcccccaaatgcctgtgctacataactgtctccttactctgtgctcttgccccaggcagagtggaagttgccttataaagctgcgacttggccacagtgttttccctttcagcagggaaaccggagttctccctgctgttgggaggttcaagagccactctgtgcagaaatgcccagaaagagttaagtgaggtaagttcgtcagacttctgcagacccatactgtggaagggtcaagtgcagggtcaccaacccgttccatcttcctgtcagttggcgtccacccttggtttcaaagggaacaggcattactgacatgacgggacctttacagttcccagctgctcatttggagtactgcggacccaggacaactaaagccggggtcgcctgccctccaggggttcctgggttgaagtatctgttccctccctttattttttctagcctttatagaaatgacaaagggtcaggtggtcttaaattccaaatctgggcacatgaatggtctgacctcggaaacttcctatatgctcgaaacgatttaactagcagcaataaaatctctactctttttatgacaaataatctagcatgtctggggagcatatttgattcttcatatttgggacccttttttaaaggctgagttttattaaaatgatagaaaaattagttattaaacagtatgtcaaatacctttctgtcccaccagatttatttttaaagacaaacattacagaggggcaggggaaggttatatttgaaatctttctatcctttctctaaaatatatttggtgaaaactaggaagtgttgatagatatcattgtttcctgacaggtttttggtgtttgcatcttgaaagtaaaactgccaagttatttttttgttctggtttttgttttttaagcttttctttgataacctcattttcaaggggaggcttagcactgatgtattttattttcttgctcagagaggaaacactgaaatagctatatgcttccccaccaggagagtggaagaatcttgcttttaaagcgatagtcctattttctaagtaaaagtccaggcatgtgacttaaaaaagaaaaaaaaaaatgttttctggtcaagtcacatgcctctgaggtttttttttttctttctttcttttctttttttttctttttcccagactcctcatacccctcctaggagacagtgattccctggcttcaccaggcaggctcttgggggcttcctggtccctgtcactcttaaaatgcagcctgtctttggacatctactccaagtttgcattctgccttgccttgtcagtctgggctatcaaaaatatagtttcgtttggaaaacaaaggggtgaggtgggtccaaagtacaggaagctataccatgcaaatgaaaatattttttccaaagctatctgctaatccctgtgatttaaaaatgtgcgtgtttttagtttctgtctaatttcaaccttttcttgctttagtgattaattaccaggtttctctattaagagcttgtgcgtgtgtagggggtagcatagaataaacaggctcagagcccccacccccacccccctttaagtaacagtgacgcaaacgacctttatttagcagaaggtagctctgcgaatccgctgaatgtccgattgcgatctcgctggaaagactgctgcttcagcaaggtttctttgctggtctgtggcaaggtccctgcttcattttcaaggtgtcctcacttggtgcctttgaagggtttttaatggattcgcttgatataccttccaaatggagtactttgtgcgttaattcagtttgtgataaagatcccttttaccctccttttcataattcttcccagagatatgaagtacactagaaggttagatgtggcatttaatttttccacaaaacctatccatagagggggaaaaaaagattcaatttcattactattcatgtgtaagaatattgaaggtggtatactaaaggagataactatttcttcttctatcaaaggaagaacaaatctgtctttgaacgaggagctcaattcttatttaaaagataaaaggtcacctacaatactcattcctttaaagctatagtgttggggtgggaaggaagctgtcttacctggacatattaattttaaattttgcttgaaaaaattgctcagtgcatttattgactagtctctctgtgtgagttctgaaagtctgtttatatctgttgccccttctcctaaagtgaacccagatatgtgggtatggggtgctagtttttatattaggtctgagatgtggaaaacagaaatctaacttagggatgtatcataatcaaaccgtcggggctaatggcatggctctgatattataaaatctggaggtttggaatgcagcaaactctgggggcattatcattattattattaatagtttgtatttacaaatgtggcattaagtagaacaacgtattcttgcaattaatgacaggaagcctacaatttctcattaagcacaggacagtgagaacgaacggaatttcagagacatgtttcttaacattaaaaacaacaaaaacaacaacaacaacaaaaaaccaagtaggaagcaggcagagttgcaatatgaagaacaatttcaatcatatgttgtttaattgagtttaacaagtaaatgtatatcccagtgtgtgtggtcaccaaagcataatgacaagttgttcatcatttaattagagatttgcttattgaaacgactgaaataggtagttgaaattttgcccttggacaagggagtaatttgtgatttgctacgttcatttcgtgagacttttggtgaaagacatctccttctcatatgtttaggcaagcgttgatgacatcaacctagccttttattttaaatcccctgtcaacgcaattagataatacaaaaataacaaaactacaggaggttgaggatggggctgggggccaaggagattacttggtttgaaatgaataaattgtctatcctaagggaattctttggtgcattttattgtgtgaaatgagcctggtcatatgactgccctgcctccctggaggcctccctgccctcctccttcccacagacacttatgggaggtactggccagctctgtatggccagtactgccctaagcaagaccaagaagcttagtctcaatttcagagagttattttggcaacatatttgggaaaatgatagttagatgctgcgttagccagcctctgcatgattttttacgcagaacaaacagttccaaatatcagtgctttcagcaactcatatatttctcacttatggtgcatgtcgctgatggttggctgctgctctgatctcactccagtatcagcttcagtcaaggaacgtattgttgtcaaggaaaggaaaaagaacagtggtgagaccaaaggatcttaaagtttctactttggaaggggcgtggcattgcttctctcattccattggctgaagcaaatcatgtatacaagccagaagccaatgagctataggaagggtagcaaagaacagaacagccatacagcctagcccacagatggggtcaagaagattcaataggcattggctgaagacttaagacttctcaagcaagttggatcctggtgtgcacctggcatatcctttaggattctttagtgttggtagattgagatggaaatgaggaaacttgtattacctactcctttgggccagaatttgcttacagcacagtgaggaggtattctttggagagcactgtttcccaagagtgattctaacaaagaggtgtaaatggacaagaatgaaaagcaattgcaagggcccttgaaggtttgtgaaggatggcaaagtgacttggatgttgatttctaaaggaggtaaaacttgaaggtagacaagctctttgtgtccatacatttgatgggtcatcctatgaaggagggcccatctcttacggcaggcagcgtggcgtaggcctcagagtcaggcatctggggcccagccttttctctgcaggtgcgggtggctcttggcacatgatgtaggtttttgtttttgttttgttttgtagacagagctcaatcttttgcctaggccatagtgcagtgtacaatcagatttcattgcagcctggaactcatgggctcaagcattcctcccacatcagcctgccaagtaggactacagttgtgcactaccacacctggctatttttaattttagtttctgtagagacagagacttgctgtgttgcccaggctggtctcaaactcctggcctctcaagccatcctccagcctcagcctcccaaagtgctgggattacaggcatgagccaccccacccagcccatgttaattttttcacctacaaaatgaaggctacaatatttactttgcaggattgctgtaaggattagaaccaccgtctctaaggcattcagcatagtcccttagggtaacatgagtgctcaagaaatagtaaattttagtatgtgtctcatttttttccagatgctctggggtcactaccaaccttgcctttcaccctacctgtggatctatgaccctgtccttctcagaacaccactcagtacttctgggttccccaagaggtgcctcttgagagtttgtaggaaactgtgctttagtaactcatggtttctgccctcagcttctcttgcatggggccttcctgcttgctcctctgctcacaatgacaagtgaggactcccctccatgccttttgatgctggtgcccatcaccccgatcacatgaacgtctatgcccaggtcccatttcctgacattcccaacatctctaccttctccgggcctagggcagggatcactctttcagaaacatgagcgtatggaagccccagtgtgttccttgaagtcccgatgcgtgatttgtccccatgctgtgtcgcacttggtcatctggaccctggggttgcctgagtgtccctgttacaaggcccctcctgaaaccagattggtgtctatgagggtcatctgggaaacctacctctggcagaatcgctgtcctgccagtttcctctcccccttacaagggacatttatgctttctccctctacaaaacctgcatgcaaattatctgatggaattgacccatagtgggtgttctccactggttcaacacacctgaattccggattcaagatgcaatcaccactactgttgttgtgtaagtattgctagagatggctgcagaatacctgggaaagctagctaagcagtgactggaggaaggccccagctctttggaacgaactttccagccgagaatgctttccaaaatgggaacaagatcccaaccccttatcagaaactttgggggccggatgtgtttcagaattcagaagttttcaaattttaagaagagaatacactgcgtattctgtgtattacaggggtcagcaaattcacagcccataggccaaatctggcctgtttttgtaaataaagttttattgctatacagctgtacctgttggtttacgtactgcgatggctgctttcagctacgttggcagagctcagtagtcatgacagtaaccatatgcccacaaagcctaaaatatttactatctggctctttgcagaaaatgcgctgaaccttgcatgttgtgtcacccctggaggtagcaccttgtaattaagcacatgaatatctcacatcagaatgaatgaatattcacactcagtgggacaaacaacttctgtcagctgtagactgcttttgccatcaaatggttattgaaagaactatctgtgttgacagccttttgggtttcatacagtcctttccagcttgggcagtatagataaatagatgcacaaagcagagggaatcaagtagaataacatggtttatttgtgtgtgtattgttctgtttttggtaaaatcatgcttatcatatcttcaatgcatcatttattctgagtccacattgctgcctttgagccggggccctgaggtatctcctatactctggctggggtgagggcggcaggtcctctgggccagcccagatccaccctgttcacggtgtgtgtcctgctgggctcacttctgaagctgaccttggggagcagattgaacacctgttgatgccattctcttaatttcaggggaatgtgtgggtctttgagctagagagacataggtgtatggcagatgagggaccaccccctccaccttagtccagttacagggcctcgcctttttgatactaacgctacatgaagagggacggggccaacagcaggctcttccttgacgtgttttatgtacactccagaaatattgacagagttgtctttttgttttggtttttaaatgtttttttaagttaacttctggaatgcatgtgcagaacgtgcaggcttgttacataggtatacatgtgccatggtggtttgctgcagccatcaagccatcttttaaatccattcttagattttccttttccatagctctttgtgatgcttgctttaatcagttgatacatgtttaatcacgttttgctctgggctgtgttatatacagctccctccctaatcttgctagaaggtagggctaatgcattgtcaattcagaaatagggggtgttcctgagtctggggacactctagtgaaattctatgtgtaaaataatttgtacaagtttatatttttagctaaattaaaatactcacattcccattattttttagaggttgtaagctaagtaataacattctagaaactctctgttttttgaaagggcatcaccactgttgaaggcgctaatgggagatcctaagtttcaggctctgctacagacgtcaggtcccctaggagttgggctgcctttgctctcctctccgcgactcggtacctggtgtatagttggctaaaaagaagttgttggggctgggtgcagcacctcacacctgtaatttcaacacgtagggaggctgaggcaggaggatctcctgaagcccagaattcaagaccaggctgggcagcatagcacgacccatctctactataaatttaaaaattaactgggtgtggtggtgcacatctctagtctcagctgcttgggactactagaaaggtaaggcaagagaatcccctgagcccaggagttggaggttgctgcagctatgttcgcaccactgtattccagtctgggcaacagagcaagaccccatttccaaaaaataaatgaaataaataaatacataataaataaacagtagtggttgaaagaaagggaaggaagaaatgctgttttaggaaatcaataggataatttttttttttttttgaggcggagtctcactctgttgcccaggctggagtgcagtggcacagtctccgctcactgtaagctccgcctcccgagttcacgccattctcctgcctcagcctcccgagtagttgggactacaggcgcccgccaccacactcagctaattttttgtatttttagtagagacagggtttcactgtgttagccaggatggtctcgatctcctgacctcgtgatctgcctgccttggcctcccaaagtgctgggattacaggcgtgaactactgtgcctggccaggataatctttaagaagaagataacattagctattcttctcacttcctacgtagaattccctaccctgtgtctttggcctggaaagggtattggtagcaattgtcttcggctttccctgccatgtgtatgcattcccacggccacacaagcacacacacacttttgtggttttttttttaattatataagcaagtaggatgtttgtcttagtttttttgggctgctataacaaaatgccatggactgaataatatataaacaacggaaatgtatttctcacaattccggaggctgagaagtccaagaggaaggcactggcagattcagtgtccggtgaggatttgtttttgatctcataggtgtccatcttgctattttctcaactagcagaggcaactctctggggtatcttttaaaagggcactaatggccaggagtggtggctcacacctgtaatcccagcactttgggaggccgaggcaggtgtctcggtggatcacttgaggtcaggaggtcgagaccagcctggctgacatggtgaaaccctgtctctactaaaactaaaaacttagccaggctcggtggcttgtgcttgtaatcccagccacttggaagggtgaggcagaattgcttgaacctgggaggcagtggttgcagtgagctgagatggtgccactgcactcctgtctgggagacagagggaggagactccatcaacactaataataataaagtaaataaaagggcactaaccctactcaggaagccttcactctaatgacataattacctcccaaagtccgcacttcctaatgttaccactctggaggttagaatttcaacatataaattttggggggacacattcagaccacaataatgttttataatgttccttttgctttaacaagagacacatgtcagatagtagacatgatctgagaagacacaaaacccagcgtggtgattttggcagccttgccatgcatctctaacatgcacatggccagaaaaatagcttggacattctgttcaaccctccacatcaactggtcagtttagtctttaaaaggtgataggcctgttgtggtggctcacgcctgtaatcccagcactttgggaggctgaggcaggtggatcacttgagccccggagttgaagaccagcctgggcaacacggtgaaactaagaatagaaaatattaggtgggcgtggtggcgtgcacctgtggcctcagctacttaggaggctgaggtggaaggatcacttgagcccaggaggcagaggttgcagtgagccgacattgcaccactgcaccccagcctgggccacacagagaaaccttgtatccaaaaaaaaaaaaaaaaaagtgaccacactgtggctttgctgctttgcctaagtatttcgtgaaattgatcgttcattcacaatgctcagtgcagtgactttgccgagcacaagtggtggacttaagaagccacataaagaagcacccacgtctttctctgaggacgtgcttgtgtgtgttctgaggaaagcaggtgatgatccctgaggtgtatcccccaatcccaaactagaagtgagtccccctgctcctcaagcttgcatggcgctcaggtattccagtgggccccgctgcattcttcccagtcccaggaaatctttgtgcatggctgtcttttctgtgccatcttgggcatctcacgcattggccctatccacatgttgcctccagcatcccaggaactccgttaatgtttatttgaatgatggaatgaaggtgtcttgctatattttgacatttctgtcaaaatatgaatctatctttgcctagcatcttttcatgtgcacattgcccatctttataacaaagtgtgagtgggaaaggacttttaatcttcattatattatcattcatatgaataatgttaacaattagtgtttattgagcacctgctatgagccagatgtagtgttcagtgctattcatgtgttcttgaattaaattttcatggcaagcctaagaggccatgactgtccacattttgcctctgagagacgcaaggcttggaggcaggaaatcactcactgaaggccacagcacaaagtggggacttgagtcccgatctcactgattctaaagtccttgctctccaacctctgtccatctgaaatggaaaagcactgacgcagttctcactctggagcttgttttattttgcttgggctgctgtagaaataccacaggtcaggtggcttaaacaacaggaatgtagttcctcacagttctggaggttgggagtcctagatcaaggtgtcagcagggttggtttctctctgtaccattgtccctggcttggagatgaccatcttctctgtcttcacatggtcttccctctgtgtgcgtttgcatccttatggcctcttcttgtgagggcactggtcatattggattagggtccaccatataatgactttattttacctgaactgtctcttaaaaggctctgtctccaaacacagtcacattgtgaggtactgggggtttgggcttccacatacaaagtctgggacacagtacgctctcataagagacctcttctcaacaggatccatgtttgatccgggggaataaagctagagttgctttcttccttgtaatatgtataatgactcatgagagaattccccactgtcttccccacctgagacctgagaggaggagaaggaagcttggagtcgctgccctgtggcctgaattggtcagtgaccaatcactcagacccagctgacaggctatacgcggacaccttggatgtgcccagcatggatcttctccaagtaggaggccttggagtcagagaaaggtgcaactcccactgctgctgcaagaacaaagactttaagatactgaaatttctgggcaaagtttcctcaactcttcatttaagtgttaggccaggtggggtggctcatgtctgtaattccagcactttgggaggctgaggtgggaggatcactggaggtcgggaatttgaaaccagcctggccaacgtggcaaaaccccatttctactaaaaaaaaaatatatatatatatatatatatatatatatatatatatatatatatatatatatatatatatatatatatatgtagccatgcatgggggcctgcccttgtagtcccagctacttgggaggctgagacatgagaatcgcttgaacctgggagtcggaggttgcagtaagctgagatcgccactgcactccagcctgggcaacagagcaagacgccatctcaaaaaaaaaaaaaaaaagtgtaatgcaagtagaaaagggcacacactccaggtgtatatctcaacaaatttgtacacactgcatgcacatgggtgacccgcacccacatgttatacacagaataattacaggaccctgccaacctcctcctatcccctttcagctcctgctgtgatgccacttctaatctcaattttattatacaatttgttaaatacagaagtaaatggaggcaatagtgatagtaaaaagaaccatgtgaattgggcgtggtggctcatgtctgtaaagccagcacttcgggagtccaaggtaggagggtcacttgagcccagcaattggagaccagcctgggcaacatcatgagaccccatctgtatccaaataaaagcaacaaaaaaatgagacatgggggtgcatgtctgtggtcccagctactcaggaggctgaggcaggagaatcacttgagcaaaggaggttgaaccatgattgcaccgttgtactccatctagcctgggcgacagagtgagaacctgtctccaaaataaataaataaataaataaaaataaaagtaacagaaccataggccttatctttatctgagttcctgtagcatgtgcactactcctgattaaccaagtgaaagagaaaatgagactaatctctaacgtcagcttccttttctgccaaatggaagatcatctctaattaataatgagttagaatacctaggacagtatttggcacacagttgatgaggatggtgtacctagtagctaatggtgagtaggatgaataataatactataccttttggtttctgaaatgagaaatctaaggaactggcttaaccaagaagcagcaagctgttttaattgtgctgttaggagggctgtttgttaaggtacagaagaggattggcccatggctttctgctaagaacctgctgaatgtctgtatagaatccctgcattgtgcctcctatcaatcaggtgcttaggtttgacaagtttcctccaacagactcgtgtagaagtttctgtatcaactggaaaaaaccatggtgcttgggacattcaaggccgaaacttggtccctggatgggagaagatagctgtatcattggcagagctgccttggtcatgtaccctctccagactagacactagatagtgggtagggtgggacagttttatgtcctctgccaccttatctgggactcttgtcccctgagaagtttgaaaatttggcacattttagtatttgtcagtgtacttcctgcttcttgatgcacttgtactgcacaagaattgattttcaggaaatatggtttttttttcctttttgcacagcgatgggttagcaaaatgcatatttgcatagaaataatctttagtgagctctgctggcaagtgtgtcaaatttataaatatcactactataaagacatacttttggatatggatttcttcctcagtttatttcttctttcattttttcatgtccaggtcactacgtattgcgtatatttggttggaattttatttttgagcaattcacttacccagattgtgtttctggagattaaagcatctcactgtatttttagttttttctacattgcaatttcaaaataatccaactcaaaggctgttgaaaggctccttctgtttaaggtaaagcctgtggcagcctttaacttcctttctcttctcctgctgccaccttggtccacagtttatctttgaaaatgctgggttttaatgggcagggtatagtgcagaaaccagatggttttaactcacacctgtgaaaatgctggggatctgcgaaacattaaagttaatggccagaataaggctgccaagctcggtggaattgtacttaactggcatatcattctggttaactgaactttccattaactcacagatctatcttttcatgcccccttctaaccccctactcaccacccacccagttcctcctagtgggcagtttgctgctgctgtcttacctcctcatcctcacccctttcacctctcccctggtaactgatttatttttccctcttggagttgcttattcttttcttcttccagttgcatctctccctctacttagatacacatttccattttacttctatttggtagtctcagaacttggcttttattggccagtatattcaatgattcacttgcacctttaaccttgtgttgttctaatcttttttttttttttttttttttttttttttgagacagagtcttgctctgttgtctaggctggagtgcagtggcaccatctcggctcaccacgagctctgcgtcgtgggttcatgccattctcctgcctcagcctgcggagtagctgggactacaggcactcaccaccatgcctggctaattttttgtattttttagtaaagatggggtttcaccatgttagccaggatggtctcgatctcctgacctcatgatctgcctaccttagcctcccaaagtgctgggattacaggcgtgagccaccgtgcccagccttcttgttttaatcttttagacaactggacacaggtttgtctttgaaattgtactggtttttcttgatgttttagtgctcctggatgtccaatgtcattcttgggctagttgaaggaaagttttggctacccagttgttagctgctgaagtttaactgtgcattctaagcacaccagtattttattacatcatacctgggcagcagataattttagtaaaaccttgaaaagatatgactattgggaagaaatttgggattctatcctttttctctccattcttctctcctgcaccaagtttctaagctcgtgattaaataaattctgaccctactctgataaaagtgaacccttgtggctggtcgcagtggctcatgcttgtaatcccagcactttgggacgccgaggcaggcagatcacctgaggtcaggagtttgagaccagcctggccaacatggtaaaaccccacctctactaaaaatacaaaattagtcaggcgtggtagtgtacacccataatcccaggtacacaggaggctgagacttaagaatcgcttgaacccaggagacgggggttgcagggagctgagatcgtgccactgtactccagcctgggtgacaagagtgaaactccatcttaaaaaaaaaaaaaagtgaacccttgtagtttcttcctctgtttgacagatggaccctaagacggccccagtgataccccacctcctggtgtccaaggcctgatgtgatcacccttcccccaccttgaatgtaggtgggatatgggagacttacttctgaccaatagaatatgaaaaagataataggatgtaactgtttagattcggttacactatatggcaaagcaaagggattttggaaataccattaaggtcttacatgagacagattttgagttaatgagcagggggatcctcctgggtgggcctgacttagtaaggggaaaatcccttaaagaggagctaaaataagagagtctctctctccattgctggctttgaaaaagtaagctgccttgcagtaaggaactgcatttggcttctaggagctgagagtgccctaaggaagccagcaagaaaatgaggacattagtcctataaccacaaggaaatgagttctgctagcaacctaagggagcttgaaggtgattgaccatccccagtcaagcctctgatgagaccgcagccccactaggcaactagatttcagcatggtaagaccctggatggagaacccagctcagccatgcccagactcctatcctatggaagctttaagataataaatgtatgtggctttaagctgttaagcttttggtaatttgttagatggcaacagaaaatgtgtacaccctggatagtagacagagactgcatctttctttggcatttggctgcacagcaagttctaagttactcaccaggtttcagaggagagatgggaatttgatgatcttataagaaacctgtactctttggccagacacggtggctcatgcctgtcattccagcactttgggagaccaaggcgggcagatcacctgaggtcatgagttcgagaccagcctgggcaacatgctgaaaccccatctctactaaaaatacaaaaatcagccaggcatggtggcgcatgcttgtagtcccagcgacttgagaggctgagggatgagaatcacttgaacccgagaggcaggggttgcagtgagtgcggtggcagctgggacattaaccaagttgtgaaaggagccatgatgttattagctgagtcatgtcactgcacctccagcctgggcaacagagtcagactctgtctcaaaaaaaaaaaaaaaaagtgtactttttgaggaaagttctatttttcattattttccactatgaatgaagaagaaaataatatacatacattactgggattcatacggacattatttagacacacttccacctacagagtcacatattgtatagaataaaatatcatcaggagcagctcatgtgaccagaatgtggcaaagtctttgctctacaggtcaagttgggacttactgaggagaaatgaggggacttcaaagtccaggttgcaccatccactttatagatgaggaaagtaagaacccacagcatcttgcacgtagaattcaatatatgtcctgcttcttgaatcacattgacctaacaggtcatatgatttccatttgtttgcacaacaactcaagggcaaaagtgaaattggaatttttgcttttgaatttctgaaaccttgttttatttatttattttctaatcttttttttttttttttcgtggaatcatgttcccttcggaaaactccctgggtgccccagcattatgtggtaaaggacatgtatttccaactggcaggggctctgcaaagtttctctgcctcctttgctaaccaaaccctaaataattgtctggatgttccttttattgtcacctctgaaacaagacgaagatttggacggtttgctttagagtgcattaacttctttatcacattaatactgactcatatcttatttcccacttgcaataagaaaaccattcaaatctttccctcacaggacaatatctttaatagcttctgtgtgtttcctatttttggctgtttctgtataaacagactaatctaatagcatactgaacccatctaacttggcagaaattcagaaaatcactcatttctatggcaagctgagatgctgagaagggggaaaaaaccctcacttttattgcagcaagatttttctcaaagttgcctttcatgaacataatatgtctatcatttggaattctccagcaccctggctggaaattatttattgcagaacgacacaatggtgaacgagaaggtattattccctgtacgatttctggcttgaatttgtttgcctaaaggagcagatatcgtatgaacatgattttgaatgctggcatggtgatgaaaggtgatgttcacctggagtctgtacacacaaaaccctgttcattttacctaaagggtaagaacatcatggcccccttcatatcctggttaatgtccccgctgaccctgagttctgcctccatcactggaacaagagcctgtctttgggaagaggtgtcttccctggcactcgtttgatttgtagccgccacacatggcaggtcccaagctgtctgaagtcttggctgccattcctaagctactaaaactttgctggagaacatcaccaatcacgctgagggatcctttgacaactcagcttcatgaggacagctgcagttctgcgtttaggctggggtcaccggggtcgctgccccagccccactctttagcctcagtccctctgtggttcccctgactgagctcctcactaaaggggaggaatccctggagcctccccatccaaggccagcgtgttccatttgagggtaactggatccctgaaattcacccccacacaatccacaacctactactagaatgccatatgcttttctatatgctgttgtttaatttcagttggtacatattttattttttgaaacagacttcgttagaacatctttagatttaaagaaaaatcaagactgtagtaccaagttcccatgtgtgtaacagccagtttatcctattattttaacgtcttatgttatttggtacatttattaagattaaattattgatactgaaatattaggttgtgcaaaagcaattgtggtttttgccattaaaagtaatagtaataataatactcggttggtgcaaaagtaaatgtgttttttgctattaaaagtaatgcggttttacttctgcagtttttttgccatttgccaattacttttgcagtttttgccagtacttaaaagtaatggcaaaaactgcaaaagtaattggcaaatggcaattgcggtttttgccgttacttaaaattgcattacttaaaagtttttaagtaatgcaattacttaaaacttaagtttttaagtaagtttaagtaaaatttgcattacttaaaagtaatcgcagtttttgccattacttaaaagtaatggcaccaacctaatattgttattactttttaccaacctaatattgttattaactaaagtccatcgtttatcatattgccttaggtttttaaaaaattttttacctaatgacttttttgtgttccaggagcccatccaggataccacttttatttattttttttttctttttgagatggagtctggctcttttgcccaggatggagtgcagtggcgcgatcttggctcactgcaacctccgcctcgcaggtttaagtgattctcctgcctcagcctcctgagcaggtgggaccacaggcatgcgccaccacgctcagctaatttttgcaggataccacattttatttaattgtcaggtctccttagcatcttcttggctgtgacagtttctcagaattgtctttgtgatgaccttgacagctttgaggagtgctggttgggtattctgtaggatgctcctgtgttgggatttttatgatgtttttctcatgagtttactggagttaatgaatttcagggaggaagaccccagaggtctgttttcatcacatcgtatcaagcattccaccttcatcatgactcttcactgttgatggtgactctgattcacctggtcaaggtagtgttcattaggtttctccactgcacacttagtctttccctctactttccacactgctgcctttggaggagtgttgctgtgcccagctcatgcttgtggagtggggatttaatgttctcactcttcgagggtagagtatctgcataaactacttggaattctgcatggaatatttgtgtcttctcccccatttatttatttaatcatttatttatatcacggtacactcatggacatttattttatgctttatgttataatcctatactactttatttattttgttgcttaaatttttccagatggaacaatttggtcttcaaaagttgctgctgttggctcctgtgttcttgtgatgtacacacatcatggtgtggtgtgtttttatctttggttttgttttcacttcttttttgctttttgtgcctcctcttccctcttccccccacctcatacatacacaaagggcagcatgctactataatttctggaatctcagccatattcttcttttttttgttttaaataaaaatcatactagagcagtaggcagtgtgggtgagttctcccactttacattttactttgcataatttaggcccctttcaggccactcttccccctgtgccccaggtgtgtttgctaccatacctccccaggggatagccctccaaacctgattggccaactagtctggtcttaaagtcccaaagggaggccatcacaaactactcagtatggagaagacctgaatcctaattttggcttaaccccaaacttgggcgattcagttttacctgtgtcctctctataccatagtttatgacaaggggttttctgtggctggtctccaaggcctcttccaatcttgacattctgtgatcctgtaagtctttgaataatggcccaggatgccaacaagaagtcaccaatgagagttcaggtgttctgttggaaatctttgtaaaatcacagagaaaaggagaagaaaaagaataaagaggaaaaactggacacataaataggaagacaaagaatgaatgtggactggggagagaagagtcattgacagggacaagaaataaataactttgatgcaaatcctgggaagactctggaacaacatggaggcacctatgttaactctatttcattttggaaaagttgactagacaaaaggtgcagagtagagtatgcagtgatttcagggtgttgggctctgacaagatgatgccgacttagacagtgttagtcaacatcaaatgtctggatcaagagaggcaagaatcccgtggatttggcgttggccagaacttgtctggaatcttgttttctgccttgagtgtcacctgttgagagctctgttgacaaactggcatttgtccttgggagagtagcctcaggaccaggggtgaagagttcagtaaactgtgtttaacccaaggaaagatacagggtgtgtcagattttgtaaggattttcaaggagcagtagatagtggccctacagtggaatgaaccttcacaccgaggatctgcttcctttgttggaggtgggaaagcaaaagctggatgcttggaattgtcatggctgccgtctgagtgatgctaccttgagtggacggtttggccaactaaggagtaaggcctctccctcatgtcacattgagtggtgctaatgtttcctgaagtttccctttcttttcagttcagtgtttcagaatctcagccttccagcagaatcccctttgtttgctctaaatatacattcccaagccccgtgtggccattctgatttactaggtctggggttgggggattgtgggtgccgagaatcagtatttctatcaagctcccaaggggacctgatatatacatggagctgaaaagtacccacctaacagacttgccagctccttaaggataagaactatattttcttcctttttttgtatgcctccccatgcaaggataattacacagaataagcactgagatgcctgttgatggatttattccagcaattttttttttttagctctctttgtctggaactttgcaaaataaacaccatggtcactccgtgctttgtgagtgacgtgctagaatggaatttcactgttttaaattcagggttaatttcttgctttcaaatgaattatgaaaggaagaggagagacctttggaaaagtctgaatgttgatgccgacgactagccaggcgcttcccttccagctggtttcgtgagggattaagaggccactgttgtgaatctcccattagtgatggtcccaggccccctcctcattgtgcatttatcttacaagaggcatatttaggagatgtttccgttctattttatctgcagaattactttccattctcaggtcttttatataagtattcccttgaacccgttccaaaaactggatttttaacccaatagaccataactgcagtgttttattgtgcttacatatttcaaaatgtgaatgtaagtagatttagcaaagttaaaataaaatgaaaacttttcaaagggcaccactgctcgcattcccatgttggagttttccctttggggttcttatgccattttaaagactctgaaaacaggaagactttttctcttgggtattttatttttttttcctctgcaagggatggggtcataagacattggtgaggttaggccttcctttgtctcccaggagcacacttgatagcaatgtagggtgaattccaaatctgtgagttagtgccgtatatagcagtgttgtcagtaagatttctcactggcatctctgcttcccctcttgactctcttgaaatcccttcttcaggcagaagctggagtcatttctctaaaatagaaatctgatcttgccaccaccctacttgccactccctgcttaatcccttcactggctcaccatatcccttaggataaaataacaaaatcctttccagggcctgcaagacccctgccaacctctgcagcttactttgtaccactttccccagaaacctgctacctaccctgctccttgccacagggcctttgcacaggctcttgtctctggctagagtagtcttcccatcctgctttagctaatcaactctttctcatcatttaggcttcaaatggatcatcactttctctggggtgcaggggtctttcatataagtatttctttgaactcattccaaaaaagtggatttttagaaatagaaaaaactaatttagaaatagaaaattaattgagttttagtttttagaaaattatctaagaagtagatttttagaaatagaaaattaacgtagatcacagaaaattatccaaactcagttaattttcccttttccagcaactgtatttgtcctccccacttctcttccctgccttctttttttctccttagcacttacaatgtctcactcatgtagactcgaagcttcacaagggcagggattttagtctatttcattgaaaatctgtcaccagtcactggcccagagagagtcctcaaaaataattgttgaatgaatgaatgaatgaatgaatgatgatggcgtgatgattgtgtattcctcatctggctgtaagtttcacaaggccaggcactggggtcctattttgctcactgttgctgtgtgggaaagagttagtacagcagactgtcgcaagcttggctcttggctgcatctgggaacttggaatttaggagggctgtcaccattcccagatcagataaagatggctcactctgtctagactgcttgtaccaaaaatagggctcatgtggaatacctgctttcctttgtggaggctggaattttgttatatgctacagagagggtgcctacgtggccaacttccaataaaaactgtggacactgagtccctaatacatttctctggtagacaatacttcatatatattttcacagctcatttctgggggactaattaaatgcatcctgtgtgaccccactggaagaggacatttggaatcttgtacctggttttctccagacttcgcctcattcaccatttccctgtgctcattttgccttgcatccttttgctgtgataaatctcagccatgagtgtgaccgtatgctgagtcttatgagtcttccttgcaaaccaccaaacctgggttggcgtttcagtgcctgacacagttgtattcctaagacatagttgggaccagacctcaagaaaatagccaacaaatactgggtgaatgaacgaaagaggccatatgcagtcagcccccctctctctgggttctacatatgtagatttaactaatgacagattaaaagcattcgaacaaacggagggtggtatctgtactgaaaatgtaccaactgcttttttttgtcattattccttaaacaatccaacataaccactatttatatcgtgtttatattgtattaggtattataagtaatctagagatgatttaaagtgtacaggagcatcacatacattatatgcaaatactatacaattttatgttagggacttgagcatttgtggattttggtatttgggggggttccttgaaccagtcccctttggatactgagggacaactgtacaaatcacatttaggagtggatgcaggtcagtcgtgacatctcatccaccccttcctcacccaagattctccgtggcttgtgtcaaggcctcaccacatcagaatatttctgctcatggttgctgagacagagctggacaggtccagcatccattccccaaaacagaactcaaactgacgatcatcaagatattccagctatggcaaactgcggaagaattaggacagatgtatgacttatttcatataaagctaaatcagtttaatttatatgattgtcctttattatgagattatgttcaacagatattttcagtgttaaaatattcttttttttttttttttgagacagggtctggctctgtcacccagggtctagcacagtggcacgattttggctcactgcagcttcctcctcccaggctcaagagatattcttgcctcagccctccaagtagggctacacgtgtgtgccaccgtgcctggctattttttgtagggacagggtttcaacatgttgccaaggctagtctctaactcctgggctcaagcaatctgctcacctgggtctcccaaagtgttgggattataggtgtgaaccaccatacccagccaaaatattcttttcaaagtgattagaagtaggagaagcttgctctctttttattggcacttctgtcttacatgcactttttgatttaaattattctgtcttctatgaaatgacagtgattggaggtggtttatttttttttaagtctgcttactcggaaaaataaaacaaagttgacaacctgatttcagacctcccaattttttcttaaaaaaaataaaagtcttcttggtccatgaaatccagaaactggagaccaaactagcaaattcgcaaggagctgcttgatagaaaaacacttgagatcaagagtcagaaatagctgggttgaattccagttctctcatattaagtgacaagttgcagaatgcccctgtctttctgagctgtttttatatctgtacaatggggttaatactactagtatttgcttccagggattgttttggaggggagtgaggaataaatgatataattcactaaaacacgtagaatagtatttgacacagagtaggtcagcatgcccaaagtatcagagtcattattgagttattccgctacctccgtatttgagtcctttcttttgggctttcctacttaacgtcgcagatgttatttttttgaagagggtgtaggccaagaaaggggtgggagaaacgagcaaggtgttgatagaaccccttagtgtcctcctcataccacagacactctcttcccccacttacttggccaatttttttttttttttttttttggtggagtctcgttctgtctcccaggctggagtgcaatggtgcgatctcagctccctgcaacctctgcctcccatattcaagggattctcctgcctcagcctctcgaatagctgggattacaggtgtgcgccaccacgcccagctgattttgtatttttagtagagttgggatttctccatgttggtcagactggtctcgaactcctgacctcaggtgatccacccgcctcagcctcccacagtgctggggttgcagctgtgagccactgcgcccggcctacttggccaaattcttgcctgatcgcctctccacccctgctacgtgtaatagaaaggtagggccatgttggagagggatccaacatttattatccccattttacagatgaagaagttaaggtggccaggcatggtggctcatgcctgtaatcctagcactttgggacactgaggtgggtggatcacttgaggtcaggagtttgagagcaatctggccaacatggtgaaaccctgtctctactacaaataaaaaattagccgggtgtggtggcgtgtgcctgtaatcccagttactcgggaggctgaggcaggagaatcgcttgagcctgggaggcagaggttgcagtgagctgagatcgtgccactgcgctccatgctaggtgacagagcaagattccatctcaaaacaaaacaaaacaaaaaaacaagaagttaaggattgcagagcataagtatcttctatggggctacccaactaggtcgggacagggcagggatttgaacctaggagctcttggattgcaatttttcattcacccctccctctccacccttcctgtcttcaagcctgagcaggtgatactgcattttgtaccgtatgactttaaaacagaaccacgagttcagaactttggttaggtcctgcccgtgttctctagctaacgcatggcaacgctggtttccaacctttcactgtgcgggtttctgatgagtacgctggcaggcctctggcttcagagatgccactacaaaggtctcctccttttcataaacattgctgcaaggcccgcttctcaagaaagcaacttgtgctacctcctgcgtgcttttatgcttcgctgtgaagtgcaaagttgggctggcaggcctggctttcttctccgacttatgtatgattcatcaagaggactccaggctgtggtgtgcggtgcaacccgggctgtgttcccgagtgcatcaaacggggattgggacctgttttccttcccactcacatgtaggtcacctacgggagcaggggaggaaccatctgaggtgtttttttttttttttttagatttctcattgctgagaacagttccagctctgccgaccaaaggctgagtgtccttttattagtctgagcccctagagagaccaaagaggcaaccctcgagccaactgacagccagctgtggggttggaccctgtttttcatacagtgagcactcttgaacccagagaaggtgcaggttggagatgcagctatatgactctgtaccagagagagacctttttgtacatttggaataaaaatttttagcattagagattcgcttttttgtgtctaaatacaaatgtccaggagaataggaatgccatagtggtgagctaagagcaggcagttagttaagtgtatgacaagtatctcattataaatggatgctgaaatgtccaagtgtggaaatgatacgcttcagctcttatttttaagtcatccttatctctttcacttattccctcattcaggcaccaaaaatgctgtttgactgggagagcaagtggagctgttcaaagttgtagggacagccgggcgcagtggctcatgcctgtaatcccagcactttgggagggcgaggcgggcagatcacaaggtcaggagttcgagaccagcctggccaacatggtgaaaccccgtctctactaaaaatacaaaaattagctgggcatggtggcgggcgcctgtaatcccagctattcaggaagttgaggcaggagaatcatttgaacccaggaggcggaggttgcagtgagccaagattgcgccactgcactccagcctgggtgacagagcaagactctgtgttaaaaaaaaaaaaaaaaaaagttctaaatcagtggattctgccgataaacatcatctggacggaatgaagctgagggccaatagtttagaggctcagcacccgactggagagagagagagagagagagagagagtgtgtgtgtgtgtgtgtgtgtgtgtgtgtgtgtgtgcgcgtgcatgtgtatacgctggtgtttaggtgggcttgagaaaagtgctgactttgtgaacgaggaggagggaaagggtccagagcagtaaagagcctgtaaataaattcataccagcttcagccccatgctttcgtttgggattcctcatccaaccctgacggcttccctgcgggacatatttccccctcttacagataggaaaccttgcccaatgtgattacgccaggaagtcagatttcaaatctaaatgtgcctaatgccaaaactgtacctcttgccactcaacatctgcagtcaaaggcttcctgactcaggatttgctggggtctggctctgggctattagaattagatgcgtgagaccctttcaatctaaaccttaagtattttgcctgttggacagatgcctggttgtccctttaatccatcgcccaaaaagcctgaggaaggatggcaggtggacttggatctaggccactcccttagatcctgattaggggacctctgcgactgctcatctgggaggaactaggggagcgctaatgtgttgtccttgactgggcaagaagggaaggagaattgtgaaacatgcacaattagaagtcgtgcacctgggttcatatcctggctgggccacttactttctggcgggtggggagggcagacaagttgctcatcctctctgcgcctcagtttcttcatctacaaaatgaagatgttggttatttctttattcaagggttgttgagaggatgaagtgctaaaaatgcttgaccagcattcacacaggcactaagacggtgagtactcactacttagcgctgtcaacatcatctccgtccacatcaatgtcgtcatcgtccttatgaaaagccctgggcatcattttgcccttgagctggatgtccatgttggaaaaacagctagtggaaggcgtgcccaaatctcagaagttggcgtttccttgcagatatcattggtggccattggaggggaaaaagatgctttggaaaccaggacacagagaaaagtgcctcgtattatacagagccaagagaggtcactgtggaagtacagaggaagccttggcctaattgcacggttaatacaattccgtaactcatcctgccaacacgaaggtagatggacggtccttatgctcgctgcggaacactgcctgtgttttcctaggagagacatctgcactctagtagtgattaaaatgcctttgacaggctcttgctattaagagtttctggctccagtttaataaaaggtagtatattataatggaaaccaggttattattgataaggactagacatattagagaccaggttaaagctttgatagtcccaaatgcaaggggagggagctaagggttattgcaaacctactgtgtgtcaattgctctaccagacacctcagagacatcacagccaaagacccccacctttgaataaaccaagtttggcctctctgatatattaatatatttaatcatcagactttcagtgttaaaggagattacagtagaggcatccagttgattggggaatagttgttgcaaatgataagctcttttgaataaactgatactgacttaatgaggttctgctgtgtactatcttttttttcctaatagaaaatagagtagctgccctccccatccgccattctcagtccttttgcttactagtaatgaccctcttttctctcactccatgggaacttttaaaactgataattaatggatttttagcctcaagtttctggaattctaagagggcctgaaaggtaagtgctcacttactgaggtgtgtgaacaaaaacaggcaacctagctcagcaagtaagaatggagtggcatctccccacctgctctggagtcatgtgtttgcttctggaagggaggcaagaggcattcaacctcctgttaatttggttgctccttcagatacgctcttcatggtacagccctgagctgcatcatttaaagaccaattgttaaggaccaatctgagggcctgtgcattagttaaaactccttatctggtcatagagggtggtgtggtttggacgcgttccccttgtctgtgcaattcccaacagaggcaagtgcgcatttgagacaggttgagggttcaagctgtccaatccctgctcatctgcagcacaccaaggaatgtggactaatgaaaaataaactgcatgcatgcaatgcccatcacactgcctgcattttctaatcttcacaataactctgtgttgagaaatattcctgtctgtaatcccggcactttgggaggctgaagcgggcagatcacctgaggtcaggagtttgagaccagcctgggcaacatggtgaactccccccaaccaacgacccttcccatatctactaaaaatacaaaaattagctgggcatggtggtggggacctataatcccagctacttggaggctgatgcagcagagtctgttgaacccaggaggcagaggttgcagtgagccaagacagtgccactgtgttccagcctgggcaacaagagtgaaactctgtctcaaaaaaaaaaaaaaattgtttctggccccacgttacagatgaggcttttaaagatacccagccaatggtccacagtgatgtaactcatcagtggtccacctgacattggaaattcggttgctttggaaccttctactacatcccctttccttactcactgacatcattcccagatcaaagaaagataaaagaaggaagggctggagacgttgttttcctgtatgctccttgatgaagggctcagagctaagcgcggagtaggtgcttaagcccttccatttgaaaggagctttaaacacctttggtggcagctaagagtgtcaaaatggagggatgtgtaggggacctagggcctgggtaacattgtcccaggccagggcctattgtgttgtgtgtgtctccactttccagcctttgggaacgcagagggggacctctgtaattggtaccagcatcccttccttgcagggtccgtccttcctctgagttgggggaaggggtctccatggtttcttctaccaggtagacccagaatcactttcaacttgctcacctgtctgtgcagtgtttgagttcttccctgggaagcttgctcacatcatccacttctctctgggttctccgtaccgctttccccaatccaagctaagctcttctcttagttattctaataactgcccaatatcaggcactaccctcaacactgtttcccatggcaattattttacatgacagtttaaaaaacaggaatgctcgatttgtattcccattttgcagacaagccaacgaaggcttggaggggttgaatggcccaagtttcctaagtggccaggggcagagtcaggatctgaacccaagacataggcccaggagtctgtgtttgttctttaaacctctctattcagttgcccagctcttttcattccctgtcctttccccctctggctgggtctgcctttccaaccgctaccaccttccaccaccattttttttttgtttcctctgcaagcaacatctgaaaggcccagacccagcttgttggccttgggctctgataagatctgtctgcactccttttgtctggcctgtacctgccttttctgaatgaccctgttaattgcaattgactctcatagaatgtggatagcagtgccacttgacaccagactaatgcttctgacttttccatggtgccccagcagcaggctggagggaagggcgggggcggtcagaggagagatagagcacttcagattccaatcgaatacattagagcattagagcttttctcttcctcagggtgctctctctctctgggttgggaggagatgtggcatttctaggaattcacagtaaaatcagaaataattaggagatttcacagttgtagctcctgtgaagattcaggaattttttttttcttctatttgcaagctttagtcctaggcatggaaaaagaactttgaagaaaacctgagagatatcagtgtaaaacaagagaatgattccctctggggtgctggtagtgggggcttaatttcctaaaggcttactgggtatcagggctgctttcctttataatcttttacccgtcttatgggggatgaacagaaacacactttagtgctagaaaagctgggcctaaaagaccagtctcctgtcccatacttggacatttattgttctttttgggcaaggtgaaaacttgaaaccaaaagtctgttgagtttggaagacttgactcccaggatgtacaaagtacttctgcatgtgcgcaaagtcctgtaggcccaggcatcaatgacacatgcagtgtgggcccaggcatcgatgacacacgcagggaagcaacccaagctgggtcagtccttacaaggagaccggcacctgggctcacaccttgccgtatatgacttcatgggaacctcataacagacctgtgggctcagaattattctctcactttgcagatgaggaaatggaagtgcacagaaggaaagtaagagtgtttgagatcctgtagtgggttcattgctgagaataaacccggagttgcctctgggaggacctggtggtgggtgggatggagagagaggcctcccctcagactccaggggcacagattggattttttttttttccagacagtttcactcttgttgcacaggctggggtgcaatggtatgatcttggctcactgcaacctctgcctcccaggttcgagtgattttcctgcctcagcctctggagtagctgggattacaggtgcccgccaccacgcccagctaattttttgtcttttttagtagagacagggtttcaccatgttggccaggctggtcttgaactcctgacctcaggtgatccacctgccccagcctcccacagtgttgggatcacaggtgtgagccaccatgctaggcccagattggcttctgtgtgaggatgaagagtaataggaagatagagtggtgatctaatgtcaactgtggagggagtgggaggcaggtgttcgcagggcacagctggtttcctttttgaatcccacacagtgctggggcagtttcatagcctgtgaccacacagataggaaagtgacacagcaacaccaggcagattcattttctttaaatgaggggttcaaaatagaaacacaaagcattgagtattgagaagaaatggatcttcaggtttggagggaggccgatagagagtgtctggagttgccaacgtcctctccttgggtcatgggtgtgtgtgtgtgtgttttcttcttgttgttgggttttttttttttttttttttttttttttggcttttgcgcctatggtgacttttagcgaatggatactattgaaggaatgtttcacttccaaatccagatctctgacttcccttgaaaatttggagtgccactcaagtcggccgctctgagctagaatcctggtgttcagaattggcaggaagggcacaggggcaaggtataggctcacgtctccacattctgcacctcccaggctcctgccattgatgtgagcgggttcctgtactgcatgaagcaggggtttgcatccgaaacaaccacccgtgctgaatatgtaggtgatacgttgatctgtacagcaaaccaccatggcacacatttacctatgtaacaaacctacacatcctgcacattgtaccctggaacttaaaagttggtgaaagaaagaaggggccgggcatggtggctcacgcctgtaatcctaacattttgggaggtcgaggcaggcagattgcctgagctcaggagttgaataccagcctgggcaacacggtgaaaccccgactctactaaaatacaaaaaattagccgggcgtggcagtgtgtgcctgtaatcccagctattcgggagggtgaggcaggggaattgcttgaacctgggaagcagaggttgcagtgagccgagatcatgccactgcactccagtctgggtgacagcgcgagattctgtcttcaaaaaaaaaaaaaagaagaagaaaagaaaggaaggacagatggaaggaaggaaaagggaagggaaaggaaaggaaccagctgcaaaaattgtcctaactgagcattactgtaacatagaacagctgaaacactcctcaaagctgagaggagggtttgggagagaagcaggctgtggttgtgaacaggtgcctcctccaaaaaaattctcttccttggatttcaaaatgacccccgttgacaacaaagcctttcacgctgtgtttattttttttcaggtctaagtttcccccaggagattttttttttctaaaggaaaaggcagagaagcccccagaccggagccacaatcaaatgcaaatatgacaataggacccatcctggagagaaaaagccttctttttaattagaagcctggaaggacataccctttaattgctgcacttgtagtgtcagggttatcaatatccgtggctctttcattaataaactggcgagtcagaaagcagcaggagtgggaacctctccccacccaatcccctctcacgccccaagctctatttaatcaactgcagactcaatcaaatggggaaaagaacatgtaaatcagctcattcattctgctggccctaaataggtagaaggaagggaaacatgaaagggagccttcatctgttttcctgcagatgcccggctcgtggttaacccaagcaagaggtagttaaacggccccgcagattgccagtgactccgggaatgcctaggtttatgtatggattaacacagtgatagaccctgagtagcaaaagacgaagactaattacctgacagagctcccctccactcgcctgggtcattgaaattaatttctgctttcaagcttggcagaaagcagctgcagaatttcagttcaatacttaaattaacggggagccgaaattatttctgtgcacaggcagtattagaggagtggcttaccaaatagatcttgatcgcagacacggaaaaaaggattattcctccccttttatcaagagccgtaagtccttggaaaatgcaaagagggggaaaaagaagaaaaacagcaacgagtttattggagagttaacacttaaatactccagtacattgagtgtgacatgcctgtgtaggagactgtctgtcccccaaataattgacaatttctctccatctaacaagaaaatatatggcacttttatatatacttgaattggaatccctaatccagagataatttgtgaatatccattctatagcatcccatgttgtcaagaaggtgttgacttactgcaaggttaaggaaatgggtggagaatgtagggaggaggtggaggataaaggataggactaggaatcagagttgggatttgaacccagggcttctgtctccagattccttgttctgtccctttatgctgactttccttttttgctcaaagtctctctccttgcttctttctctttgggctccctgcttttatttcggccctgatggaatctgtcgactttactgagctccatgtatgtgcaccaggtcagattcaatgctgcctaggtccacagtcctcagttatttgttcctgtgattttcgcgccaccaggagccacttgttggatgagatttccgggcaagttgagtctccatgtttttgtcgtgggctactgccagctgagatatggatgaagactccctttcatgtttcccttctttggtgtccatggcagttcccacctcgaccgctatggtatttcttttgcttctgctgaggctgtgtgtgggtgcacatcaggatacctcagtggggaactcagggcgtgaggcacactcatgacagatgcaggaaaaacatctcttttctaactgtccagctctttaggattaggcaatactttaataatcaaccaaattctggaatcctactgccaaattatggcactcatcctacttggtgtaaaatcctgggatgatagcttataatagtaataataagacctgcttcccggtgattctctaaggattaaatcagttcatggagatgaaatacttaaactgtgcctggcacaaagtaaatgttagtgctactattatccctgctgctgttaaccccaactagataagccaagataaggtgctctccattgtttacctgaacaggcagaaaagctctatgcagctatccagacccaagaggatccgacagctctggaacttgtaatatttgcagcatgtcttgccctcttaatgtctaagaagtcaaaaaaggacacgtatgcctagaaaacatgaataattatcatctatcaaatttttaccatgtgccaagcatagtcatatttggctaacgaaaacaacaaaatcaaccgtgacaaggttttattagtaatgaaactgaggcttctggaggatctgtaactgttgcaaatttccagtggctagttcagggacagtgccggggcttgaacccctgtctctgtgtctcccagctcataaggtgtgctaccaagtcacccatgagtagcaattaggcgacttctaacatgtccagctttaaacctgtgacctcaaggcaaatgacttccacatctcattagcactccccagagccttccagccccctgtaggagagggaggttaatcagccacgcgctgaatctgcttataaggctgtttcatgtatgatttttatatcttggctcctaataatggccccgttgtaaatgattgtctcactatgatatacgggttccttaccttctaggaactgatttaaaaggaagccctagacttcttgtgcctgtagagtttattcatatcactctttgcttgctcagcagttgaaatgggatggaggaaagccccctaactccaaaaaaaaaaaaaaactttcttcccagcctgagacagttgccataattagtaacctgcagctcccttgatatcttgatgatactttattaaaacaaacaaacaacaaaaaacacagctgggtgcggtggctcacgcctgtaatcccagcgctttgggaggccaagatgggcagatcacgtgaggtcaggagtttgagaccagcctgaccaacatggagaaaacctgtgtcttctaaaagtacaaaattagccagacatggtggtgcatgcctgtaatcccagctactcagaaggctgaggcgggagaatcatttgaacctgggaggtggaggttgtggtgagctgagatcacgccattgcactccagcctgggcaacgagcgaaactctgtctcaaaaatgaatgaatgaatgaatgaatgaatgaaatactacttctccctgtcctccccaccctaagcatctgatcagacaggtagtgctggtggacagatggacagacacctaccccatatgtcacctccctcctctatgcaaacaaaaattttaattatttctagaatgacttaggagagcaagtcatgtgggatatatagcgtcagggagcgtattttcaaaccaaaaacctgggcccttattttttttttctttttgagacagagttttgctcttattgctcaggctgctgtacagtggggcaaactcagctcactgcaacctccgcctaccaggttcaaatgattttcctgcctcagcctcccaagtacctgggattacaggagcctgccaccacgcctggctaattttttgtacttttagtagagatggggttgcaccatgtttaccaggctggtctggaactcctgaactcaagtgatctgcccgcctttgcctcccaaagtgctgggattacaggcgtgagccactgtgcccagccaaacctcggcacttttatccaacaaatatttatttcgtgactattatgagtcaggcttaagaatacactagtaggtacagcaggagagcatgtagaagaggatagatgtagaaaatcgggacggcatgttaggaatatagataggaattactaaggaaaattgtatttttgtggaattctttgaactcgttactattagtaaacggtgagttttggttctactcttcaatgagtttaagatgaaggaaatcattaaatagtgctttcttttcttcaaaagttgggttgcattgcatagttaaagttctttaaattcttctctaaaccccaaggctaagcaatatacaatctagttacaatggtctgcttgctgttaccagaatctgtcaagctctttcctatcgaagggttttttccatgtactggtttctctcctgcgtggtcttgttctacccttgaggagggtaccacctcctcattgcttagttgtcagtataaatgctcctttctcagagaggcccatcctgaccatctgtgtttttttcctatcaatgctttaacaaatgaccacccatgggtggcttacataccatgaatgtcttctcttaccattctggaggtcaaaagtccaaaatgggtctgtcttagtccttttgtgttgctataaaggaatgcctgagctgggtcatttacaaaggaaggaaatttatttgtctcatgtttctgcaggatgtccaagaagcatggtgccaatgtatttctgatgagggcgtcaggcagcttctactcatggtggaaagtgaaggggagccagcatgttcagagaacatatagggagaaagggagcaagagaggggaggggaggtgccagagactttaaaagaaccaactctctgggaacaaatagagggagaacattaatctagccatgagggatccacccccgtaacctagactcctgtcatcagccacggcctccaacattggagatcaaatttcaacatgagatttggaagcaacagacatccaaactatagcagggtctccttgggccaaaatcaaggtgttggcagggctgggctctgggggcttctggggagaatttgttctgactttttcgatttctggaggccacctgtgttccttggctggtggccacatcttccatccttaaaaccagcagtgcagcgtcttcaattctgtccctggctctgctccttctctccccctcctctccccctttgtcatctttttaggtttatttgtgaccttttagatcctttgtgactgcattggtcttccttgggtaactgcgcatactctcctcatgtcaagaacttacatccctctacaaagtcccatctgccatgccaaataacacctttgcaggtttcagggtagagcatggatgccttttgattttgatttggttgtttttggtagagatgatatcttgctctattgccaggctgatctcggactcctgggctccatcaatcctcttgcttcccaaagtgctgggattataggtgtgagccagtacacttggccttttggcaccattattctgcctgccatcctgtcctaactaaagaaagtaaggtccctccatcctccatcttagcccttctttccttagcctcctaacactcaacgcaatttatatattttaattttttttttgagacaaagtttcactctgtcacccaggctggggtgcagtggcgtgatcttagctcactgcatcccctgtctcccggattcaagcaattctctggcctcagcctctctggtagctggaattacacgtatgtaccactactcccggctaatttttgtctttttagtagagactaggtttcaccatgttggccaagctgatctcaaactcctgacctcaggtgatccgccctactgggcctcccgtagtgataggattacaggccattgtgcctggcgtatatattttaaattttatttttcagtttacttggttttgcctccttctagaactagaacataagctctctgaagtcagggaccatgcctagaatcgccttccttttatctcccatcagccgaaactaactctgctgtgtcacgctgtgttaggctgtgttggctgtgagtaagagaagtctcacccaactagctgaagcgaggtgggttggaggggggatgccttgtggaagtgacaactctaggcacgtaactggctcagactctgctgggcccagatatacagatgtcatcaagagtctttctcttccttttgagcccagctctccctttgtgacccagcaacttccttccccgatgatggccaagccttgaggatgtgaaactgcccagtgccccaatctggagtccaccatcctgggtctagctggggacatccttgaatcagcctctgggaatcactgaaccaacatgagtcacttgctactgtgagatctcagaacacatggatcaggacagagggcagggctgtttccccaaggaaatccaaatgctttacaggaaggggagtggatgctggcccggcccaggcgaggatgaggagtaactgagctgcagaccattgtttagccctccttccacctgggagactggctgctggttctcattgcttctgtgggtctccaggtttctatcattacacagattagcacacggttccatgatcatggacccgttcagtacacaatgaaatcatttgcaaagcaccttggggtctgttagagaagggaatggatgtctgaggtatgctaagcctaatctccatcttctcaaagctccactgccactgtcccgtaagggtgggcagattcctccccattctataaaataacagctaccatttcctgagggcatactgagtgctgacaggcacatcaacatcagaccatcaccttcttatacctcaaaatagtctgcagggtgactcagaagctcctggctggtaagtggcagatccagagatgaaacccagatctaactggacccaagacagaaatttctagaacagaagccacaaacgtgttagctaagtctggttatgtcaagtggaatatttctggctttgggggatcccagctctttttttctctctcactctgagtatttagaggcttttattgctatttttctaaaaggcaacattagtaatcaactttgccaaaaatttcatatgaacggtgggcttttctttctcatttgctttcgcttagtattttccattattcatttggcttcttgaaccctccctatctgtaccccacacttactcttattcacccagaacaggtgtgtgccaccttggagaagatgaagccagagagaaaatcagtcagacaggaattatgttgaaaggtgactgaatacattaccacctcccaggagttgaatgaaaaacggctatttctttaggacgtcaaaccacctttttcctctctaattcatgcatatccctatacaaagacccaaggtggtgaggggctggtttttagatagtctggaggccctctgagaatgcgaggcccttgttgtaaggaaacgctggtgggtgctcactccttcatcaggagccagccggctcccctgcacttactgctttggggaagagtttttgtcaagatcatttttgcagatggttgtaaggtaaacagtcactggtccctaggatatcttgctaatgagacaccaaagatacacatggacaatggccagaccatattttgtcacagaatgccgacccacaagctctggagcagtcaactcagaatggtcaggacttggtcagtaatgcccatttttgctaaattttgtccccacttccaacgcaggaccaaccagagaaagccacatatgctccccaaaccaatcatacaggatgtcctggtctagggagcccacctccggcttccccatgtccacagcctccaatcggagcatactggaagtcatccactttcttttttgtttaaccataaagctttctttctctccacctcctttgagcctctgccaaacacaactgatggtggctgactgcctggctgcaggaagttctgaataagtgacctctatttgttattatttgggttccctttgtttatttttacactagctttgcactaggttaattttttcccacatggcttttcctgtttgtttctttgattgtttttaattaataattagtttgcttatttatttgtttattttttgagagggagtctcgctctgtcacccaggctggagtgcagcagtgtgatcttggctcactgcaaactccacctcccaggttcaagggattctcctgcctcagtctcccaagtagctgagattacaggcgcccaccaccaagcccagctaatttttttggttttttttgtattttagtagagacgggatttcaccatgttggccaggctggtctcaaactctggacctcaaatgatccaaccgcctcggacttccgaagtgctgggattacaggcgtgagccaccgtgactgacctgtttttaatttttttagagacagagtttcacactgtttaccagattggagtgcagtggtgcaatcctagcttactgcagcctgtaggtcccgggctcaagcgatcttcccacctctgccacttgaataggtgggactacaggtgggtaccaccatacccagctgttgaaaaaaaaatggtggggtattactctgttgcccaggctggtgttgaactcctggcctcaagcgatcctcctgcctcggcctcccaaagtgctgggattacaggcttgagctacttccccaggctcttcccccgtttgttaatacataccatgaccttggcctttcccacctcttaggttttgcttactttcccttctgtcctttacttatgactctgcccccttttgacctctgctaaaattatttgttactgttgttatgttattatttcatgtgttaagtctacagtgtataacttgggtttacttatctcatttaacccttaggaaaaccttacacttaaatactcaaagccttgattttgcaggtctgattgatgggcatacagaggaattaaatgaccttgtcttccacatatggtataaggcacagtagtggaagcaggatccaaatctgtgtctgtgtttggatcaacagccctggccaccatcttgattcatttctcttatctgtaattctatggagggaggttccattgtatatttttttctttcaattacagtattatttgtatattggaagcctattgtactttatctgtgtaactgtcgtagcagctagaggctagtaggactggctgaaatgtcagaggaaggagggaagaaaagggagaaaagcaggacaaatgaacgcagattaaggaaaataaaaaagagtgtttggctaacttgcataaaaaggatctcatttttctttgtaacacattactacatacagtgaccatagtgtttctctaatttcttcaggacttactttgaagatgaagaagtatgtgtatccgctttttgtctttcagaataacatactgctgtctgtaaaaatacagataatttctctcttaaattccataagctggagacactgcccctgtttcaaatgaatacagattcattttgtcacctgtgtgaaattggtgtccgtgtgccttgcttcctaggctgtccaccatgacatcagcctgcccatgcaatgcttgagatttgccctgtgactcaacccaaatctaaagcccgagtcgtatgaatccaggacacctgcctgcaaatgcatttttcatgtataggttattcactctggtctttgagattatgtaattagcatatgttgtcatagtgatgtatttattataatggaggtgttctcaggaaaccagatttaatacttttaaatcagaggccaacatggacttttaggaattccattcacagtaaattttatgcgtggtgaaaggttatggaatgggtttccatgccatgtctccccctgtcccacaaatctcagctggcctgcaaaggttccactgtggatttttgccagccagccacgctgatgtagacagaatatttcggatttatattattgcttacttggcacatcttccattggaaatggaatagagaaaaggtggcttggctgtttggtttatgtcctaaaaccttatcgtaatgtgattctccttaacagagggattcgtaagcttaggactgatagagatttggcttttctgctgttggattgatagctccttgactgctgaagccattgcccatctgttcaactgttgtattcacgaggaggttagacccctgacccaaggcccaggtacctggctttcctcagttgggatcagaaggccacaaagttttcttatattttaagcatcaaagtagcaccactgtacagcatctttacttaatctgccctctttcacgtgtgtgcatccctggcatgcttaaacaagaaaggcaaatgagagagagcgagtgagtgcgagcgagagagccctgaggtgccagaaggctgtggttcctttgtgtctacagaaaagatataacgattgaattagactcttaaatatctgtggatgtcaggttgaatacaagcagctattcagtgttttactctggcaggagaacaagtcccctggaggtcagaagccatgcaggtccctggaagtgtgagcagattgttaaaatggtatcaaagatgggctggcatgaggccagagtctatccttgatgctcacctgaggtctagggctaaactcttgcctttacctgttccatgcttagccgttcctgctttttgcctagaacctcagtgctattgctcacacagacccagctcatgtccccaggccatgaccactgcctccccttctcccacctgtgcaggtgttaagcatcagtacataactgaggagtaggagggcagcagcccaaatctttgatgaagaacctctttcgtatcaacttatgctttggaacgagacactgttggatgggaatctggcttctaacaaactgattggttggactcatgccttattctttcggagccttagttttgtcatgtgtagaatggggagtattgctagctattcccatagggagtgagagagagtgtaagtaaaatgcaatggcaggcacagggatggttgccattatcagttacattattatgaggattattttctacctagatcaggtataaggtggatgtattattggcattcctaggactgttttaaaggaagtacctatgaggcctcatgataagccagatgtccagaagccagcttgagaccagggctcctggtcacttaaaagatgtttggggctgggcgtggtggctcacacctgtaatcccagcactttgggaggctgaggtgggcagatcacgaggtcaagagatcgagaccatcctggccaatatggtgaaacctgtcactactaaaaatccaaaaattagctgggcgtggtggtgagcacctgtaatcccagctactcgggagcctgaggcaggagaatcacttgaacccgggaggtggaggttgcagcgagtcaaggtcacgccagtgtactccagcctgggtgacagagcgagactccgtctcaaaaaaaaaaaaaaaaaaaaaaagaaaaagaaaaaggtgtttggaagccatgtcccatgaattccaaatacaattgaggactctataaaggactataaaaaaagttgtaataaattatgcagacccctcagcagttgactcacctctctggtgctccaggtatttctcagcgtgttcggggtctccctgtgttacctggacagctcctgccatcattagcacacagccaagattcctcgaccacccatgactctggatttatcatcctcaagaattgggggctgtggaaaagatgccaaatttgttcttttcagatttaggttcttctgtgataaaaatagacttggtaaagaagcagatatttctttaatacgtgtatatattagactgtgaatttattcatcttccttattcatcatataagtaaattatatgattggacccaggcataaaacgtgatttgactcccccttgcccatcacagttctggagttcacatatcatttgttactttgaaaaatgaacttttgttatttgattatggtaataaataatatacatggtagaaggagaagaaaatgaagaaaaatttagaaacttggacagaggaaaatgaaaatgttctattaattccactagcatgagataatcactcttaatattttgttgcatgttcttttctttcttctgagtgatagcatttttttcaacaaattgggctcgtaatatataggcacatagatatataattaaaaaaacaagaatttctcatgtcattaaacattgcttgaaaaaacatactagtaatttcctaagattacaccatgtaaatgaattgtattttatgtaaccattccctagtgttggatagctaggccatttataatttggacactattttaaaaaataactcaggcttattttactatttatttttgccttacactttttgtaaaagtaatcagagcagtaataatagatgactccccaaaatccttttgcctctaatgattagtctaagcccataatgctgtgttccttgccagtgattggtttagaaataggtatgtgacccagttctgaccaatggatatggagggtgcttatgaggaaggtttcctactcctaaaagagatacacaggaagagagaccttctgcttcctctggacactggcgcagcctggactagcagttgccagcttgggtttggacaacctccgaccttagttgaaaatgaccctgtgtaggacagaggagcaagtggaaagaacctgggtgcattgtggcattttagagccactgattcagctgtcctatgggcctcctaacccgaacctccactggtcatgaaataagctgttagtttggtgcaaaaggaattgcagtttttgccattgaaagtgatggccaaaaccacagtaacttttagcaccaacttaatattttgagttgggtttgaatcacgttgtctattacatgcagcaggacacatctctaatcacgcgagaggtctgagcaaacgtcttcacatttcacactgcagatattcttacaaaaggcaaagcagagatccagagaaattaagatctgctcaaggtcgtatccagctttgggaaccccaactattgcagaaatttctgaagtcgtcatattgctacttaaagcaaaatgccttctcctaaatccaggtagagagaaactctcaaaggccagggtctggactcaagatgagcacaggatttagaatcagaaagtgtgagttcaaattgccttcggctcttcacctgggtgggcgatttgaatagagctcacagccctgaaaaccctggttttcagattctttattggtaaatgaagtcagcttagtgatatgagaattatgaaacataaatccctttgtaaaaatataaaataatcttacaatcatcatcgtcatcctcatcatcgtgttccttcacaccagcggtatttatggtatttatcaactaactgctgtgtactatgctctattgaaaatgttagcaatatagtaatgaacaaaacagatgttatctctacccttatggtttttatattttaataaaagtggcagaaaagaaataggtaaaacaataaactgagctctttggagaagaggcccacgttcttttcagattctgatttctccgtgatataaatagttttttaggtgatcacttgtttttaatgtacctacctatctatacctttctctctctctctctctctctgtgtgtatgtgtgtgtgtgtataaaattacatatccagtatgaaacctaaaaataagattttggggcctgtgaatttttttaacctttcttaacctacatcctaattatttgatttgacattgtgatgaaacatactgttgttttgaattttggaaatagaccagtgattcttcagtagggtcgtaaggtcccgtcaatgcagcagtcaaattttttcttggtgggggggatgcatatgtgtatgtgtgtgcatgagtatcttgataatttagaaagattaattaaacattgatcatctatgtgaccacatttaaaatgagcaccaccacatccaaatgtctgagtttacattttgtgtcggtacttgctttggcagaactctgtgcctttccccaagtcttctgtgaccttctcacctggcctgcatcctggtccttatcaaccgtattttacagttaaggaaactcggctcaaactagcttcggggactcgctgtggccataggtgccctaggctgcagtctgagagtgaaactgaggtctcactcccttcatagtctgctctccgtctctgcctcatctggcttctcagggtggtggggcgtgggcactaatttgatttgatcacttagagacaacagcttacaaaatgctaccgagcagtgcctgtcctttctgagaacttgatataataacgttggcttgatctcctcagcctgtgtcttgagggaacaagtaaattaaacaagtaattagatccataatgtttttagaagttagaagatttaaatatatgaatctcatctgagtgtgcagccttttgtctgctgtgtttcctgccaaaagatctcttgacaggaaataaacattaaaataatctttaatcccttgtttggtctattaccattaacaattgatgcactttaattttgtggggttttaactacaaaatggaacggctaagtagtgataattgggtttggaattatacggtcatttatatcaacagagatgcaaggggctgggagggagggtgattaattatttactatttcctggctgtggttcctattatagaattttctgatatgttcttctgtgaacaattatcaccaaatgaaagtaaacaaatctgtgatttgaagccttatttagaagttagtctatatttaggtgatgtgggcttgattttcacagaccctgtgggctgtctgtgtgtgttccttttctcagtaccccagctctgtattcgagcgtggttatctttgtgcatcttaaaatccacaatgcacagcctggggagaagccttggttttgccagggggaaaaaaagagaaacacaacattgagtgaggtctagggtgaataccaaaggtctgttttgaaatgggggtgtgggttattcttctctctttctgatttgcttcagtacagtatgggatggggaagaatcaaaattattatgtcaacatgaggatgaaagttatgctctgttgtttctcataacatttgtgtgtgtgtgggtgggtgggtgtgtgtgaaaggtaggatcacctctctgtgcctcagtctccccatcatccttcggtggtagatcaatgctatctgatgaggccttttttgggatcacccactccaacatgcatgtcctttctctgtcccctcctggtgcctgtattagtctgttctcacattgatgtaaaggactacctgaggctggctaatgtataaagaaaagaggtttaattggctcatggttccgcaggccatacaggaagcccagttagggaggcctaaggaaacttaaaatcatggcagaagatgaaagggaagcaggcatgttctgcatggctggagtaggaggcaaggagcgaaggaggaggtactacccacttttaaacaaccagatctggtgagaactcactcactgtcatgagaacagcaagggggaaatcagccctctgatccaaccacctcccaccgggcccctcctccaacattggggattgcagtttgatgtgaaattttggctgggacacaaatcccaaccatatcggcacccactgagcacatcctcgtggatcttcctggctctccttacaaggggttccttccaaacccaagcgccacaatccttaggcagattgctctgacacagaagactggtgagttctagacttgatgtgtttcatgggaaacaggaagacatttaggggaggctgtagatacacagccgctctgtttagggaaggctgtcgatacaccgctgctctgaccatcatggcgtctggtccatgctcagattctggagtgttagggtcttcgggcacatggtggatgagcgttttgcttcgtgtactcatttatttctgaaaataatgcagccccttgtagggctttctggctaattgagtggtgccatcattcatgcaattgcgcaattcacacaccaggctgccactttggcccctgcgtcaccttcaccaccacccaatgtgtcctgctcatcactgaggtttgtcatttttactctgagtctgtccattgtcatcatctccaccatcaccccttttgttttcattgccacccttgcctggggtgagtgaagacgctcttctctggcttccacccttccaaatgcccttaacccacagatgggaagaaaatgaggtggggggaaggggactttcttgcttcctcatagttctcccccatcctgtaaaggagcctgtgcttcccgactcccagggccctgcagcatgtcaagaacaatattggacaagcttgtcagtgagggtccaggtggttccctgccactacgatgcatgctggggtcagtaaaaggagaacacagaagaatcagcagacccagagtctaacccctcctctagttaaagacgtgaccctggccgggactgaagccagaggcccacagcctactggacctttgtttcttgcagtcaggttctgatgacagattttagtcccctcttgaatttccttggatgtgatggaagtgattctcagtggacaagaggtcacattgccttttctagcttggaaggtggcgcaaataactgcttgaggctccctctcttgggccaagcttgactctggattttcattgttgtccttttttattaaaacaggttttgtttttttgtgtgtgtgttattttgttttttgtttttttgtttttcgggggctggagtagtgtgcagagcctggcggtgattgttctcattagaaagtatagtgtaatactcaataaattacttttgttctcaccttgggaagtggactcagaggccaagtgactttgatttttcactttatcctggagtttctcaaccttggcactattgacattttaggccaggagattctttgttgggggggatttcctgtgagttacaagacattaagcaacatcactggcctctacccactagatgccagtagcatcttctatttcctcaagtctcaaaataccaaaaacatttgtagatactgccagatacccctggggaacaaaatcacccctggatgagaacccctgctttatcctcttacagttttggttctttccatgagaaagtatttttaatagcaaagtaatgaacaagaaagtattaataagacccaaataataatataaactactactttactaatggtcattatgtgccatgccctgctctaaacacttgccatgtagtcactaatttaatcctcacaagaattctgtaatgtagtgtagtttcccagggcttccttgaaaacgtgccatagactagatagcttgaaacaacagagatttattctctcacagttttggaggccagacacctgacatcgaggtgttggcagagttggttcctcccggggctctcagtgaaagcctgctccgtgcctctcctccagcctctggtggctgccattaatccttgacattcgtcggcttgtggcagcagaaccccagtctccgcctccgccttcacatggccatcttcactctctgtctttgctcccttttcctatagggactcaagtcattggatttagggctcactggaatccaggatgacctcattttaccttaacaagttgcatctgtgaagattccatttctaaataagatcacatgctagggctgggcacggtggctcatgcctgtaatcccagaattttgggaggccgaggcaggcggatcacttgaggtcaggagtttgagaccagcctggccaaaatggcaaaaccccttctctattaaaaatacaaaaattagccaggtatggtggtgcgtgcctgtagtcctagctacttgggaggctgaggcagaagaatcccttgaacctgggaggcagaggttgcagtgagccgagattgtgccactgcactccagcctgggcaatagagtgagaatccgtctcaaaaaaaaacaaacaaacaaacaaaaaaaaaacaaaacacatgctggtgcacacataaatttggaagaaatgctctttaacccagtatgagcacgtggtattcttatcctcattttacagatgaggaaattgaggcacagacagattcaataactacgtgactcacagagataaccgtgtagcagaatcaggaattcagcccagttttttcagttgcacagcctgagctcctaaccatcgcgcctggggttctcaaaggctcgtccccaagcgacaacatcagggtcatctgggaacttgttagatgtgctcaccctcaggctcgccccaccccgccagacttcctgaaccagaaactctgggagtagggctcagcaatctagttttagccctccaggggattctgtggtgcctaaagtttgagaacttctgatcaaaaatgccagataagaaaaaaaaacctttcgagacatcatttgaatcaattatcaaatgtttccaaagtgcacttgctttgcaaagcactgtactactcatctctgcctccatcggagcgagttcaggagagttgtgtttacttttctaaaggagccttttccttcccattttaccagtgcccaaaagtcttagaaaaatgacaatgttcatatatttgcccacatgaagatagaaagtgtcatgtcaaagataaagggagaacagcattttctttttttacaagtcactcttacttaaacacacagcatgactctccttacacatttatttcggaagagcaaagtccgggtccccaggctcaactatcagccgccttctcatcccaagggctgtcaccaccagaaatttaacatgctgttagtgcatgcaaaaaaaagcccagtaattgtagggctcatcagtacattgttaattgatcctcatttcctattattttacctcaaagcaaacacatcattcaccatagtgacaccagagttgtttatcttctctgtgcaagtgtgtgctctttttagcaagctttttggatcctctgtttcagagggcctttcccatctgtttactattgtggactgtgctgctttttttgtttttaattacaggttatataaaatattgtcagcaggagggaggttattattaccttaaagaataagtggtagatgcggactggccactgtgagcccatcactaaaatgcacttccgtacactaaaggtccctcttccctggcagacagtggttcattttatttgaggaggtatgttgtgggcttggggaaacagaaggaaattggagacattgatatgcttcctgagaggtggaaggggccacttaacacagctttcatttttcagttgccagtgggagaggagctggggtgggcatataatgagtaacattcaaagctccttctgtctttttttcagagaattcacaaaacaactcagggcctcctggtcctgcaaaagtgtttactgtttatttgtgttgtttctgcttgttttgcttgccaccagctccctactcacttgggggaaaataacccatcaaaggaatagaagctcaggataaacgtttcagacctttcagtaagatagtaaaatttctttcattcccagacctctctccaaaagaggcagccatcattaaaagtttgttatggattcttccagaaacgttctatgcatttagcatcagttgcagatatggatagccttttcaaaaaatgcatgcaactgagactattggctatgttttgtttattacctactttttccatttaatagtatcttggagattatttggtaccagcacatgtagctcaacctcctaatactgcatgacggataatatgccatcacatggtgtcatttaatatattcattcctatttatagacattgaagttagatccatgtcttactattacacatgacttagtaatgaatgttcctgcatgtatatttggtctgcttgagcaaggatattgggagggaggatttccagcagcagaagtggtggaacaaaggcactgtgtacacctttgaaacaattaacttcaccaaaattactaaactgtcctctagaatggttaaaccaatttcctctctaccattcacacgtgagaatgcctgtggccccccagaaattatctccagcagcagcaacagagaggactggaatgccattgacaggtcccacaagtcagcaatcagcacgccattttttaaaatttatgttgctattgtatcgtaaggttcttctgaagcgaccacttcataacactgtgtagtccaatccctaagctgggcaatttttttttcccctttcaatacatcacattgattttctgtatgactttatctgcttaatacaaagtgggattgaacagttatttgtctggatttgatcattccttattaaacatttatgatttagctttcaccgcggcatcttcttgtaaggtgtttcttatttttatcattttccgtaaaggtaggattgtgttgacagccctgtaataaatgtctcttggaagagatgtgttgctgagaggtggggagggggtgggggctctgtgcatggaatggggggaaaagcttcagggaagggcagtgcaaattgtttctggactgatgccatcttttaataatagtagttaatagactgggtacaatggctgacgcccgtaatcccagtgctttgagaggccgaggccggtgtatcgcctgagtccaggagttagagaccagcctgggcaaacagcctgaggcaaaacctcatctctacaaaaaatacaaaaaatcagctgggcgtggtgatatgcatctgtggtctgagctactcaggaggataaggtgggaggatcatttgagcccggtagatggaggttgcaatgaaccgagattgtgccactgcactccagcctggatgatagagcgagaccatgtctcaaaataatgataataattgtagtagtagtagtggtggtggtggtggtggtagtagtagtagtgaatgccctgactttggggtttgcagtaagctaggattaagtgcttcacagtgaggcacagtggggagctactctgaggatgaattgcctagtaaataagtgaggtttgtataaccgaggccagatcttagaacctcctgctatctgtacatagaagaatgttttagtcagaggcaaggcaaggtcaccaggattcactgagagtgttggtcagcatttcatctgcatatacaggactggaaaataagagagcgcaatgagacatctagtttttttctctttcgtttgttctgtttcccactgagagaattttctagctttatgtggagaaaacagtattggaaattattactcagttcaagaaaacctcactgagcacctaccatgtaggtgctcatcccgataccactatcaggccctttggaccagttgcaaggatgcaggatgaggaaggcaatgtgagaaaacagaaggagcaccaggcagtcgtgggcttgatttttattttactattttttaaaaaacataaaacaacatacattcatcattttgctttctttggatgaagaattgagcctggttcagcatctcttgcaggctgtaattgagggtggtcattgactggggctggattcgggaaggatccacttccaagctgcacagttgttggcaagatgtagtgttttggtggttcctgggctctgggactcagctttttggctgttggttgttggctgttgccacatgggcctctgcaaaaggcagcttgtaacgtggcagctgacttttgtccaagtgagaaggtgagagtgcaagaattggtgagagagaccgcagccagggtgtttttttaacttaatcttggaagtcacatcctatcgctttggttttttgactgagattattcagtactgcaatagtctccctttaaagtggacaattcattggcttatcgtatagtcacaaacttgtgcagacatcaccactatctaatttcagaacatttttatcacccctaaaagaaaccctgtacccttcagccagcattccctattttatacccccgatctcttgacaactactcattgactttgtttctatgactttacctatttcgggtaattgatataaatggaatcatacaatacgtggccaactgacttctttcatttaatgttttcaaggtttgtgttatttcatgtattaatattatgttggtgcaatcacttttgaaccaatctaactaatacttcatccccttgtatggccaaataatattctattctatcaatatattatactttgtttatccattcacagttcatgtcattcccactttctggctattatgaataatactgcgatatgaacatctggttacttctggctcttatgggtaacacttctataagcgttgccacaggttgcttctgatttctattatgagtaatgctgctatgaacattcatatacaagttttagggcagacttctattttcattccaatatctctttatggcatgtcttagcagtgatgtctatgacatccaggatgtgtcttgacatgtctgacatcatttaaataaaaataaagtagggaaagaaaacagatagtgattgtgtgtgtgatcagtgatggcttttgaggaggtgacatttgaactacaccctgaatgaagagagccatgcaaagacctcagcaaagaaaatctcaagcacaggtgcagcaagtgcaaaggccctggggtggaaacacactcgatgtgttcaagggagagtaagtggtgaatgggtttggagccaacagggataatagacaacgctatcaagaggggggccaaccacacatgtgcagccactgtatgacgtctggattttccttgacttatggtgatcactattgggaggtggtaagcaaacaggtgacataatttgaatcatggttttaaaagacgccatggttgccatgaggaggacaatgcgtaggaggcaggagtgaaagctaaaggatatgctgggaggtgaccctggagttaaagagagcaactaaggtgaccaggtgacaataatggagatagagaaaacaggatggattcaggaaacatgaccacactgagcatattcaaatgtaattgtcagttttcgtgtctccctcccactggaccacaagcccctaactcttcatgtacacaccctgactcccagtgtgggctggccacccaggaggcacccagtttatgtgtgctgcgtgagtgatgtggaatgactgcccacgtaggaagtggcaggttggagaaaaagcagtcacagctcctggctgctgtggctgctttgagcttcttcctcgatcaggctggatcattaccagcctgtaccctcaaaggatgcccttagtcctgtcccctctcactagcagggattccaagcttgtaaataaagtctcccacttaaaatgtgagcagagtgaagagctggcagtgtcaaaactctgtgtccagatgttttatgattttcccttttccagatgagcccggtgtatccgtatcagtgtgtctaggaagaccaagcatgccgaacggccagcagagtagaaactctgtgtgcccatccattatgtactccctgaattaggctccttgaggctcaattattaaagtgggatttttcttaattattaacagttaaaaataggaaaatagatttcaaggggaaaaaatttgcaggcaacaagagtccaattctaaatgtgtgcatgtgcgtaaaacggaatttgccaaacatgaataggcacttacaatgtgactggaattggctctgtcatgtgtcagcctaatagcctaaaccctggttcaatacaatgaacttgggaaggtttgcttaatgaaagaactgacgttttctgtgcagcggctgcattcatcagcctgcatcctgttcattacactacaaagggctgccaatgggaattggtaggatcatctattaggtaaatgcgatggggacaaaagatagcagagcccggggctttgtggaattttctgtggtggtccgggttcctggagtagggagctgtgatgacgggcaacagatttccaagttggcacgcgggcttctggagtcacgggctgaattccggcactgccacatcttgccacgcacatcctaagggagtgtagagaagagagttttcagttatgcatgacactgccttacccattgtggattcagtagggatattcataactgtgaatttgaatataactattaaataattgaattattattattgagttactgaatataactattgagttttccctctccatctgggcacatgggaaggccgtactttcctgacatgtgatttgctgtggcgagtggaatctgggggcaagagacgtgtgtctccttgaggcagaaactttaacagattccagcctgctgcatcataatctcctttccctctaccacgctgactggcagtattccagattccgattgccctgtcagggtgggtcctagtggtaggacaaaagcaagaatcctgagctgacccaagacacacatggaaacattaattgtgcttctctgatgtggctttaagatacttgctctgtcgcccaggctgtagtgtagtgattccatctcagctcactgcaacctccacctcctgggttcgagtgattctcctacctcagactctcaagtagctgggattacaggcatgcaccaccatgcccggctaatttttgtatttttagtagagatggagtttcaccatgttggccaggctggtcttgaactcctgacttcaagtgatctgcccaccttggcctcccaaagctctgggattacagacgtgagccgctgcgcctggccaagatactgagatgtgggggccaggcacagtggctcatgcctgtaatcccaacactctgggaggctaaggctggaggattgcttgaagccaggagtttgagaatagcctggttaacatagtgagagccccatgtttctaaaaatttaaaaaaattagccgagtgtggtggtgtgccacagtagtcccagctactcaggaggctaaggcagggggattgttggagcccgggaggtcaaggctgtatagtaaactgtgatcctgccactgcactctagcctgggtgacagagcaagacactgtctctttaaaaataaataaataaattaaaaagacactgagatttgggggttacttgtaactgtgtcataacctggctccttactgccatcggcatgcctagagggatcccagttttacacatcagaacaacccaagccccagtgtgtcacgccattacatgcttacagcctatttttacaaagtttgaatattgtaatttgcctttaaaaaattgttttaaagatctgcctaggtcagcaaattttatttactctctagaaccatttgattggggtactgccttaagaaataaagcagattccttcagtcgcatgtgggcctggagtcactggaaaatgcagacaaaacaagatctgctgattggcaaggtcatcttgggaagggccatcgtgcagtaaagagcaggtccattaattcaggggggatttacatcagttccatctgcctctttcctaatgggactgtttggttgtgttctttcctggagagattagtgattgaaaggaggagatctagaaagaagagataaaagtttacatttaattttcatgccatgcagcgttctacgaaggcttcctaaggaggctccatactaaattcagacataagtcagaaggcagcttctcccaagacactgttgatgtccagggggtgacagttccatcacaaaagggggttaaaagggtttaggggaagtttagttgtcttccttttatctctaactctaaaacccaactgctggctgaattaaaagtctcttacataatggtcagaggagttttgagtatcggatctttgtgtacttgctttttaaattcagtcacgtcttaaatagtacttttcactctcctcctctccacaccactttatgtgtttgctagtagcttccatgaaactctatgggtgaacatgtctgcaactctttggcatttaaattttaggtttctgcccctcgtagcagactatctttctagaagcagagctgtaagtctcttttaacaccattttcaagcttggacaggctgacatttttattgaatgggttatctcaatatatatctacttttttgcatcctactttttttagaaaattaaaaatgatatgatgggtgtggtggctcacgcctgtattcccaacactttgggaggccgaggcgggtggatcacaaggtcaggagttcaagaccatcctggttaacacggtgaaaccctgtctctactaaaaagtacaaaaaattagccaggcgtggtggcaggcacctgtagtcccagctactcgggagactgaggcaggagaatggcatgaacctgggaggcagaggtagcagtgagccaagatcgtgccactgcatcccagcctgggcgacagagtgagactccgtctcaaaaaaaaaaaaaaaaaaaaaaagataatgatgaaaataatagaatattgatgagaacacccattactctgctcattgttcaaatgaactcatttgagagctctctcctttgtttctgtctttctctcgcatcagcttgcatctgtttgcctatgctataaggcatcagtggttaccaggcagtgttgcattttttccatcccatacctctgtgtgtgttccttatctgtttctaggatgtgccctctgccccgtcacatcacactctgtgctgctctcagccaaagctcttcttaaatacactagccatcaaaaccatacaacttggctgggtgcggtggctcacacctgtaatcttagcattttgagaggccgaggcgggtggatcacttgaggtcaggaattcaagaccagcctggccaccatggtgaagccccgtctctactaaaaatacaaaaaattagccagctgtggtggcacatgcctgtaatcccagctactcgggaggctgggacagaagaaccactggaacctgggaagcggaggttgcagtcagccgagatctatgccattgcactccagcctgtgtgacagagcaagactttgtctcaaacaaacaaacaaaaaacatacaacttaactctcatacccccacgcctgtcttttctcctgttcgacttgactcctcttgggaattccgtaagtactttgagggcaaggaccacaagataaatgtcgtaaggtaaccaggaatgacattccaagattccattctttcctttgtatatccactcatcattcattatattcttactctgggctaggccctgggaacagttgagtaagaacaagcaggaacaaacaattagaacatttagtgtggcaaggggcgtgacaaagttaccaagagaggtaggtgagagacaggagttgttatctgcggggaacaggtgaaggagtgacagcagggggtgaggataagaaggaggaagctttacccctgagaagagcaggcatcagatgggctttggaatctacatgggtgtttgtaggtagaccaccctggaagttgagtgatggggaataaaaggaagaaagtgcattctgaacagagggaatagcaggtacagcagctcagacatgggcaccttcagagcgtgtctgagtcttcctgatgagacacgtggtgttcacttgataactccctggcaggttctcttcatcgggcctccacatagggtatgcgaacctcttcatgtttttaaaagggagagatttaataaaggcaatttggtacttaaaaattgttagaagagctaaaagagtagttttgaggttgaccttcagaacggcttcctgaataatacagaagtgaccctccaggaaggcccttccactgaagctacaactggagctaagcagatggataagccaaaaccacctccgttgctgtggccccatctccaccacaaggaagctggagaagggaccccagaaccggaagacaaaaaacttccttcacacactcccttgctaagaggagaagccccaaagaagctggatatggcccttccctcacatttgctgtcccaagtgtcccatggcagtgcctaagcaattggtgggatggatttgtgtctataaacaaagttgcaagggagtctggaaagggagttttaactccaacttcttcaactagaatggtaggatccaggggcagcattgctccccaggggatgtttttacaatgtctgggatattttttagttgtcagaactggaagcaggaagaagtgctactgtcatctaatgggtcaaggccagtgatggtgctgactatcctacaatccataggacagtacctaccacaaagagttacctacccccaaaatgtcaacgtgcccaggttgagaaacgtgacctagctggaaggtgaacaggaactaaatgagtcagtttcagatatccaacacaaatacgtcacttgtttctgttccaaaagtattataatttttgtttgagctaaaaactagttacagttcattggataattgcctttcatcccttcaatatgtgttcccttgaaatttgcatccatgcatcccacatggcacccctattgattatttcagtgactcagaagacttcattattcaaaataatctctaataagatgtttagggagaaggaaaaataaagtttctctccacgttacgtttttttcttgcacatgtactgctttttcataagcacaatcttattaatagaacaagtcctctcaaaatggttgccttttctcccttcatcctcccccaccagtaatgtagagctgttatttggctcgtttttctttttcctccagaggcaggaagagggaatgaatggtggccaagaattttaaattcctgttcccggccgcccccggaagctccatctttgttgtgagggcttctctgcgtcagtagaggccagctgagctcttattcaccccttattctctggttccctttcaccagcaggtccagctctaaccacagctggagtttaggaaggccaggcagcgtgtgttgaatgccagccactcttctacccagggtcatatccttggatgtttttctgtgcatctgtcttttccgaccctcccgtgattctggaaggaaacacctttccaagctccccagtgaccctggttcatcccggaaatatgcaggaaaagcattatgagcattgcagtgccacatgctgcattggtgtgttacgttatgagaactattagggctgatctctgagaaacttaccagtggtgtgtgatcggaaatcatgtcaccctctgaatgtgggttatgggataaatggctaggtacacaggcttcagagtccagccagccccaggtttggattacagatggttgctgtactagatgaataatgtccccccaaattcgtgtctatctggaacctcagaatgtgacctcatttggaaataaggcctttttaattaaaaaaaaatttttatttaaaaaacagagatagagtcttgccatcttgcccaggctagtctcaaactgttgggctgaagcagttctcctgctttgacctcctaaagtgctgggattacagacatgagccactccacctacccagaaataaggtctttatagatgtaactgaaataaagatagagatgtgaatgtgatcgtactggtttagggtgggccctacatccaataagaatgtccttagcagagacagaacagagacaccgagagaggaaggtgatgccaagacagaagtaaagattggagtggtgccatctaccagccaaggaatgccaaggctgtggctacaccagaagctggaacagagcctgcaagcatttctcctgcagaacccccagaagggactcagcctgcagacactcagatttcaaacctctggcttcctgaactgtgaaagaataaattgctgttgggccaggtacagtggctcatgcctgtaatcccagcactttgggaggctgaggcaggtggatcacttcaacccaggagttcgagaccagcctgggcaacaaggcgagaccccgtctctacaaaaaataccaaaaaatgagccgggtgtggtggggcatgcctgtagtcccagctacttgggaggctgggatggaagcatcatttgagcctgggaggtggaggttgccgtcagctgagattgtgccactgcactccggcctgggtgatagcatgagactgtgtctcaaaaattaaaaaataaaacataaataaatttctattgttttaagacaatttgcctgtggccctaggaaaccagtatagataacttgtgatggtttagcttatttagtacaacaaccctgccccttctagtttttatgataacctcattaattgccggtactctcagagccctgattttcttacctataaagtagagattccctatctcatttggaggtgattttaaggcacaaatgagacagtgtatgtaaagcatttggcatagtgcctgattcagagtaagtgaccaataaatagctacccttactatttagaatgctattatttagaacataagtatatttaagaaagcaccatcagtattcaatttgccttgctaataaaaagggatcaagatatggattgtaaagtagaaaaatacatgtcaattaaatggatttacatcttaaaaagtggtgaggtagacacacaggcactactcacttcattccttctcatctcaacccgttaggatttggccttcaactgggtagtggaaaaaatatgatccttggcagtctactacgcaaaagcaggaacatcatctgcttttgggtagttaagagttaagtatcactttgagctacaggatcatgattaaaaagcattctgttatcttacttcacaactctccacttttgtaaaagtttaggataccggcagggcagcaaatacctttaaatgattttatttaaatgtcagatttaattaaatccatgaccagaagacaaacccaaaggaaattttcagggagctttagaattttccttttccatgttcaaggtgataaccgtagcataaaactgtcccaaccacatgcaaatgcaagcaggggcattcatcatgaaaatacagctctcaaggcggaagtgcttgttaactttgcactctatagccaagtgcgatgatcagaaaatacatacattgaagacaccagaaaatagtgtatggattggtgattttgactaagactggaatgtgggtgtgtgcactcctcatgttccggtttctgtgatcattcaggcatgcacaggtatcctgatgggtagccaggtcattaggcccagagtcggcagtgtagcatggcaagagaagtcattgcatctccaaactgtgcctaaattgcctgtaatgggttctttgcaacttgcagaaccagatcttaccatttgcaaggagaatagctgaaaagatacttaaataaaagtgatcggatgaaattttaaaaacgggaatgaccaaaaagattcccagaggaccgttactggtctgcagccccccattttagggtctggcatttgtactgattatggcctgacagctcttgagtttccaatgataacagccatctgacttgatcggagttctatggattttcactaaaatagaatcatcgccttggtgatggatagaaaaagtaaagcaatacatcctgataaatgctgtgccttcctccttcgtctctctggcggtgaccttgtgcaatccataagagggcaaggctgagagccccggccaccgccgccgtgtgtcagaacttggaaatttaagtagctttgaaacccgtcaatggggtgaagggggaatggcctgagaaagcaatggatcatgcttagagggctcagagggaaatagggtacgctgaaggtcaacgtgcagacatgtcctgaaggaacagctcaagtcctcattctcattcacgggaggctgcggccctgtgaggtgagatcagtagaagagtacaataaaacaggaattttcagagcatgtaatttcttcttggaagtgaaaggcactggagaatggtgcagaataagcactagccttagagagaggatgccctgccccagtctctttctctgagtagcagagagctggctgtgctaggaaactcttcgcctctctaacaccacgtttattctccagcccagttatcttagccaactgtgaacattttgaacactgttgatcatcggtaatgacaccagcaccataacacgaaacccctctaaaacagggcttccaggaaactcacagactagttacatccccaagccttgcatacttgattggaaagagaagcttctggatggttgaaggggaaaggagttagacgttggcaggcacccattagtgttggttacgacttgctaaaagaaaatattaagataaaaattagatcataaatttggagccaccattacgaagcctaaagtgcaaattgccaaacaagtcaagagactcattagcattttatgtaaatcagttattactgttctccacttccttaattatccatgttatttcaatacaaccctttctttgatgtcccaattctatatttaaatagtgcaagatttctatcgtatcctcccgcagaggtttgtgccatgcaaaaaacatgccaagagcagctattttagagactacagggaaatgtttaattggttcatcccatttgagttatgagggtgtattactgagcacataaaatcagaaacatggaaagtactagcttggagaagtttactaaaacctgcaagagaccgcttgaaattttgcccccaagactttttggattctcgatgggaaccgactcaaagagaaatttcgcaaacttcatggaattttgctaagtgattgatttataattgaaatatttggaaataaaatccaacagctctctttcctttggctcagagacttattgttttggttggatgaagagaacacttgtgacagagggaggaacatagggtgcataagagagatgtggggaagcactccccatccaactcgttccaaccagttcatcttttttttttttttttcttttttcgagaaagagttttgctcttttccccaggctggagtgcagtggtgcgatcttggctcactgcaacctctcccttccaagttcaagcaattgtcctgcctcagcctcctgagtagctggaactacaggcgtccgccaccatgcccagctaatttttgtatttttagtagagatggggtttcaccatgttagccaggctggtctcaaactcctgacgtcaggtgatccaccctcctcagcctcccaaagtgctgagattacaggcttgagccacagcacccagccagaacttcatagtttactcttattattttctcctaaccactaggttccacacttctggccacctgcctttatctcctgccccataacctaacctgttttaaaatacttattaaacaaagaaaaataaacaagaacaaatggagaatctttcactatgactgcaactgaaaagaggagtaatggaaggacatgtactcttcccatatatttttaaacaattactgtatctgatttttcatttttcattttttttttttctggaagaaagagcagatctggataaagtcagtatacaatgtggtctttggtgacagacccaagttcaagaccaaggtgtatgcatgggtttgttcaagttgtctacccttattatcccctcagtgaaacatgattaaccatgcttaccttgaagagttatcttaaatatttgtgttaatattatatatgtacattacatggtaagtgctaagtaaatggtacatgtgagtctttgctctaggcaaggcgctgtgctgaatgtttacatagatgatcggatcctcatattggatcctcaaaacgttcatcaaaatgggtaggattatttttatgtatatttaacaggtaaggaaaatggggtttctggaggtgagtgactcactcaagatcacgtggaatcaagcagagaagctggggttttaattcagaagttctttaagctacagctgtaattgagacaagaaccgtacactgtagtaagattaatgtaaagatttaaaaaactgttcatatcgttcatctacataaataaataatatttacagaaactcatctctgcagactaaagtactttaaatatttaatctaatttattggttatttatttaacaaatacttttatgggccttgccatgttccaggcacggttgtaagcacttacaactagtgactcatttaaccatttcacaaatatttattttgagagcaagcacgggggtttatgtgatggctccacagagcagtgaaaagactcccgccctactgctcgcaacctcagatgtccctgggcactagcccatctgtatgtctttaaaaaaaataaattaaatttttaaaaacatgactttctggccaggcgcagtggctcatgcctataaccctgcacttagagagggcaagacagaaggattgcttgaggccaggagtttgagaccagcctgggcaacatagcgagaccttgtctgtactaaaaaattattaaaagaaaatatatatatttttttaaatcatgacttttctgatcatacctgtggcatactcattatagaaaatttggaaaatgtaagaagtcataaagaagtgggaaaaaatttaaatccttctctgtcccaccacaaaccatttaaatcaatccaagattttagtggaaagggaaagcatatgatctagtacaaagaattttttttagcttcttctccgctgcttgtttaagaatctcagagtaatccagacgttactactccataagcaaatctgggacagtaatcagacaaccagacaaccagactgagagcccccaagggttcaaattcctgagcgccgtgtcttctctatagcttgctgtcttgttctatttggatataaagctaccatcaagcagaagaagcgggatgctctctacagagtccgaaacaaaacacagaaaattaacctgctaccatcctctaaagaagcgagggtctcagactttgtccccttttgttcctgcattgccctccattcagatcttgtcacttaggccttggtagcatgagctattaacagccctccatatttactatttttttttttttttttaactctgggagttcctgttgcagaaattggatcacttacctaaaaagctccccacccccacctttggtgactggtgggtttcatcaccaggaaagcacattgttccaactcaaagtctacagtctaaaatcatcatcatgtattttcatcaggatgaaatatcgggcactctgctcagtgcaaggttttattaatgatgtgctgtcaggggctggatgttctgcatatttgcatattaaacagctgagtgaagaaacattgcttttattgctgcagggaataaatcagtttaaagcaagttctcatcatttatactcgtttcagctaagtcttcttttattgaaataaattgttgaagtgctttgctcattctttgaatactgatgaactttaccttgataggacctcaggaaaaataatattttcttaaaggtgcagtattgttccatttttgagtattactttaatacattattgataagttaatttagaagtatcaagtgaaaggggaagaaaaacagttttgaataaaaacggtgtttcctctggactattttgccaaatgcatttttattggtagaacgtaagcaaatttaaaaaagcaacaaaagcagtttttatgaatacctagcgtactttttttttttaatgaaccatgagctgtttttgcattcaaattctcgtaggcattatattgcatctacacataaggacacagtgtttacagaccccaaagcttgctgtcccctgggcaggtgcatgagggggtcccaggcaatcaggctcttctcaaacctgaattatacccggcctcagggtataggggtcaggcagctgtttgacaggattcttgcaaatgtttttggtttctctgtctactcattacgtacactctgccagaggttgaaaactcaatgttgagattacatacatcctgaaaacactgtttaaataaaattttggcctgcatcctgtttttgaaaacttgcaatggcttgccaacgttttcaagttgagaagtttcacaaaaaaaattcggatttccagcttctttcaaaaacacaggtcaaacatcctgagcctgttctgtggtcagttactcattagcagcctctgctctaggaggaatagttatgggtcctttcagacatgcaacccccaaaactccatgttgtttacagtgtgggacacctgactttcaccttttatgatacctgcctggggcatgcatgtggtgactttttccatctctggtctctatcttatctcttgtgatgaactcaggtctataaagcatttgggcactgcctggcacataggatatgtccagaaaacactagctggtattaaaacagaggaaacatgggaactgagggtggtcagtgacatcacattgtatttcctttatggtgtccttctgagtacagaaccaaacatttcttaggcgtacaatttcctgcctccaaattaatgttatttctaaaaagtagcccgttccactcctacaaatctttgcccaaatatgtccttttcagggatgacatccttagccactgtttaaaatagcaaatttctttccaaactctgccgtccctgaatctctaccctgctttatttttctccttagcagacatcatttctctgtttaatctgtctacttgctaattgtctcactgccctccccctccccactggagagtgaatgaaggcttaaggttttgtctgccttggtctctcctgggtcctgagtaccagtggccttacgtggcatttggtagattacatgcttaatgaaaagtgagtgaatgggctgggtgtggtgggtcacacctgtaatcctggctactcaggaggctgagacaggaggatcgcttgagcccaggaggtcaaggctgcagtagggtatgagcgggccactgcacttcagcctgggcaacagagcgagaccttctgtctaaaaatatttatctatattgagtgaataaatgaatgaatggattattttagtttggcctcaatctttatagaaactcaattcaacaaacatttgagcacctgtttgttcagggccacgtgctggttgcaacctggaaggaaaagctgggcaaggcggagatccagtgctcaggaagctgagtccatgccaagatgtgataattgtataaagaactacaataggcataggtacagatctgtaaaatatgaaaacaggaaaacacatggagtcttggagggtagggaagtcttgatgagtaagattgggtctgagataaacctaaaagagggtcaagattttgacggagggctggaagggaggaacgataggaaactgaccttttttcagatctcttcttgtgcgtggcctggggttaagtgctttacatgcatcccctcattgacttctcagagcagctccataaagagtccctgtgcttcccagtttactctggagacgactgaggctcacagaggttaagccacctacccaggctggcaccgcacactttgttcagagtgggcctggcatacggcatcagttcagcctggccctagacccttttcctcccacaaccatattgcccccagtggagagacaggaaagcagggaagggggcaattgccaagcctgtttctagaatctcaaggatgccatttggtgaagctgaggctggtgcagttactctgtggagacaccagcgtcttggacctagggatggattcagggaggattgtgtcccccagtgacctgctttgtgaaaggtagagaatagattacaggtgcccgagatcctagaacccgtttcttaccatgatggcgttgaggtagaggtagaaagatgggtgaggtggctgggtgcagtgggttgcgcctgtaatcccagcactttgggaggccaaggcgggtggatcacctgaggtcaggagttcgagaccagcttggccatcacagtaaaaccctgtctctgctaaaaatacaaaaattagccaggcatggtggtgtgggcctgtaatcccagctacttgtgaggctgaggcaggagagtcacttgatcccggggggcagaggttgcagtgagccaaaattgcaccactgcactccagcctgggtgacagagtgagactccatctcaaaacataagtaaataaataaaaaataaatataatacagacacaggcttttctccccacctcttttaattcttgaaaggaacagtaacaagctcctattcctgtttccttgccaggagaagtattgttttcatataaatcatttgtgacagaagctccttatttttaagtggaaaatgcacatttaataacatgagaataatgtccaaacatcttctcattgatggctgccaagagaacagcagcactcttgctgcctgcagaaagagacactcagagtcaactgttttaggggccatgctgtcattgctgccgcatttgcttaggtgggctctgagcagcagcttcccagacactccgtaaccaatggcagctgagtgcttttgtgccttgcaaatcctctagtcagagcagacctggcttaggaccccagccctaccactaactgactccatgcgctcctatcggttctttattttacctctgcaagcctcagttttctcatctgtaaagtagggataacattagcttcagccctcacaggcttagagtgaagtttaaataagaaaaggtatctaggctgggcgtggcggctcacgcctgtaatcccagcactgagggaggctgaggctggtggatagcttgagcccaggagttcgagaccagcctgagcagcataacgagacccgtctctgcagaaaatacaaaaattagccaggtgtggtggcatgcatctgcagtcctggctactcagaaggctgaggtgggaggattgcgtgagcccaggagttcaagaccagcctgaacgacgtaaaaagacctatctctacaaaaattagctgggcatggtgtcacgtgcctgtagtcctagctactcgggaggctgaggtgggaggatcgcttgagccccgggaggtagaggcatgatcatgccacttcactgcggcctgagctacagggactctgtctcaaaggaaagaaaacaaacaaacaaaaagccatgtagagctgggctatccaatacttgaaggtagccagtggacacgtggggccatttcaagctaaattaaattttaaataaaattaaagattcaatctctcactcacacattacaagtgctaaacatccggacacatctagtggctcccactgtgggtagcacatacagaaagaacgtttccgtgacagtagagtgtcccattgcacagtttgggtatggagcacttagcccagtgttgggcacagtacctgctgtgatggttaaagcttagttttattggccaggcatggtggctcatgcctgtaatcctagcactttgggaggatgaagtgggaggaaagtttgagcctaggagtttgagaccagcctgggtaacatagtgagaccctctgtctacaaaaaactaaaaaaatttaggccatacttagtggctcacgcctgtaatcccagcactttgggaggccgaggtgggcgcattgcctgaggtcgagagttcgagaccaccctggctaacatggtgaaaccccatctgtaataaaaatgcaaaagatagttgagcgtggtggcgcatgcctgtagtcccagctactttggaggctgaggcaggagaatcacttgaacccgagaggcggagattgcattgagccgagatcatgccacagcctgggcaacagagcaagactgtctcataaataaataaataaataagctggacgtggtggcatgtgcctatggtcccagctacttgggaggctgaggtgggaggatggcttgagcccagaggtagaggctgcagtgagctatgatcttgccactatacatcagtctgggtgacagagcgagactctgtctcaaaaaaccaaaacaaaggtcaattttttttccacattcatctataaaacaataaaggaaacatcctagacacttgaatcagagcccttttaattatgacttcaaaaaacagggctcgtgccacccaagatttcctccatatacaaaaaaaaaaaaaggaaaaagggaagaagcaaaggggcaatacagggctctgcccattagaatctctagggacagaccgaggtttgagagttcctgctcctgatctcaggggaatcctgaattacaggtgttaacctgattatccccagcccagctcttcgttaattacctgaagtgaatgggacagtttccaatactcagcacaaaggcgtgcgcagtgactctgtggcgtactatctatttggccttggaaagttactctctaagtcagggcttcttttcttcaactttggtgtgagactccgctggagagctggttagaaaaacacaagtctcgggccccaccccgcagagcccctcattctctagttctgggttggggcccaggagtctgcttttctagcaagcgcccagatgtcactgatgcttacagctctcagaccacagttggagcagtgatttttaaaagtcttttcatttgtaaagagttgttctccatgctccaaatgactgtgacgactgagaaaatgcatgtatgtaaagtctgcagctggtgacattgtagacactcagcaaatggcctttggtgttactgttattttatttttactaattattttttacacctacaaatcaggatctgctacaatcgcttgatatttgaaaattgggcctaacccactatgccactcttctgtcatgaaataacaatcttctatttaaactagtaaacttaatagtttaaaatacttggtagtttaatagtttaagtagagccactgaaagatggctcacacctttcagctcagtttttttgtaccagtgaggatgaatgtttctgcatgtgggtagttggcaccagtcttcaatgaattatttttcctttagccgggtctggtggtggcgtgtacctgtaatcccagctacacagaaggctgaggcaggaggataccacgagcccaggagttggaggctgcaacgacttacgatcatgccatggcactccagcctgggtgatagagcgagaccctgtctctgaagatacaagaaggccacatgtggtggttcacccctgtaatcccagcagtctgtgagactgaggcagaaggattgcttgagaagtttgagattggcctgggaaatatagcaagatcccaaccctattaaaaaattaaaaatgaaaataaaattttaaagaaaggtatttctccccttcacggtaatttggagccagtacttcttgcaccattcatttgtccacagcatgggacaaaggataatgccttaatgcctgctgcaaatagaacagtggtgcttagcagctttagataatgcattgtaggtgttttgcaaaaacatactttcgtgactaaacatcataagctccaagtgagtgatttccccgcgtaaatgaatgattctgtgaggataacacttctaagatgtgagatttcaataaatgaatctgtaggctgctgtgatggatacctttggtggggtaggaaggatcgtcatttagaacctgggttctgactccagatgacttgttttgttctatcccagaaatattcctaaaatcgatttccagtttccaaaagagcaggtaaggaaaacactgagtgttacttggtctttaaaattttttttaaattcatttttatttttaaaaaatagagacaaggaggtgggcgcggtggctcacacttgtaatcttagcactttgggaggctgaggtgggtggattgcctgagctcaggagggcgggtggattgcctgagctcaggagttggagaccagcctgggcaacaaggcgaaaccccatctctactaaaaacattaaaaaaaaatttaggcgtggtggtgtgtgcctgtaatcccagctactctggaggctgaggcactagtatcacttgaaccggggaggtggaggttgcagtgagccgaggttgtgccactgcactccagcctggctgacagagggagactctatctcaaaaaaaaataataaaaataataaaaaaaaaattacatgaaaaatagagacaaagtctcgctttgttgcctaggctggtcttgaactcctgggttcacgtgatcctcctgcctcggcttcccaaagtgctgggattacaggcacgagctgccacgcctcacctcttgttttcaataccattgataagttgtggtcttcagggacttgtgggcattttcaagttaaatatccaacagtcgtgatttagggcatgaagagctcactcatcaagatgtatgtaattcagattttctgagtgtttaattcggcgtctttggtcacaaggaacagagttttacttgtgccacctcttctaagaaaaaggtttactgtaagagataatgttggcaagctgaggaaaggaggcagttttgggtaactgtctcttgcgatcccctcctgcacaactgtggcgttctctttttctgactagctgattctgctgctgctggatttattcattcttctccctcacagttttggctcgcacatgcttcctttttagctcatggccgtgcagttcaactcaacctcatggcatctttttatcagctgtccctgctgcaacaggcttagagttggtttcccaattccctagcgcagaaatccactggcatgagtcatctttcccattggtagattgcagagcaaacttctggacagatttgcccttggctcatgtatgattggacctgcggtctgtccaggtgtactcagagtggggaaggggagcggtggcaggtaatacaaaacccacctaagtagaaggacctatgaaccatgagggttttccttagcagggagtgccagtgggtagggatgactggttttgcagtttagggccaagtgagttggaatgacagctgtggcgtgttgagtcagatcaagtccagaattcctctccaccccacccatttgcagttccctcagatttattacgggacctggatgtgatgcaagcatgcccgctggctcaggctgtgcctcacagctgcaacatccctggggtggagaagccatgtgggacctcacagaacactccaccgtccctgctaatggctgagaaaggactctgccctcatggatggggttgggggacctgttatcttcttccaggttaatcttggtttcagctgctttaaactctactttttagtgggacgcatcatactgaactatggaagcaccatagttgtcacctagttgagcttctctttgttcccatatgtttcagtgaagcagttatagcttcagaaaagagggagccaggaaatacacttgtaattcatcactccttttatagtcagagcataggaacactcatagtatgtatcagaaactagtgaacacatgttgttttacagctctgtctgcaaaattgcatcgtgggcctctttggggagtgttctcaatgtgatttttattctggggtgtcctttggccacaatcctcaggattattttttctctgtgctgttcactgtaacatcgtccaccctctgagatcttgcttttcagtctactggtatctccacttctctctgcagcgtgatgtctagtcagagtttccattctgtttttatgaccctgggaggactgggagagatctgtgaggtcatcttgtccaccctcagccagggcaggagtattccctaatggtagagtcaagtgtttggtttggtcttgtttctaatgactcaagtgatgaggcctggggacgtcccttgggaagctattctgcagcctaataactttcattctgtgatttttttttgtatgtgtctaatattcagagtctgacacaataaggccataaagagctaagtctgtctatggtagatcttcacctgggaatgttctcctaatagtcacttttgttataaatcttcacctagcatgggagttaagtgcattttaaaactagacctggggactatgtatcctaaaatgcaaaaatagcccccaaaatgaaaattaatgttgagaatctagtcaatctgccagcagtacgtacataactgttctgtgtatatttcacatggccatatatgttttgcttgtgtggtgctaaatgcaaaggcagagaagcttctgctattgaatgcttagcacagaactcctgtcctccctctttgaaattattccgacagttgcccctcatttggcttgccaaggagtaagatcttggcttgtgtgtttctcccatgtgtggtgtatctgtaatctcggtcactgttgagagcctggtgggaggctgattattgttgagggaaagatctgagagcagggccaagaaagggaaagagagagagaggaaaaaaaacaaaaaagaaaaagaaaaaagagaggtgggtagggagggaggagagacatggacccacggggaatgggaagagaaatagaaatagggaatttgaaatggaaataaaacaaaagggcaggaaaggaagaaataaagagaatgagataaaaggaaaagaaagtgcaagtagatttgggatctatagattggggaaagacattcatacagtcaggaccagatgttcactggaagttttttccttctggatccttctttggctataggaatctggttctcaaagtgtggctcccaggccagcaacaccagcatcactcagaaatctgttagaaggccaggcgcggtggctcaggcctgtaatcccaggactttgggaggccgaggcgggcggatcacgaggtcaggagatccagaccatcctggctaagtcggtgaaaccccgcctctactaaaaatacaaaaaattagccaggcgtggtggcgggcgcctgtagtcccagctagtcgggaggccgaggcaggagaatggtgtcaacccgggaggtggagtttgcagttagcagagatggtgccactgtactccagcctgggggacagagcgagactccctgtcaaaaaaaaaaaagaaatctgttagaaatgcatattttctgttttcaccccagaaatcctgaataagaaacactaaaggggagtgggcccagctatttgtgtttttggaggaactcctgttttaatttgttttttcggaagtcctccagtttgagaaccaatgataaggacatttttccgggaatccagttgttttaggaaaggcccagtaggcatttatgtttataagcaactccaccctgcactccatatgccttctgtagctatctaacagagacagagttgacttgcagaaactgttttctctggccaggagacaggcttcgttttcgaaactcacccaggaaggcagtgttcttcttttcaaaaggcatttttctgttgactgtgcatgaagccacatagtaataaacagtttccatatccaagcagctaaggcttgtgccttgcaagttaagtggaacatcacgatctatatctcagttttccttatgtttccccagttggcacatcatggccaacaagagagtagggatcattaaggagtttattttcatctttattttatcatttaaaacacatttttttttccaatgagagtactgatgacataaaaggttatacattgaataaccacccaaattagcagtgtttcatatttacactgttcaacacagttctcttgtctctgttcatgatataacagtaaatccaagttgctttaagtagatattggaaatatgaacccaatatgttcttaacatctccatgtcgtaattctaatttaaaatcaaaatctcatcaaattacattttagattaaagcattgtacctatcgaaagaagagaatcgaaaatgcgaaagtccttcattttcagtgtggcctgagattgttgaaggatttgttctattgcatgctgataaatatttatcacggttaagtgaacaatcatttggagacagacaccattttatgatgcagcttctcagggcgtcctaattgtgactctgccttgccattctatgttttatcggaatacgcagacatatactttatgaggttgggtaatgaagagagagagaccccaataaacatattttctaagagtaatggttatctatagctcaggaacccttggttagcacagcctctattacacagtactaggcaagcagttcatagctcaattagatctaacttgcttcatttttaggcattatgttattctaaattaacactgtatttcatattctccaggtctgactattaaccagattttggaacctttagggcttattatttagtaatccctgaagctctcaagtaggcgtttttaaattcatgcattagaacagattaaaaattagctagaaacgcatgttaaatggcccactccctttcttttgctaattgtgctagaaatgaaaaagaaaatgcaagtgaggtcagatctagtgtggtacaaatgaacttgctacttggtttgctgccaattgctgccgaaacaggagttatttaaattagtaaataatttttgaaatcttcttagaatgtcacaggccacaattcaaattcacagaccaggaatggttattatttctatatatcttaaagttttctgcaatagaaatgcatttcaaatataagctagaaaaaaaaaatgtgaggccttattgtgtagataaaagtgacaagatgtccaaatgttttgaaacgcagtgatttatttaagttgtagaaagcttggttttatttcttgttgcatcgtctttatccttagatcttaatcagaaataggaaaattttctgagagaaaattcacgagatcattcatgatgagtcactatatcagttactttaaaaaaaaaaaaaaagatcctgacaaatcctactttttcaggtcctgatgcactaagtctcattcacttctttctatttttcctctctctattgcatattaacccaccatattgagagaatagaaacttttgccttcattatatcacctttacaccccaggacaggtgccctcctcagcggagacaactgtccccctccatcctgcaggagttttgcagccatccttccagccactgcttctctaccggggcaaattttcccccaagggataattgataatgtctgaggcatttttaattgtcacaacttggggaaggggcaagggattgagggagagtgctcctggcatctggtgggtaggggttagtgatagggttcggctgtgtccccacccaaatctcatcttgagttgtagttctcataatccccacgtgtcatgggagggacccagtgggaggtgattgaatcatgtgtgcagttacccccatgatgttttcatggtagggagtgagttctcacaagatttgatggttttatacgatgcttttcctcctttgcttggcacctctccttcctgctgccgtttgaagaaagacatgtttgctttcccttccaccatgattgtaagtttcctgagacctccacagccatgccaaattgtgagtcagttaaatctctttgctgtataaattacccaggcttgcatatgtctttattagtggcatgagaacagactaatacagtcagggatgctgcagaacatctccaaacacacaggactcccaccctctacttccaccccaccaacaaagaatgattcagcccaaaatggcagtagtgaccttgttgagaaatgctgttcaagccatacgtcaccattggaaggttgccaaactgtgctttgcacacacatgctgtctgcacgccttgtatttttctctttgcttagtcctgctcatgctctctaaacaccccagacatcatatctctttaagaaactctggctgagtcccataatgttctggggcaacttctgtcttcccttttccctctggcaaagaatccttgaccaaactttagctcagctcctcagagcccacttctcaactagaccttgaccttgctcctctctccttgctggatcttcatagtccagtctttgtaagagtcattctaagtcagtctagagagaatcccttcacccttcatgtctgatcacccttgcctgccttcagcaaaaatcctgctaacttggttaagttggaatactcctacccttgtggttccttgtagtaatttgcatccactgaccctcccactcccctgctactctgttccttgactataaatctccagctgtctttattatatttggagttgagccctatctctctcccctattgcaacagccttgacccctgttgaaataatcctgcataaagtcttccttaccattttaacaaatgtcaaggtaactttgttttttgttttttttgtgtgtttttttggagacagggtctcactctgttgcccaggctgcagtgcagtgatgcaatcttggctcactgcaacctctgcctcgcaggctcaaatgattctcctacctcagcctcctgagtagctgggattacaggtgcccgcccccatgcccagccaatttttgtatttttagtagagatgcggtttcaccatgttgaccaggctggtctcgatctcctgacctcaggtgatccatccattttgggctcccaaagtgctgggattacaggtgtgagccaccgagcccggccaggataactttttaacaaccccccctccacactgccaactttttgaggaccatgtgttgtgtagggccggatatagtgcacatggtgaacacataaataatgtttgttggccaggcgtggtggctcatgcctgtaaccccagcactctggaaggctgagtcagaacgattgcttgagctgaattgttcaagactgccctgggcagcacagtgagaccccgtatctacaaaaaataaacaaacttagccaggtgcggaggcattcacctgtattcctagctactcaggaagctgagatgggaggattgcttgggccctggacgtcaaggctgcagtgggccatgatcgtgacactgtactgcagcctgggcgacagaatgagaccctgtctgaaaattaaaaaaagaagaagaaatgtttattgaatgaagacatgaaagcatttggtggaaatagggcacacacatgaatatattcacagttgcaaactcagaaggatactcccaacctggttctttgtcttgtccctccatctgggtgctttccagtcacagcctggatgcatgtatgaataaacttctaccattaagtccctgaattatttaagcactgccagtgattctatataaaccgttcagtaaaatgaatggcatatgcgtatgtttcaagagctccagcagcctacccaggatggcttgatgttgtctcttagcaccgtatcaatacctgggggttttcaaatattgcaggtggccgaagcctttgtgttgaggtttctgtagtgtttatccatttgtgaaaccaggcctcaatctatatgtccaacgccattcgtagaccccctttgataatctccactaagcagacatactcgatacatcttcactaatgagttctgacttcataaaatgtattaatgacttctttttgaaagtaagagtgctttgaataccagtcgttattgctttagaagttcataaaagcaaaagcacagtatttcccccagtgtttgtgcgataagagaatagatgtaggtccagcgcctagaattttagctatgcttctcttgtttgtgattccaggtttcagactgcctggtagaaggaggtcacttctgattgtcagtgactttggtgagttcttaccttgtaaaagatttacaattatttcattttcaacatagctttatcttatgacaaaggtgacagaaaggaaatctcctaagttggcctacagggtgctttagaaaacatctggctgggcatggtggttcacacctgtaatctccacactttgggaggctgaagtaggctgaagtgggaggatggttagagcctaggagttcgagaccagtctgggcaacaacgtgagatcctgtctctacaaaaaataaaaaaaattatctgggtatagtggtgtgcacctgaagtcccagctaactgggagtctgaggcaaggaaattgtttgagcctaggaggttgagagtgcagtgagccgtgttgctgccactgtactccagcctgggcaacaggacaagaccgtgtctccaaaaggaaaaaaataataaagcactgtctctctctacccttgcagtatccctgtaggagagagttactattagctcccagtttataggtgagtgatatggtttggatgtgtccccacccaaatctcaacttgaattgtatctgccagaattcccacatgttgtgggagggacccagggggaggtaattgaatcatggggcccagcctttcccatgctattctcataatagtgaataagtctcatgagatctgatgggtgtatcaggagtttccgcttttgcttcttcctcattttctcttgccactgccatgtaagaagtgccttttgcctaccaccatgtttctgaggcctccccagccatgtggaactgtaagtccagttaaacctctttttcttcccagtctcaggtatgtctttatcagcagcgtgaaaacggactaatacagtgaggaaatccatgtgttaggaagggagtgtggttgtacttcaacctggaactgtctaactcctaaggttttattaatatctagtccatttctctcaatctaatagtaaatggaagagaagcaacaacttttgttttccaattccttttgaacatttgaaaggttttctgaaaggacttaaagaaaccatagcttccttaccagttcccaaagcttcagtccttaccaaagtgtacattgcctttaaggagatttgtttccatcaatccctcccatttacaaggaattacagaagagtgatgcccccttcaaagtggctcacacctggctgacatctgttcattaagaatgcctgcctttgggttctaagacgtccaaggagctcttatgggtaacacctgtagatttatagacgttcctctctgactgtaagggccatatgcctgaatctctcacccccatgtttataaaacttaacaattgtggaagcaatgaattgaaggactagggtcaccagtggagtcccataaataggttgtttatgatccctgtgaaacaagaagaccctcttaatttcatgcttcttaaactggggtatgagtggccccaggtttccctgttgggggtactgataccagagttcatttgaagtcattggaaaccaaggcatattttcttaaagagacaactgtttttggtgaataggccatgttgtttatagtaaaaacaaacatgaatattctgtaatagaagatatcgtttgcatggtgttttaaagctaaaacttgagttattaaacacccttctctccctggggatgccttttgctatggggttgcatccacggaagagtttgaaagcccaaccatatggacatcatattattcatttttatttgccatccagagcttgccagcaaccttttagatctctttccttggaaggttcagcaagatgcttgtaaatgtatgttgctttgttgcagacaatgtatatttaaaaagcaattatttgcccatctcttgttcaactcagatattgactgcctttctgtatttctggctgggcattgtttatctccacctcatggtttttactatggttctagaggtctagcctacaaagagaatgcttcccgtccccaccactacccacaggaccctctgcatatctcagaggaatttctcagtgttccagttaattttctctctgtttcctttattacttctaagttccattgcaaaaatatgctgcctgctctgtcagccaccctatatgcctatttagtcccagttttccagcttctatttttttccacataatccctaaccatgataatacaaatataatagaaataattatgtttgtttaaaatatacacagaaccaaatagtcatagagtagtatttcaggtggggggccctcctctagggcagtggagacaatgtcacctgtcgggaacatttggcaatgtctggagacattgttggttgtggtgcggtgacataactattggcatcgagtggatggagggcaggtgtgctactaatcgccctctattgcacagggtggcccttaccacagagaactatgcagctctaaacatgcgcagccccaaggctgagaattgttgatctaggggaagatgtgatttcattcttcatgcttgtaaattattatttaagctgtgaataccctctcttttcccactgaagttgtggttgtaagattctcagagttaagcagactcggcaacattacagaaaaaaaatcaagatgtaaaaaggatttagacgtctggacgtggtggctcatacctgtaatcccagcactttaggaggccgaggcaggtggatcggttgaggtcagagttcaagaccagcctggccaacatggtgaaaccctgtttctactaaaaatataaaaattacctaggcgtggtagtgtgtgcatataatcccagctactctgtaggctgaggcaggaggcagaggttgcggtgagctgagatcgcactacttcattccagcctgggcaacagagagaaactgtgtctcaaaaaataaaataaaataaaatggatttagaaatggtacagtcagaggttaggggtcgggtcaaagcgatccccccagagacctgtggaaagtgtggttctgtctacaagctgcgaccatggtctttactgcttctgcaaatacttgacaaaaagggccacactcttagctggacttttcctccctttcctgaaacaatgcccttcccattgtcaaggcagaagcagcctccactgagaagcgtcagacaccacgtcagtcttgctttccattgctttgctccagtatccatttgaaattcagtgcaaacccataaattccactttgcctctggtagcagcctgcatggtgtgtatattgaacactagaaacacagtaaatccagcccatttattcacattaaccagcaaaggcattctgcatgcccatgtaaatactggaaattactgacatggccttctagaccatgaaaagacagaagcatatggcagaattcatatgtgaacagattgctttttctcataagaacgctttattggaatatcaactattacagctttttgaagttactcttcctgctcttgatttaagtcctgaatcaccccactactctttttttttttccgctgcattctgctatgtatctttacatctgcttcctgcactttctaaatggcctacttaaaccttgaggtaggtccttcagtttcccataaattaataacacatctatgaatatttcccagccagtcttagaagccccagtctattccaataccaggattgtaaacacagggaatagatgaagcaagctgcttctttcaaatgctcttccaatatgaagcaaaatattattgatctagactgcctgctactttcatttaccatgttactactcgtgggattacaggcacaaaggtttcataaatttcaaatgaaatatgaacatttgttgtcaaagtactgttaaggtatgaaaaccctgctagtattagttcccttttgttattattctattattattattattattgtgtttacatccacaggcaatcacatattttaggttgtggggagcaaagcagcttccccccactttttctctcactccaatttgaatcctcccatatgtccctccctcattttttaagcaggaaacaatgaatgagtttttgctcctcttgccctatttgccgtgtctcttttctgtgattcgggagcacattgatacccttcttttggagcagagaagcttgtctttcatgatagaagtaggtcatgggggcggttagctgacttcatcagagagtagcatgcagatcccacctgtgaggctatggtctgccaaggagagttcagcgggctggatcagagagagcagagccatgctggcaagtcggagtctttgtggaaagcagccaaggtcacagctggaaataaaactgtgtattccaaatcagaggggcaatgcaggaatggatcaaaggaatgaaggatcaagttgtcagccaagagaaccaagagccagacacagggaacctgtgacaaaaacgaaaaccaataaaaacatatattgagcattgaccaggtgcccaatattttaatgtcccatgggtgtgcatcaggtacgctgtggaaggacagatgtcattccttaaaggggctgcactgaattagaccaggggttctcaaagtggggtccctggaccggcagcatcaccatcacctggaaacttgttagagatgcagatcttgggccccgccccagacctcctgaatgtgaatctctggtggggagggagacgaagtgggagcctgtaggctgcagtctgtgttaagctttctgggtgattctgatacacggtcaagtttgagatgtagcaggagaagcaggaaacataggagagaagccactaggggtgggaatcagaaatacggtgtccctgcctacctaggggctacattcctccgggcaagtctttttaactctctctgcctggcaacttccttaacaaagagtgatactaatacctgccttcctgtctttgccacatcacgggattttctacagctcatattggttacagtgatagcagctgagatttaggctgcacctgagtaccaggcagggtcctaagtgacttcagactctatagacagtccctgacttataatggtttgacttagattttttcacctttgggatgctgagaaaaccatacacatccagtagaaaccgaactttacattttgagtttcgatttttttttttcacctgggctagtaatacgtggtaggatactctctcacaatgctaggccacagcagcgagctgcagctcccagtgatcacaagggcaaagaatcgatattctaccaggcacggtgttgcctgataaccttgcccagctgtaggctaatgtaagtgttcttttttatattttctttaatttttttaaatttccacctgttttggggggggtacaggtggtatttggttacatgagtaagttctttactggtgattggcgagactttggtgcacccatcactcgagcagtatacactgcatccagtttgtactcctttatgcctcacccttttaccactctttccctctcagtccccaaagtccattgtatcattcttatgcctttacatcctcatagcttagctcccacttataagtgaaaacacacagtgcttggttttccattcctgagttacttcacttagaataatggtctccagtcccatccaggttgctgaaaatgccatcagttcattccttttcatggctgagtagtattccattgtatatttataccgtagtttctttatccacttgttggtagatggccatttgggctaatttcacatttttgcaattgtgaattgttgtgctgtaaacatgcgtgtgcaagtatgtctttcatataaggacttcttttcctctgggaagatacccattagtgggattgctggatcaaatggtagttctacttttagttcttcaagaactctccacactgttttccatagtggttgtactagtttacattcccaccagcagtgtagaagtgttccctgctcaccgcattcacgccaatatctattattttttgcatttttggtaatggccattcttgcaggagtaagatggtatcgcaaatgcaacaaaaacaaataggtgggacttaattaaactaatcagcttttgcccagcaaaaggaacagtcagcagagtaaacagacaacccgcagagtgggagaaaatctatacaaatctatacgtctatacaaggactaatatccaggatctacatggaactcaaattagcaagaaaaaagctaacaatcccatcaaaaagtgggctaaggacatgaatagacagttctcaaaagaagatacacaaatgaccaccatacgtgaaaaaatgctcaacatcactaatgatcagggaaaggctaatttaagtgttctgaacacatttaaggtaggctcggctaagctatcatgttgagtaggttaggtgtgttaaatgcattttcatcttatggtattttcaactcggtatagggtttaatcccatcctaagttgaggagcatctgtatctgttttggtcctgacaataccccatgaaggaggtgcaattacccctggcttagggttgagaaaactaagaggtttagtaatgtgcttgaggccatgctacctgtaagcaagaatcactccaggtttttcttgtttcaaaactcctgttaacaactgagttgctatactgttttagtaggtcaagatatactatgtgtttcaaagggcttataaattataaatgctacttaaaatgatgtaaagtggtattattgttgtcatcatgtatatattttcaactctctcattggcatcttgaggtttctcttctatgaaattctttgccctaggatggtcccctttgtcaaagagagacacattctgaacaaggtcagacaacacagatggagtttggattcgggcactggtgacagtgaagactcagatgaggttcttgagtactttcaattaggtttaccactgaccccatcagtgtgcagacgaagggagatgagagatacagatggttaatgggatttttggggtatcttccagcctttgtgagcacagaggtttcgctacattttgaaaattaaaattcatttcattcgcattacagattttaaatcctagctcctttttaagcttttaattccaacttgcatttcttattattctgtttacaaacctgacaaattttagcagtcgttttgaggagatctagaataatgtttcatctcatttttgaatttaggtacagaccttaaaaatattatgctacatttctaatattaatatcttgctttcttatttaggaacttttcctgacaaacttcccaagaatgtaattttgttatatccatatgataaaccttaagtattcttaagccaggtgcagtggaattcccctgtagtcccatctactaaggagactgaggcaggaggattgcttgaggcctggagatcaaggctgcaatgagctatgactatacctgtgactagccactgcactccagctgggcaacatggtgagaccctgtctctaaaaacaaacaaaccttaagttttcttaatgttctgacacttttataaatgtagtatttcaacttatggtcaccattctgtaatgattatcatttgtacatttaaaatagaaactgttaggccaatgtgttattctagaataggacttgacagacttttttttaaataaaatgccagatagtgtttctagctttgcagttcagatggtgtgtgttacaactgttcagctctaactttgtatgaaagtagccataggcaatacacaaatcaatgcaccatctgtgttccagtaaaactttatttataaaaacaggtcacgggccacatttggcccatcagccatagtttcccaacctctgctttggaaggcctaactcagttaaacattacaagttcatgcagcacggtgtgatggctcacgcctgtgatcctagcacttttggaggcttatgtgggtggatcgcttgagctgaggagtttgagactgggcaacatggtgaagccgtgtttctacaaaaaatacaaaaaaaaaaaaaaattagccaggcgtggtagcttgtgactgtactcccagctacttgggaggctgaagtgggaagatatcctgagcccaggaggcagaggttgcagtgagctgagatcgtgccactgtactcccacatgggtgacagagtgagaccctgtctcaagaaaccgaaaaacgaaagaaaaacaagttcatgagataccacatacgtgaatatatgctaacacagcagcattattttttggttaatcaatgattatcaatgcttctgtgattttaaaaaggagagtcagctattccctcttctgcccgctgatatctacagcctctaccagatggtacctcacttaattgaggtttgccttttttcaggctcttctaatgatcttctggccaactctaaatcacctttaaacttcatggaatttatgcattcttgttaatttatatccatgtaatatcagggtatttctctttgtagctgcatcttctaagataatggtttttcatggagactggcattgtcccgtccctatgagggggacatttgggaatggcatttttagtactcacaaggtaactggggcactcttggtcttggggaggggaggtggctggggacgcagagggtcctgcggtgggtggatacttacaacatagaaatgtcctggctcttgatgctggctacaccctcagtaagagatactgtcctagggtcatttttttcaacccacactagttacgtggactgtcttagtcagtccaggctgctataacagaataccgttgactgggtggcttgatttttttttttttctcccagttctggaggctggaagtcagatgtcagggcaccagcatggttggtttctggtgagtgctcttttctgcatttgtggacagctgccttcttgctgtgtcctcacttagtagacagagagagagagagagagagagagagagagagagagagagagagagagaccatctctcttgtgtgtctttcattcatgagaactccacctttgtgaccttattacttctgagaggccctacctccaaacaccatcttattgggtgttctagtttaacatatgcatttggaagagagaggaacatattcagtccatagcatgaaccaaccacgtgcacagaggtgtgccccaatttactgtcagtgcagccttcacaggcaggaaacccaccaggtccaaggaaggggcactcagctgttacctcctgtcataggaccattcctcactgtgccatcatattatacttccatatcgtgtgtcttgtggcattcctgggcctgcagtgagcctgtggccacctcatagtcttgttggccacagcctctagaaccagggattggaggaacagccatcgctagcatggtgcttggcactgagcgggtgcttagtgaatatttattgaatgatttccaactaatggaagaaagctgaatagcacaacacccagaggattgaggtttattgaaaaccaacccaaagggctatggtgaaaatcatctcaaaaggcagagggcaagaaattgatatttattgagggctctcagtgggtgttgtagggggaaggaagtacaatgtcctggagctaggctgcctaggtttgaatccagggtctgccagatgtagatgtgtgatcttgggcacgtttttcaacctctctgtgcttaatcttctcctctttaaaggtgggctagtgatagttacctcacaaggtagctgtgagaatgaaataatgatacataaagcacttataacaggacctggcatgcagtgagtatcagtgggtatttgctgtggttatttagttatctactttacatgtacatgtaaagaactagggatatctgtattaagacagggtcttgttatgtttcctgggctgatctcaaactcctaagcttaagtgatcctcttgccttggcctcccatagtgctggcgtttcaggcttgagtcactgttcctggcctacttaccttctttttgatcttctgaagtcaccccctccatctgacaggaggttgaaggtccgatggccacataggtggcagtgctggaatttgaacccaggccttcctcccttacctctctctacctctatctcttctatctacctgtctctactccctctccctacttttctctttttcccagcctccccccgatatactcaacatatatctccctctccctccacccacctgcctcccccacactccttctttccctctcctctgcagggagagcttggaaaccaagagtctatgagctcgaagggagcatgcaaaggtgccaggcaggccctcaaagctgggaagctgcagtaggggttctttgggacccagttaagcagtgggcccttgctctgagatgcagtctgctgagctgccatctggggacacatcttgagtttctctccatgatggcgcagctctcagcgtaaagcagtctatggagtgagaagggaaaaggccccagtaataaaaggcaaaggaagcctggtgaagtgactcatacctgtaatcccagaacactgggaggccgagatgggaggatcatttgagcccaggagttggagactagcctgggctacataaaattatatatatatatatatatatatatatatatatatataaaataatgcagaagttttatatatatataaagttttatatttatatctataaagttatatatatatatatatatatatttatttattttcaagacatggtggcatgcaactgcagtgtcagctactccggaggccgaggcaggagagtcacttaagactgggagctcgaggcggcagtgagcagtgatgactccactatactccagcctgggtgacagagtgagactttgtctcaaaaataaaatataaaataaaataaaaaggaagaaatagccagtagtgctttcttgtagacagagaagctggtgaaatgatgtaaccaggctgggcatggtagctcacgcctgtaattcccagtactttgtgaggctgaggtgggcagatcccatgaggtcaggagtttgagaccagcctggccaacatgataaaaccccatctctactaaaaatacaaaaattagccaggcacagtggctcatgtctgtaatcccaaatgcttgctcgggaggctgaggcaggagaatcacttgaatctgggaggtggaggttgtagtgagctgagattgcaccactgtacttcagcctgggcaacagagcaagactctgtctcaaaaaaaagaacaaaaaaaaaaaaagaaatgatgtaactggtagggagaaagccaaaggttagaaagagaacatgaattgagaatggaaagatcgcagaggaagcagatttgtctgcacacctcttgcatgtgtatttggagaagctctgtgtgctgcgggtcgagggaaacacataactggaacaactgtccttttccaccattgttaaatcctgctttgctcactgcaggagagggggattatataggagcttctggaaacagatgccttgggagctctcctccttttccagaactcccacacttgctcttgtagatcatcataggataactctccgctccctttcctaagaaaattgatctaaaaagtaattatggaatcttgcagtgcttgttgggatcagagaaggctcctccgatgatgggatgttaggtagagggctgcagggaccttgcttttagtcaggaggcaaatcaagagccaagagagggaggggtggtcgtgagtttttatgatgttccttctcttctccgctccttcctgacaagagtctgtctcttttctctgtgtgtcataactacccacattcaccccggcagcccatctaccttgtttctctcataagtcagcttctctcccatctttcctgtgaaaatttctaacaaaatgggagttaaggccgggcatggtggctcctacttgtcattccagcattttgggaggctgaggtgggaggattgcatgagctcaggagttcaagaccagtgtgggtaacatagagactctgtctctacacatttttttttttaattagctggggatggtggcttgcacctgtagctccagctactcagagggaggctgaagcaggaggatcccttgagtccaggagtttgaggctgtagtgagccctggtctcaccactacacttcatcctgggcaacagagtgagatgctgttttgtttttgtttttttttgtttgtttgtttggttttttttggaaaaagaaagaatcaccataaaaaagatgggtaactcggaaatttcaaatgcttgaatttcttgggttgggaagaatatcccaaaatgtgtttccaactacctcactgattttgacttcacagggagaatattttgatttttatgctctgagttgctggtactgctgtgggcacagaactgggtatgacagaacatttttctgaactatgactctgatcttctcaatctctcagtgggaaagagttttggaacttattatttttaaaaacttggtaaaagatttataccataatatttatcattttaaccatttctcagtgcacaattcagtggcataaaagggcattcctgttgtgcaaccatcacccctatccatctccaagtgaacttgattcttaaatctcccagccatctgtttcaattcactagatgttgttccacccagcacgtcatggtggaaaggggcaggctgtgattttttttttttttaacctccagcagctgtgttccctgtggcaactatgtaacctctctgagcctcaacatctgtctataaaatggaaacagtgcaacctaccttagcatttgatgatctcaacttggatcccatagcgggtatctccaaaatttcctcatcttgactacgttctggtgaaacttaagatgtcagcacatgacctacctcccttcccttctcattcatctgcattttcacaatgcttggttttatcttttatacatataatgcacaatacatgtagtgccaacaagaattatagtttctgtaagtagtgtatgattgcccacggatcttcagtaactcattaggcactgacgggctgacatgagcaacaacgagacttagtatctgttgcagctctccatacagtttacgaaactctaatccataaaagccgtttgaaatttccattaggagatttgcacaagtggttaaaattagtcatgcattcttggtctaaactgcaggaagggtatctttactgtgaaaatgattatgacatgttaaaactgtgtaatagtaagcagacagttttccgagctgctgggtgaattctggaaatgctctattattttctccctgttgactcctttctttcaggcaagacagccagcatgttgacttggaaaacaactgaggctgagcagtttcagagcattgacattacgtggcttcttttgtgggccaccccaactcttttattttttttaattgctgcttcttcctctaaaatacaacttgttttttttttttttaaagaggaggaagccttaaaaaccagcgacagtcttggttttcttaacctgtccgccatttaacatttctagaagtgcaacattgcttctaaggtaagggcaaggaccatgacttttgcatgctgaaaatgagctgcctggtttattgagttagttattcctttttagtgccgcagtgttttcagtgttagagaaaaggctgtgattttctttgatattaaaaagccaaccacttatattttccaaagccatttgcattcagtctgacggccgctaaaaatgtatgtggatttttcatctgagaggttttctctatgcatattgtttacatttatcaaatgttgtcctgcccagtactttatattcattgttgcttccggacctagctgacaacatggtctatatgaaaaacaacacaaaacaacacataagagagtcaaagggacttctttggggagaatataaaaacaagccaaggcgaaagtggctgtaaaaatgcgttgtgttcccaagtggaggctccttctttgttctgtcatcagtttgtcagttgtcaatcaaacctcccttcgcctcacacgtttgctaatgtaagaagtgctggctctgctcttagcctgcagtggtgcagcttaaaaattctgggagggtttcatgcagtaaatacttaaagtaacagaaaaggactggggaaaagctgatgttgtagctgtatgatcacccatgtaaaactgtttatttagttatttatttatttatttgcttttttacttccttttctatgcctttggtgactttgtgtaatgctgtatgtaccatcagagcacatactgcttttgtgcacacatacattgaaaacaaaatgaaaaaacaagaataaaacaaaaaccctattcctattcctacaattctggtactttgccacaaggtggtggtagtgtatcttgagtaaggaatatgacctgctagatataagcatctgtttatttacacactaaggaatgtttgagtgtggaacgtggtttagatgctgtgcgtacagcagtgactcagataggtgtgtattctcaagaagctttcattctaatgacacatactttgtctccagtcagagttatggcaggtttttttttttttttttttttgactaaattcacccatatttgatggcaagtgtgatcacagcatgtttataaaaatcattcttaattaaggcatttccatcttatcaagccccctatttaataaggatatcaaaaaagaaaacagttttcgtgcatatgtgtagctttttagattcactttttccttatttgacccatataaactttgtctgtctgtgtctgtcagtctcacacacatccttcaacacatctcttatttctttccagagccaggctaaagcacccttgccatcttctctctctgctgttaaattagatgccttctccaggaatctctctgggggcatcctgagccttcccgattccatttcagatttctttctgtaatcaagagctccatctctgttgctttcctggggctcttcctctcctctttttgaagcttttcatttccctttatattctttcattcgtcaactacaaagaagctgcaggcaggaacaagagagctcagcacacttggtgcagtctctctggcttggtaattggtcccaagaaaatagtttttttccaattatggcaacattgaaaacttatccaggagaggaaaggctctttcagctgctctttctcgatccttgcagtttcccttttgacctgtgggtacacatggtactgacgcaattggcacctcagatggttcttcctgacagctacccttgcaactgactcaggatacaaactacctttttttttggagacagatctcactttatcacccagtctggagtgtaattgacgcaatcctggctggctgcagccttgaccttctgggcccaagcagtgttcccgcctcggcctcccaaagtattaggattacaggcatcagccgtcatgcctggcacaaactgcctttggaagtgaatcagtcagttgcctagtaggcctaaggagaccatgatccatgtaaaccatggaatattttaagcagaaaagaacgtattccccttcaaggacaaagtgctggaataattgacatccaggttatcacagagccttcctatagtgttgattctgatcactcaaataatcttagtgttaaagggtttatttttatttttctaccttcttttaccaccccttactcccatcagagcaccatcagtcttttgggaataaaataattcctcagatatattaaaaagctatagaagcagaagttaacgtacatgcaaaaatctctacatttctcaacaattgtgtaaccactaaatatagggaaagaagtgtgcaaggtataagacattggccatgcgtccttgtctgtgccacctcaccaggagcattgctcctttttatgcacaagcatcagaggttctggacatcttcttgggctagttggtatagcttccttctcagctcattctgcaaggtttgctttggaaaagtctgtgcatctgagctctctcttgccatatcaggaaccgaagtcagaaataaaggctacagatgctcaaaatctgcagtattcaatctttttaaggcccagcatggtgtctcatgcctgtaatcccagggctttgggagactaaggcgggtggatcacttgaggtcaggcattcaggactagcctggccaacatggtgaaaccccatctctactaaaaatacaaaaattagcctggtgtggtggtgcacacctgtagtcccagctagttgggaggctgaggcaggagaactgcactctagcctgtgctagagagcgagactctgtctcaaaaatataaataaataaataaataaataaataaataaataaataaataaataaagtatctgtccccaagtcacaatgctattcggttggtgcaaaagcaatcgtggtttttgccattacttttaatggaatagtaaataacacttgatctttggtcttctgacctgaaatcccatggctaggattgtcagatagaatacaggacacctggcctgttacagtggctcacacttataatcccagcaccttgggaggcagaggcaggaatatcacctgagcccaggaatttgaggctgcagtgagctatgactgcaccattgcattccagccagagtggtagagcaagaccctgtgtcttaaaacaacaaaaacaaaaacaggacacctggttaaatgtgaatttcaggtaaataacatattttttaaaaatgtatcccatgcagtatttggagcatatactctaaaaattttctttgggatatacttctaagaaatgatttgttgtttatgtgaaactcaaattttactcggcatcctgtgtttttatttgctagacgtagcacctacctgtgacatctttttgtttctgccctgctgtgtcacagggtcttggtatctttcctcctgtgattctgacactaccttgggaaatgactctgtatcaagcgtttaccatctgctgaaagctttgcatactctgttgcttatcatgacaactgccctgaaagttgggtgtacttgttacccctttccagattaaaaaacctaggggtcagagaggttaagtaacttgctcaagacctcacagtgaactgtggtggaccactgggattagaacccagtgagttcagtggctttgcctccaagtgcgtttattattgtccgcactccaaaatggctttaaaaaattaaaaagatacatgacgttgaaatcagtgacagaggcataaggctccttgagggaagaaaccaggtgttggccataaaaaaattatttttcacagcgcccagcaaagggcttgtatgcaaaggaccctcagtataagctggttgttgactgatgtgtttcaagagtaagtcagaaaaataaaaagaaggcagggaaagagttcaaaactcagtgtcacttgcacatccattttgccctagaagtgttttaaattttatcaggctcataaactatgtttcgaaacgtgaaaataaattggccccctgaccccttatgaagtgacatcattcatctgaaaggtttatcgccctgcgtgtcattttgaagttccctactctcctcctcgttctctaaatccatgaaaaaatagaaatgggaggaagaactggagagaggggttctgtgtgtgtggaatgtggctctggaaagcccccagccctcctgttaacacaatgcttttatcccgtaatctctgcctgcgggagacaaaataacagttcatctggaaaacaagattaactcatttaacttacgtagtgatcacagagagaagcttgttggagttgtctggctgaaggaaagcccgcgattctcggccattccggttcacagggcctgggtagcgggcccagcctgttgcaagtaatcgggctctgtcagatcagccttggtgagattgggatattaccagggtattctgttcatctctgacacaggccctctcaatctgatagacggtgtgcctcttctcttcattagaacatcttcctgaacacttgcctgtctgcactgccctgctaaggggttttcaggtgagcgtgctgtgggtaccttcacatttcaggccttttaacagggaatgaaaaccaactgccctgtgattccaagtctgctgatgcatgtgaaattggctttgtgttggggcctcttcttccaaagcaacagtaagcattttttttttttttgtgataatctctctctgtcacccacgctggagtgcagtggtgtgatctcagctcactgcaacctccgtcttctgggttcaagtgattctcctgcctgagcctcccgagtaactgggattacaggcacccgccacccgacgcccagctaatttttgtatttttggtagagatggggtttcaccatgttgcccaggatggtcttgaacccctgatctcaggtgttccaccctccttgtcctcccaaagtgttgggattacaggcgtcagccaccgcccccggccgatagttgcctttcttaccagcctgggccaggagcagttgtttattttctgctatttcgtgtgtttctttttgctggcagtgacatactcctacagggatgtctgcctcatgttgacctgcttgtgtttaccacctagaggcctaagaacaggctttccccgttcaaatcacccagtggcgtgcacacttggggcacctggggactggtttcctgaatggcattgagagtcattactttccacacacagttaactgcagggagatttgtctctgaaagtagtcttcaagaaatgcggcagctgcttctagccgctccatccttccttttcccagtgcgcactaaccctccagagccttccgcatctgctatgcagcattggccacaccagtgggatgcaagaatttatcccttctgttgatgcaattaaagctaatggatctcatatatatatatatatatatatatatttatataaatatattttatatttaaaaatatttatattttatatatttttatatatttatgcaagtatatatctaaatatataaaatatatataaatatatacatatatgtgtatatatagattttgttttttgagacagggtcttgctctgtcactcaggctggagtgcagtggcgtgatcatggctcactgtagcctcaacctcctgggctcaactgattctctcatcttagcctcctgagtggctgggaccgcaggttcatgctaccgtgcccagctaattgtttaattttttgtagagataggatctctccctttgtggcccaggctgatctcaaactcctgagctcaagcgatcctactcactcggcctcccaaagtgctgggattacaggtgtgagccaccatgccaaagcctaagggaccttagaattttttctcctttcttttcacattttgttttgtgcttgcttatttattgaaatctggaccacaaataacttacatgtttgtcaaggccagatttcaggacctaaccaacacccgacaggcatcttagaaagtggagggtgtaagttataaagagagattacttccaacacgtttctttaaagcctgctggctaaattaggtgggaccttctttgtgtcctctctgttcttgctagtctggcctttgtataatagggaagcagatatatctggaagcctctaagtgtgcatcatggaaattgtttgaaatgttcaaagtgatgtggatgtatatatacgttaaaaaatatcactttcccttttgaagacatttactatttctatggtttgtttagcaacagcctggctgaatagttcttcaaaaaataggaacatgatgctcatatctggccactgtatatgctttggagggaacttgaagactaggtggctgcagccactcagaatcttgttgaatatttaacatttttttgtgaatgtatcaactaagaagactatcaattttagagcatacagctgttctagaataatagtttgaaaggccagccgcaaagattgtggtgattaaagtgtgagcagatgacggaatgataaaccttaacgcttaaaaatgtgtttttatagtgccattcctatataacatcgtctgataaatgtatttgagacgaacaggccaaatgaaagaaccttccataaggggacgcagcacagtttgaatataagtgttccctccaattcccatgttagtgctttactatgagtattgaccagtgttaaagagtgagcgcacaggagccttctcaaagcctcctgcacacactctcccactgtaaatgcacgagtattgatcacaattattccgtaaacacatcttacaaattccctcagtgcacgcgccatctaaattaatccaaattcagaacaaagctctcttggaaaaggaaagagcatctctttcaggagcttccctcttggacattaaatcttccataatctgtgctagttcggcaaagaagccccaacgtcctcccaatcatagggcgcctgagctcttggtctcctatatcttatattcattatagatgtcttatatccattcctgtatcctttgtgatgtcttgagtgagaaaatgctctgaccaataagccaatgttcaattgacttcgaaatgttatgtgggataggctcattcagggtggtacggctgtagacaaaatgctatatgcattggctgggcgcggtggctcacacctgtaatcccagcactttgggaggccgaggtgggcagatcatgaggtcaagagatcgaaaccatcctggccaacctggtgaaactctgtctctactaaaaatacaaaaattagctgggcatagtgttgtgtgcctgtaggcctagttacttgggaggctgaggcgggagaatcgcttgaacccaggaggcggaggttgcagtcagccgagattataccactgcactccagcctggtgacagagtgagactccatcttaaaaaaaaaaaaaagtcttatattgattaaaagagacttaagacacatagtaccagatggattgtgtgatgctcattttgatttggatttaggggaacctgctctcaaagacatttttctgagacaaataggaaaatttgaatatggagtagctaatagatagtattaagagagtagccttcattttttaaagtataataatattttaattgagtttatgttagagatgcataccgaaaaatctacaagtgaaatgatatgataactaagacttgctttaaaataatgcggaaaaaactgttagagtaatagcgtaaataattcaagattggaaaatgttcatgttaaattattgttggccgactgtgggttcatttaattaggttctctgttttggggtatgttgaaaatttttcataagaaaatattattcagaggtctcaagaggcaggctgccaagaatagcagttagaaatagctagtatcaggcctggtgtagtggctcatgcctgtaatcccagtgctttgacaggctgagggaggagaactgcttgagcccaggagatcgagaccagccagggtaacatagggagaccctcatctctacaccgaatttaaaaacttagctgggcatggtggtgcctacctgtggtcccagctgcttgggaggttgaggcaggaggattgcctgagcctggtagaggtggaggctgcagtgagctgtgattgtgccactgcactttagcctgggtgacaaagtgagactctgtctcaaaaaaaaaaaaaaaaaaaaaaaaaaaagctagtagcacaccccaaaacttctagacagggcatggtgtgagctggagtagacaactagttcatggtaacaggaccagcagagctccgtcttgatgctgttattatttggtatctgttaggagctgaattatgtgtccccaaaattcatgtgatgaagccctaattcacagtacctcataatgttactctatttggagatacagccttttaaaggatggttaagttaaaatgaggttgcttggatggtccctaattcagtttaatttgggtccttataaaaagaggaaatttggatgcacagagacaccaggaattcatatgcatggaggaaagaccacagtggcaaaagacacattgaggaggtggctgtctgcaagccaaggcaaggggcctccggagaagccaaacctgctgacaccttgaccttgaatgtgcagccttcagaactgtgagaaaatcaatttctgttgtttaagccacctagtctgtcacattttcttatggcaacccctgtagataatacagtcccattctctggggaaacagatacctccgccagggtcctgatctgaatatgatttggggtgatggaacagaaacacccgaggactgtcgttggggaacaggaaacctgtctgtagtcctggctctgtctccaattggctacgagggcttgtgtgtactctagttctctttccgtgacactgcatttggggggaaggtaagggaactggggaaaagaaggcaaaatgatgacttaaagagactgatgaacccaaagctctcttgtgaagccccttctagaataagtccgtctcacgttacagtgcttaggaagtgttagatgtactgtcatttcttcaacatatatgtcctatattagtctattctcacactgctagtgaagacatacctgagatggggtaatttgtaaaagaaagaagtttaacggactcatagttgcacatggctggggaggccacacgatcatggcggaaggcaaaggaggagcaaaggggcgtcttacatggtggcaggcaagagagcctttgcaagggaactgccctttataaaaccatcagatctcgtgagacttattcactgtcacgagaacagcatgggaaagacctgcccccatgattcagttacctcccaccgagtccctcccatgatacgtggggatgatgggagatacaattcaagatgagattttggtggggacacagacacaccatatcatgtcttggcagccatctatattcaagacactattctaggtatgacataaaggatggcaaaaagtcagttacttaaaagtgtggaagcagagtgtcccaggcggaggaaacggtaaatgagacctctggtagtaagaagcagtgtagcatgtttgagacactgaagtccaatggaacttgggcggaataaatgaagggaagattcaaggtgaaggctgagaggtgtgcatgggtctgatcacacagagccttgtaaaccaaggtgaggacttaagattttattctagctgcagtgaggaaccagtgagtggttttaagccagagagagattgataagacatggaatgatatggtgtgatatatgaaatgacatgtttgaaatgatagatgacgtgattgtgatataatatcatgcggctgaggacaacactataactgctcggtagagaatggattgtcatggcctgggtgtggtggctcataatcccagcactttgagagctccaggtgggatgattgcttgagcccaggaatttgagaccaacctgggccacatagtgagaccccatctctattaagaaaaaagagaatggattgtgatgaattaggattggaaacacagagatcagttagaagatttatcagtgagaaaagagttcagttgcaagttaaagaaaacacaagtaaagctaactgtaacacacagagctttgtcttttcttgctgaataagaagctgagagggaggcaattgctgtcactggtccagccggctcagcaactgcacatttgtcaaagttcttcatccccagctttgtgattctctaggttattcattcttctgggatcgtagatggccaccacaggttcactgtggaaagaggggtaggaatttttaccagctgggtctgactccaccccacccccacccctacccaccgttttttgtttttgttttttaagatgaagcctcactctgttgtccaggctggagtgcagtggtgtgatcttgactcattgcaacctccgcctcttgggttcaagcgattctcctgcctcagccgagtagctgggattacaggcacatgccaccacacccagctttttgtatttttaatagagacaggatttcactatgttggccaggctggtctcgaactcctgacttcaggtggtctatccaccttggcctccccaaattctgggattacaggcatgagccaccgtgcccagccgtgtctgaccattttatcaggaaaagcaaaagcttttctagaatctatcaactcccttctgcatgtgtctatttggcatgggctgtgtcacatgacccctgagctgcaaggaatgctgggatacgatggaagcctgccagaggtagagccttgggaagggctgatagggcctctaacctaaatgtccaccaccagaggtattacagaggtttgagcaagaaattatggtggtcccagggatgatgcattctgataatcattatcatcaagaggaatgtctaaaggaaaggggaaaaaaaaaatcagacagtcacattgaaatgaggtccttaagataggccctaatccaatatgcacataaaggggaattttgggcacagagacagaggcagagatagagggaagatgatgtgaagaaaaacatagggccgtgtagaggcagaggcagagattgaaattgtgctatcatgaacgggggaatgtctgggactgccagaagctcctgaaggcaggaagcatcctcccctccagcctttggagggaatgtggccctgttgacaccttgatttcagacttctgggttccgcaactgcaaaagagtacattgctgttctaagccacccagtgtgcagtagctttctgcagcaaccctagggatgaatgctcctgccaaatgctgcctgcccttcaagatgagtgttatttggcagaggaagatgatgcactgcttattttaggggatgccctcacttttgggtccctatgtcacctgtgtgtactccatgccagtgtcttcccagcccctgccaggcaagttcgtgtggttctgtgataaccctcatctctataggttctgtgataacgctcctctcactgtgctgctccttgggtgacatcacacccaaggagaatcatgggaccacctccagagagattttcttagaggtgtggaacagaaaaaaaagcgtctctattcgaattgcaggatcttccttatagtcctggagaaacgtggcccagcattgtcttggtccatagcctgagcttaccctccctacgcaaccacagctgtgtgcagcttcagccaggtttgctttacctgatctcactggcttcatgtttattatcttattttcagtttcaaaagggcatatcctgccccctttcccaagatcagaggataaggaatgtcttgatgttctcagtcgtaaaattaggctaataacacctcccatggttgtctgtgaggacaacagaaagtaatgttttctctgaaaagtttaaaagggtaaatggcttcatcacatggtgatgacagtgattattccaagagatggctgtaagctccctgagaacagaggtgctctgtgtaaatctagtctgtctccccaggcttagtggttgacctagactataccaagagtaagtgtgttttttaaatttaatttaaatcaattcattaagcattgctaaattggaaaaccatggaatatagagatccagtagttaagagcctactgggagagacagcataataattacaataagtgcagaacttgcaataatgtaattgaaataatgtaatacaatcctgcttaatattacactgtatatattcattgacttatagactgagctccttatcttgttcattgctatggctttagcaccttttgaacagtggtgcttggcttttggtaggtggtcaacaaatgtgtattaagtatatgaactgttggaagggtctgctgtgaaggatgtgatttgctctctttgatggtggacaaagaaggtttcctggtggaagagattaatgagttgggttttgatgaatgaataggagtttccccagacacacggaggagacagaatggaatgaaagaggggttttccaagaagaggcactgaagggcaagacttcattgcttctttgatactccaatgccggcttcctttgggttggactctgatggatctaatcgaggattaggatggaggtaggtgggaacatatttagaaggatgccctgtggtttttctccttcctgctatttatatttccctctctgtctttcccacctgtttggtgatgaggaaggagctgtgtactggtttgaaacctattcacgacatagtggacccaacaccaagtgtcttattgtaaatggatccacttttactacagttactttaatggcatctaaatgataaatgttaataagcatttttgcttgggaaagcacaatggtattagcctgccagactgcaaacgttatttgctttatggaaggggatttcaaacaaggggttctggtggttgtatttttgcctcaacggttatttatagagaaagtatgggccattgcatgtttatagtatctcttttttatggctgcccaagttattattttttattggtttgggtacttaatttgcacatttgtaaacaattatgtagttacacagctgttgtaccacagagaccatatgcatttccatgttaagagaaaagtccgtgagggattctcactggataccatcataaaagaattattgtggtgccaaaaaaatttaaaaaaacgactagctcagaagttatcattgtgtttttatagtatttggagttaaataaatttaatgtttttttgctcacttgagttggagccaaactttataactgaataggagggttctctttcccatatttgagtagaacacatgatgttcaataaaaatgaatttgccagtcagaaaaatttatcttttagaaaattaatacactgagccaagcatgggtggtccatgcctctaatcctaggtactctggagggtgacggtgggaggatcccttgagcccaggattttgaggctaccctgagctatgatcacaccacagcactccagcctggccaacatagtgagacactacctagatagcttaggagagttccaatgtttctgaaggatgtttttttaaaagaagtattcatttaggtgacacatatttattgagacactaatatatgccaggaattattctattggttcctttggaggagacatgaataaaggcatggatgtgactgaggaggtaaaggtgaagaattggggaggggtggatggggctgactcatgacctaaagaacatggcatctggggctctcttgaaataatctgcactaaccactcattcacatttttttgagtctgtaagatcccaggcactcttggtagcaggggggttaggtgggtgaagggacaagtagaacttagttccaacagagctaaagggtattggtgaagactatgagcccctcatgacgcacaactggtttcaaatccaagcccatcatgtatcatctgtgtgattgtgggtgatctctttcttcccaaagcctgttttcttgcctgaacctgatcaacagaaacagtcagtgcaggtaatgtgtttagcacacagcctggcatacgaacttccacacaaaacgggtgaccatggctgaagggttattctggggagccttccctgtggaagccccattaaccatccctgctcattcctcccgtgagaccaccatttgctaaatcttctgtcaggtgatgtgggatccaagaagaaacaataatcagaagcttgccttacaggcatgcacaatttcgggtggactgtcacatgtgcactgaaaaagtcgagaaatgttatgatggccctggaaggaggagtgtctagatgaaatgcgaataaataggagacaagtgtgtcgttaattaagaaggagaagggggactttaaggttaccttaaaagaaaagagacccctcaatgctttggaagagcctttttaataagctagtcaggtaagttagattgctctgtcttacactggtttagtaattttcatatatacttatttcctctgaaatgtattagtaacatttgtaatttaccaaatggaaaatatcacttaactttaagcttcatcaagttaagaatgaatttgtaaccaggggtattatgttttctcttattataacaaacaccaatcaaaaacaaacaaatacatgacgggaaagaaagaaaacccagcatttattggcagtatttttctgcaaaatattatttgtttccctttgcagttttattcattttaagcacgttttcaccaaagtgttctattctaagctagtctcaattcaatttaaagtggaaggtttttttcagtttagataatttacatataaaagcgttactgtacattttatgaaatgactgttttcagaaaacaacgatttcaatttaatcgtattgttattctgcaagttgaaatgcctcactcttgcttcttggtcttactgacaatattccttcttgccctaattttaaatggtgagtgtttgaaaattgatgtgcttcttttagaccctaccagtaagacttaaggcccactgtgattcgtctgatagacttgaagattatgtgcgcgtgtgtgaaacaagggaatcttaatcatctgaacctgacggttatatagatctttctgaattatttttctttcttttcacaagaaagaattatttttctttcttttcacaagaaattttgcttgccaatggtcagatctgttaacacgaaaactaaaaacttatacatcattttatattttgaaattcccaatttgcaatgttatttttttttcttcttttttttttatgacacttttcttctggaaaaaatccttaggacccagttactctctttcaggattttatatcataatgtgtctgtgagagacagagccagatgttcaggatttcagaccaccatatttgtcctaggaaacctgccagcatttcacattcttgacccttgaattgaatatgaggctctgactatataacagaaaacacccgagttttatgattctgcaagcgtggtttacactataaatttccaccggtctctgcttgtctcttctagaatttagggttattctcaaactctattatacaagcagtgcccaagtgccttcctccaaaagtacattagatactttcttggggagagaagaaattagacaggagctacaaagatggattaaaattaatttggtcctaactaaaagataagttcctcccccatcctcaggatgaaaccaagagcacttctccatcatcaggggagccaagtggacgctaatcaccaccgtgcctggagagttgcctttcagctggtgaatttactattgccaactcctgcattcttattagtctataagattgaggtcgtttattggtgatcacttgtagatatatatttatataaatctcttagcccagaatctccataaactgtttttcatgatgtggataccacgtgggatatgtcccacaattggcaagtgccataaatatattataggccattatactttctacagtatctttaattgatatgccccatgtctaagaaaaaaagtagctttcatgatgaaggtgatgaactacttctttccattattctatttcccccttttcttcttcaggctttaaagatatcataataccatttacatttactgtttaatttttaggtctgtatttaaaaatctgtgtagtgacaacaattattcttattgtatgaacatattgtcggctggagagtattcagctgtcagacaaagtgttctctaaagtgttcagccatcagacagaaactctattgctggtggcggggttgtgggctgggggaaccagagtatttgctcttctttagaagtcatcaatggtaagcctagggcagcctgaaccacttgtgttagaaatattttttataaagcaggacatgtgctttgaaatttgattcctccgtcactggctgtgtgaccttaaagaaataaattgacctgcctgagcctctcggaaatattggctggccagtagcatcctcacagagtttttctgggaatcgaatgagagattacatacacagggccaggtacatagcaggtgctccgaagatacccccgacttcctttcctacgaataaagaggcccaactttttgtccatatgaagaggttggcagagcaaacgcacacgtgcgtaggagctggaattgtcgataatgtcacaatctcaggaaacccaactttgtaaatgtgactttcctttgctactttttgcctattaagcagccatgtatgtaaagtattaaattagcatccaggcactttctttttttctagaaggtggtattttgcatattaatacttgcttaaatcaagaagctaagactttgtattatattttgctttacgtgccttgattaaggtcatgatcctgacattccagtcccaaaggagaccaaggaaatgaccagcacgtggctcactccctgtctgtccagtagaggacaccaaggcacgatgaccgcagctcctgtagtagttatggtcactgactccgggttcagacggacttggggttcagtcctagctctggcgcttaccagttttctcaagtgactttgagcatctttactcaaggctcttggtctcagttttctcatctgtaaaatggagatcgcagtatctaactcatgggtgtgtttaaggattcagtgatggagaaaatagctgaaaagtgaccgtatgaaatgagcagcagttgtcaagtacttggcatagttcctgtcacataggaagcatccagtaagtagtggtatctgttgtgattatgatcatattttatttcatggagttcagtaagagtacaaagcgaggagtttttctgcccctccagtagctgtagaatttgtgtgatgactatgtgagcttatcccctggtaggtataatggaaagactaacaagagtagaagagggatgtaactggagcatgatttaaaggaactgtagtttgtctctgtttttttttttttttttttttttcctctaaataaacaaaggaatagaagatcctgtgaagagctgggtgtggtggctcatggctgtaatctcagcactttaggaggccaaggcaggaggattgcttgagcccagtagttcaagatcagtctgggcaacataatgaaaacctaatgtctacaaaaagtataaaaattagccaggcgcagtggctcacgcctgtagccccacctacttgggaggctgaggcaggaagattgcttgagcccaggagttagaggctgcagtgagccatgatcacactggagcactccagcctgggtgacagagcaagattttgtctcaaaaaagaaaatgatgtgaggaagccaggaatgatgagtacctggattaaactaccttaaggctgattgagtaaaagtgaaagatcatcccgtcaactgctggcctgccgcttgtgttcgttaatagaacatttccctctgattgtcaggctttcttagcagctacagaatacttattttcttctttatattataagtttatgccactgcaacattttagaatcacctgggaagcttttgaaaactcccagcatcatgaagcatggtctcttgccttggggtcagtgtctgtcaacgtggcttttgctaaagagccttcccctatgagaagtgaggcaggagaaggcggagtgaccacaagatgccctgatggtgccaagctattattataaatgaactgaagccacaacagaagtctgctaccttgttcttatctgcatgtttctctctttccagcctcatcttctactaccttcttctactcccacacttcttctaccttgattcccagccttcttttcttttcttttcttttcttttcttttcttttcttttcttttcttttcttttcttttcttttcttttcttttttcttttcttttcttttctacctctcgggattctgagagcatcctgtaatgttggaaagctttctgctaatccgggcattggagtgctctctgggttcactcctgacagttctttattgctttcccacctctgccaaggtcaaaaatggaacttgcttcttgttctcgtatcactcagactaagcagttgatgtaacagataacccccaaatttcagtgatttcacatttaatctgtaaaaaatgaggatttgtttatagccccaaagacagtctagtttggattatttgaggacctagacttcacctgcacagtggtttcaccatccatccccccatggcctccatggtaccctctgattcaggctcagcaggagcgggagaggatgcataggactacatgttttctgggccaggactggaagcagcatatctcagatccaacctctttaccttggcaaaaattcaggatgtgcaggacgaggaggaaaatgggagtagtgactatttagccagtctttgccacatcccggttcatatctcactccgtcatttataacctgtaattaaatctttagtgagtacctgtcacaggttgagcagtcttctagggcctctggttaccagcaatgaaaaaagccccatttggtaaaatacagtagttggattcattatctctgtgattaacttgcataaaaaagagacagttttcattgatgtgacctttagcaacaactcctaaaatattttttttccttcattcctgcttttccttgttccagaagaagttaaggtaaatggcttttagcacattgcacccccagcttttagcacattgcattatcattataataaatgtttacggttactgatattattatagttctttatcgacattattacagtccattatttacagtccttatgttatttaggaggggaatttggggacattgacccacttatgtgtagtcccctagtgaaatgacaagaatccccagagctgggaaaacatttccatgcaattccctctcagtttacatcaaaatcagctcgtcacccttgagattgaagctcgcactctgtaagctctgaataaatattaaccatctcctgaaccctgaaggagacattttctggggagcagtgatttgatgatttgatgaagttgtgtgtgtgtgtgtagtttttcagacatatctccatctgattcttacctctaagagttcctcaagggcaattgtgttgctttgtttttccttgcatctctggaggctgagcacctagtagtgattccaggtacgtagcaggtattttacaggtgcttgttgcattaatgcactttattggtgatatggtttggctgtgtccccacccaaatctcatcttgaattgtagctcccataattcccatatgttgtgggagggaccgggtgggagaatattgaatcatgggggtggttcccccatactgttcttggggtagtgaatgaatctcatgagatctgatggttttataagggggaaacacctttcacttggctctcattttctcttgcctactgccatgtatgatgtgcctttcgctttgcactatgattgtgaggtctccccagccacgtgaaattgtgagtccattcaacttctttttctttataaattacccagtctcaggtatgtctttttttttccttttttcttttcttttcttttcttttttttttttttttttttgagatggagtttcactcttgttgcctaggctggagtgcagtggtgcaatctgggctccctgcaaactccacttcccggatttaagcgattctcctgcctcagcctcccaggtagctgggattataggcatctgccaccatgcacggctaattttgtatttttagtagaaatggggtttcaccatgttggtcacggtggtctcaaaatcctgacctcaggcgatctacccgcctcagcctcccaaagtcaggtgtgtctttatcagcagcattaaaacaaagtaataaaattggtttcttagggttggatggcttaaaacaacagaaatgtatcatctcacagttctgaaagtgagaagtccaaaatcaaggtgtcagcacagccacgttctttctgaaggctccagggatgatctactccatgcctttgtcttagcttttggcattgcgggcggtgcttggtgttccttggcttgtaggtgcatcactccaatctgcctttgtcgctgcatgtcattcacattgggtctctctgtctctactccttttcttctcttttttctcctttccttttctttcctcttcccttttcctttcttttcttctcctcctccttctccttctcctccttctccttcttcttctctttgttctccttctagttctcctcctttcttctttcttacttttactcctccctgcttcccttccctccctccctcttcctccctccctccctccctccctctctgcctccctctctccctctctctttttctctttctctctttctctttctgtgtctctcttttctctctctctctctttccttccttccttccttcttttcttccttccttccttttttcttcttttttttggaaacagtcttgctctgtcacccaggttacagtgcagtggcatgatcacggttcactgcagcctcaacctcctggggtcaagtgatcttccccacctcagcctcccgggtagctgggaccacaggtatgcaccaccacacgtggcgtatttttaaattatttgtggagacggggcggggaggtctccctgtgttggccaggctggtttcaagctcctggcctcaagggattctcctccctcagccttccaaagtgttaagattacaggcatgaaccactgcacccagcctatcttaattcaatacacagtagtgctttttgttcccccatgggatagtaggtaaattaatggaggaagggagtcaactaaacaatttatttgagcaattaatggaggaagggagtcaactaaacaatttattagggctttatgtaaagccctagggttagttggttggttggttttgttttgttttgttcctttttttttttgccaggggatgctgtggttgaatttccctctgtggtgagagttgcatggggcaatgaggaggtagtccagaatagttctatggaaataggaggctttcagtttcttcatctgtacaatgagagttgaggggagctgagtcgggagttgaaatggtcactgggtatcatttccgtgggtggctctaacctgttagggctgtctgcacagtgctgagcttttgtgtttttggtcatcccaatgtgcttttcctttttcctgagagcagccctctacatcttccgtggtgtaagttgccttattccagcacgtggcatcgccagtcccagtgcccttggcagaccatgcagaatgcatccatggaatatgaaaaatgaggcccagtggggcacagtggctcacacctataatgccagcactttgggaggccaaggtgggcagatcacttgaggtcaggagtttgagaccagcctggccaacatggtgaaaccctgtctctactagaaatacaaaaattagctgggtttggtgacaaacgcatgtaatcccagctgctagggaggctgaggcaggagaatcacttcaacccggaaggcggaggtttcagtgagctgagatccagcctgggtgacagagcaagactccatctcaaagcgaaacaaaacaaatgagggtcctcatcagcgtgcctttgacactgtcctctggtcctggtgatctgaatacatcaccacagaactgccagggtacgtgtttcctagcccatagcgagtcccagtgaaagcagagatgagaaagaaaggagggacacaaggtctgggtcctgagttccagtccgtgggggccctggtgctactgctgtagttcatgaaacattcccttcgattctttgaactctctcatacctttcccttaaattcttctttttcccttatgtcaagcttctttcagtaacaactgaaaggctaatagtagtgctgtgtggggaggactttggacttggggattggactccatgggagaggtcagctccttgtctccctggtggtgagacagggaatggtagagtgtgtcctacctatgtgcctgccttgctctacatcagtgcttcttggatattttggtatcaggactctaaactcttagtagttatccaggacccaaaatagcatttgtttatctgggtcatttttactgatatttatcatactagaaattaaaatagaaatagtcaaattctttattaattcgtttataagtaagaaacctattacaagtgaacatagataactcccttcctctttcctctctccctccttcctttttttttttttttttttttttttttgagaaagggtctcactgtgtcacccaagctggagtgcagtggcccagtcacaggttactgcagccttaacctcctgggttcaagtgattctcctgcctcagcctcctgagtagctgtgactacggacacatgccactacacctagttgatttttgtattttttgtagagatggggtcccactgtgttgcccaagctggtctcaaactgaactcctgagctcaagcgattctcccgccttggcctcccaaagtgctaggatgatgataggcaggagccaccacacctggccatggataacatttctataaaatataaccatattttcaaacaaagagaaaagtggcgttgtgctacatttcttctccagtgcttggttccctagaagacagccagattctcacttcttttcctgcattcagtctcttgtgatatcacatggcatgtggcctctgaaaaactccgctgtctagttgtaaaagaatacaagtaagtagtcaagtgacaccttagcattctgatgaaaagagctttgacctcacagagcttctggaagggtctcagagacatccctgagggtcccttgactgcactttgacaaccacaggtctacatgatctgtatagccttttccagttttcacatcctatgattccaagagggaaaacaatcttccttgtaaagagagttaagtgacattgtgtccttgtctacactcagctgctaatatgctatgggacctcaggtatgtcacttaaaccttgtgttggagtttcctccttgttacatggaggtcacaagaataacaaactatgcatagatcacctaatttagtcattccaacggtgtggagagatagaggattaggatggactttatttcctaagtgagaaacgttggctttagtaaaagtgtagtggtttgtagggtcatccccctaaagatatcccgccccaccaaagatatccctaaagacatcctgctggtttcagtggctcatgcctgcaatcccagcactttgggaggctgaggcaggcggatcacttgagctcaggaattcgagaccagcctggccaacatggtgaaaccttatccgtaaaaaaaataaaaaattagccagacatcgtggtgcatgcctgttgtcccagctatttgggaggctgaggtgggaggattgcttaagcctgggagattgaggctgtagtgagctatgattgcaccactgcactccagcctgggcagcagagcaagaccctgcctcaaaaaaaaaaagtaaaaataaaaataaaataaatatatatatgcatgcacatcctaattcctgtaacacgtggatatgcccttacttggaaaaagtgcctttgtagaatgcaagcatccttatggaagaaggtcagagggagatttgagaaagacagaagaggaggagtccatgcaaagataaaggcagagggtgaagttgtgcatccacaagctcagatatgcctggagccatcaggtgctggaagagatactggaagatctcttccagggcctctggaggaagcacagtcctgctaactcttaatttgggacttctggcttccggaactgcaaaagaacaagtttctgttgtgtgtaggcacccagtttgtggtaatttgttacagcagacatagcaaactaatgcaaatgggctttgcttgaagtccctcagctgctaagggtcagaaacaggatttgaacctacagttttgaggcctgaacctgctatgcagtgctttcttcctgatagtgaaaccactgtggtcccaaacccacagggctctatttagatttaaacaagactatgaatgtaaacagacacagtgcaatgccagatccagagcaatcgaaggtcatagtttcctcatccctcgaagctgccaccttgcaacatcatccttgtgttacttccagttgtttcttatgataagtaacagtgactttgatatatccattttttagttgtgtacatggtggtgatggtgttttactccttgctataaacgcttaaggattccttagctttagggaatgaaactacttgggcaagaatataaaattttgttctattttattttaaagctctggttacatatggtcaagttgcttcccaaaaagcgtctctgtcaggatgatcttatgaacgacgttagtacctcaattttactgtcccatccttttttcctccttccttgcctccttccctctctgcctccttccttttcttcccatttccttccttccagcattatcatataagccacgtgctgggatgtaccaggcacactagctctataggtaagatatttcctaggactcatcattcacatgagtccaggagaaatacatcttttgtttgtttgtttgttttttgagacagagtcttgctcaggctggagtgcgatggcaccatctgagctcactgcagcctcaaccgcctggtctcaaatgatccacccaacctagcctcctaagtagctgggaccacaggtgcatgccaccacgcccggcaatttttttttttttttttttttaagtagagacagggtcttgctgtgttgcccgggatggtcttgaactcctgggctcaagcgatactccctccttatcctcccaaagtgctgggattacaggtataaaccaccaacccagcctcaggagaaataaatcttttaggaaaaaaaagtgacacagttttctcttgtggcttatcacttggaatgtggagagtcatttccattagggaaccaccaggaatcttggcaacttagcagccacaggagatgcagaaactgagtagtgatttaaaaattcagatcactttgtttgttcccctagaataatacattattatcattaacaaagtaactcaacttacagtatcaaatcaactgcagagccattgatattgatgttaccgtactatccaacacattatgtttagtgttgatttaagaaaatgttgattttatttgatgtcatgggtgggaaattgcttgcttttgttttttgagtgaatctggtttaactgggctgtgtaagccaaggagttctaactcttcttgggcaactgagaccgtggctaatatttcattatctgtattaattaaagacagggcctggtacttgacatggcagtgtgatgtgtccaaggttagacccgaggtaagaatttagagcacagaggcacgctcacatgaagctgccaattcctctgctttttcaggtagaggctgaatgatttccgcacctttttatagattgcatgacttcaaagatgcacactaatactacggctccttgggaaatctttctgcactgatccctttgaatcttcagtgtttcaacatagacttgttacaaagagaaggaatataagcctctgttctttcttgtttccctttgttaattcctttttcctttcattccttcttatctatccctttcttaccttctttatttcctcgtttatttgggctttttcggttgtgaagatcagtaccttgaaattcagaatagatggcatgaagcacttcagctttgcattcaagtactcatgtgtatgatcaagcatcgtcatgatcattattgactggaaagcctgtaagaagaagcggataaggccagggtgcagactgggcagtagttccctgtcatgaatccactctgcagttgttttataacatgcaacaaaaactaaagtctaatagcactccccaatgccaattttttttctttctcttttttttttttttttttgagagacagggtcttgctttatagcccaagctggagtgcagtggtgccttcacagctctttgcagccttgaactctgggctcaattgatcctcctgcctcagccatctgagtagttgggacaacaggtatgcactaccatgcccagtgaatttaaaaaaacaaacaaacaaaacactttttgtagagaaagggtcttgctatgttggtgaggctagtctcaaactcatgccctcaaatgatcctcctgccgtggtctccaaaagtgctgggattacaggtgtgagcccccaaccccaaaacttgaatctgggccacctttactgacttacttattactatgtagaatatggtacaggtgacgctgcagactcttgaagttaggtcataaaagatgatcctgcttccgtctggttgtgtctctcactcatgggatgcttaccctcaaaatttggccaccatgccatgaggaaactcaatctagcgtaggtaggaagaccgtgagaggcccaaatagagaggaattgaggccgccagtcatagtcagcttcagtcatcagataggaagccaacaactgagccctcagatgattccagtttccaaacactgtgaagcagaggctgactgtcccctttgtgccatattcaaattgctgacccacagaattcatgaatagcgcatgtggtagatttacacttcaaagtctttgggtaatttgataaagatgtggtaactgggctatgctctaatcaataatcttagctaagatttatcagaaattaaaactgtatacttaactaaccacctagataggtgcaggcatatatgaattcaccgaaatttgactcaactcccttggttaatttaaataaaataaaagtaaataaggggaaattgcatactcctatctggactgttttcttatggttttggaatctctggcaggtagaagtaattatttctgtaactcttaggcagggcttaggaattatctcccttaggtttgacttctttctttcttgagaataagcgctgtgtttcgcaagagtaaagaagtggcatttattctgttgtcacagcattactgagctcgagtggatggctctttatttccttctcgtcttttcttttctagtctttgtcaggacccattcctttacccctctttgcttttacggttttcacattttaataatgtaaaaccatgttccccaaacttccgccttttttgtcccatttgctccgctgttacatcatttgtttttaattacgttcatatttacttatgtttttatgcacagctatttataaagaagattctataatactaaagtaaatagaagagcaatatcatttgccataaatacaaaggatccctgaaaataaatatactgccagcctgggcaacatagggagatcactgtttctacaaaaaataataaattagctgagtgtgatgttgtgtgtctgtagtctcagcttcccagaaggtcaaggcaggaggattgctggagcccaggaggttgaggctgcagtgagctacaatcataccactgcactccagcctaagcaacagagtgagaccttgtctcaaaaaataactggctgggcatggtggctcatgcctgtaatcccagcactctgggaggacgaggtgggcggatcacgaggtcaggagatcgagaccagcctggccaacatgatgaaaccctatctctactgaaaatacaaaaaaaaaaaaaattagccgggtatggtggtgtgtgcctgtagttccagctactcggtagcctgaggcaggagaatggtttgaacttgggaggtggaggttgcagtgagccgagatcatgccactgcactccagcctgggcgacagagtgagaatccgtctcaaaaaataagtaaataaaataactaactaggctaggcacagtgggtcatgcctgccatcccagcactttgggagtccaaggcaagaggatcacttgagcccaggatttcgagaccaacctggacaacgtacagagacctcatctctacaaaaaataaaacagctaggcatagaggcacacctgtggtcccaggtagttgggaggctgaggcgggaggatcctctgcacccaggtagccgaggctccagtgagtcatgatcatgccactgcactgtagcctgggtgataaagtaagatcctgtctggaaaaaaaaaaacacaaaaaactaaataagtcgtccatccgtccatctattcatacacacacgtaaaatgaaaactaaagcaaaagagtagtattaaattctagttagagacttaggatttccagtgactgaaattggaatgttaggtgttaaagacacacatcaaaatgagactcttggttttttttataagtgcaaggattgcaagatacctgaaaagggagtatttttcccccacatgcatctcaggagggtagcctcagatataagcttaggagtcctgaatttatcatcaatatttatatcgctgtttggcccctaacaccttccctatgatagccctaattggaatatagtaaatgtttgttgcatgaatcaacctatttaacctgtgcgtccttaaatcttacggtctgcgggttgacatttctagtgaagggagacatttctttacctacctgggacctcagaccttggacctcactgaacttgagagcagagctggtttatgtgtaactgaacctgatggttagtttcctgtttcaacttgattaggtcccagtcacagggtgcccacatgtttggtcaaacatcactctggggtgtctgtgagtgtgtttctgggtgaggtgaacatttaaatcagtcacctgattacagcagattgttctcaagtgcctgagcttcgtctcatcagctgaaggtctgaatagagcaaatagactgaccctacttcaaagagaactccttctgcctgatgactcaggtggggacttcagtccttttttttttttttttttttttttttttttttttttttttttgagatagggtctggctctgttggctaggctggagtgcagtgacgcaatctcagctcactacaacctcagcctcccaggttcaagcgattctcctgcctcagccttcccgagtagctgggattacaggcacccaccatcatgcccagctaacttttgtgttgttagtagagacagggtttcaccatgttggccaggctggtctcgaactcctgacctcagatgatccacctgccttgacgtcgcaaagtgctgggattacaggggtgagccaccacgtctggcctgacatcagtcttttcctgccttcagacttgaactgaagcatcagcatttcttgtgttttgatcttgctggagttggactgaaactacacatcagttctcctggctctccaccttgcctatagcggatcttgagactttttcttattttatctatctatcaatccattggtcatcaggttctccagagaatcagaaccaataagagatgtcatacacaccacacacaaacacacacacacacacacacacacacacacactaatatggttctgattctctggagaaccctgactaatacagaggcaagatcctgttttgacgtgcttgaactcgaggacttatgccgatgttaactctgagtgttcctgttttatactcagccatacagatgctcagagcatacctgcacaagtcaactttttgtgtctgcaggcatgggcctgccctgtacatgaggagacagcagacagttcctctccctgctgctggcctcttcatcttctcctggcgtcaccacggccaccgtgatgcctggctcaagtactagttctatgtcaatgatggtaccaatggactctaactttagaatgttgttgactgaaggcccctgccccctgccttgctttaggtggaggatctggtcaaggctttgtgaatcaggggatgctccacacctttctgctctctgcaacagggccagggatctgagtcccttcttgtctatccagaaaccgtatacccagtgttctctttctctcacctccgaataggtgggccttcccaatttacctgtgagaaaactagtgtgccacctcaagcgattctggcctctgttgactgtctgaaccctgtgttttgttgagtggtgcagactagagatgaagacagggattcggcttcgcttgctttatcaagggaatgttcttgggacaaatgtgtgacaggtgaggaaaacaacataggaaaggagacagaagtgaagagaagatgtggtctcaaatgaagtctggcttcaggtttatccttggggggctctggaataaaaatcacacctcaaacttgacccgcttgaggccagaaggccgggctgtggtaccttcgtgtcggacagtcataggctatcctcatggggacctgtatgttgccaggtgtcttgggcaaggtggacaaggatgccagcaaagtgaaattttccagagaaggtcacaaaagctaggaaatggcacagcagctgctaaaaggggatctgaccaggccaccaacagcttctgcttcttcccaaagtcacctttgctctctcctgaccaccgttggtgtctcaaagtctcacatgtgacaacacacatatcatcaaattcatgagtatccatggcacacaatgttttccttttcttctcttctctttctttcttgttttgttttgttgttttattttgttttgttttactgagataggatctgtctctttcccccaggctacagtgcagttgcgtgatattagctcactgcagcctcaaacttctaggctgaagtgatcctcccacctcaacgtcctgagtagggagggcactacaggcgcatgcctccacatctgactaattactaaatttttaaaaatttttttagacactgagtctcaccgtcttgccctggctggtctcaaactcctgggctcatacaattcccctgcctcagaatcccaaagtgctgggattataggcatgaggcaatgtgcccggcccacaatggttttcatatagctattgtgtattgcgttattgccttagtcacagaagcccataaaaaacagattccaataaagagactaggtttgcagagtgatgagtggggcccttgaaataattacatttagtgggttatatgtctatttttttggtcgttccttgctcatctgtctttatttttgtttatttatttattcatttatttgagatggagtctcactctgtcacccaggctggagtgcagtggtatgatctcggctcactacagcttccacctcccatgttcaagctattttcctgcctcagccttctgagtagctggaattacaagcgcccgccaccatacttcgctaatttttgtatgtatatgtgtatatatatgtatataatatatatattttttagtacagatgcggtttcatcatgttgatcaggctggtctcgaacttctgacctcagaatgatccgcctgcctcagcctcccaaagtgctgggattacaggtgtgagccacaatgcccagccttatatatgtatttattaagtttggggggaacaggtggtgtttggttacatgaataagttctttagtgatgatttctgagattttgatgtacccatcacccgggcagtgtatactgtagccaatatgtagtcttttattcctcaccctactcccacccttctccctgagttcccaaagtccattgtatcattcttctgcctttgcatcctcatagtttagctcccagtctacagggttatattaaaagaggaaaaggggtataagaatctaggtatcatggatgatgtcctggtcctttgctgagtcccatttttttcttcctcacctgatttcccccatctggcagaaacttttacagagtgtttgcagaagagaagcctgtaaactctggagtgtgtcctgggtggtttgtccttgggccactttattccctcaccgatcccttccaaaggccatgagttcccagtcagtcatttccctatatcagtatttattgttttaatcaattttccccatcccaagagaaaggcaccaacatgagtccatgtgttttaacatagcaggggtttccctgtcagagcccggtggacttctgtggccataagcaagtcaaggtgggctcctaagtggcagctgcccacttccagaaagctagaggttctaattatgtcttcctgaaaaacagttcaattaggtaaagtgacattttttaagcccttgtgtgtgtccgactcataaaagttcagaaggttgttactgagaggagactgcagtcattttaagatttcagtagctgctggagttgagtagataatttttcccctttctaatattatatattaggtgtgctcttgtgtctgggtgaaacagagcaatcacaatgattgttttttcagtatggtaataattaggcataaaatcaatatttatgtgtaatgtgccatttgaagattctccctgtgtatgatgctgggttttacaaaggaaaatctggattcaggtggccaatgaagtgtcacgatataaaaagagaattttgaaataatgagaattccactcctttgggagtattggcatatgttaaaatacaaatatatctgtatttttctcacttttattagaagagtgcaagtttgttcaaaacaactgctggattatctagtccctgaacagccatttatatttttgttacgcttgtggtttttaaatcatcctcatttccttgatcgcatttgcttctcctggctagaatgtgtaggagacgggtcggggagactgtgcccatttgacaggtgtgaatgcgaacagaggctgcagctggttagaccagggctgtgcaaccctagagccattgccttgaccacaaagccacagtctcctagtcctaatattaagaggtaggaggtagatagagattgtcccttaagccacattccattcttcatatttttgtacccattagagtagtgctgatcatttgccttcattgctggggtcccctaaatgcaacttctcatgctgccaatttagtcctggccctaggaagacgtaggtgataggatagaattcaacaactagaagccatggtttcctggttggatagacttcctctgccaccagaataaaggaatagagggttcctcactgtgccccatagctgcaaagtcacaggaagcttgcagcaggccagtggtaacctctgagtgacttctgagttcccagagctaggaccatgacttttcccctggattcttaagtacccggctaaaattgtgtttgccgaatgaaagtgtgatcctggaggccatgttgtttgtggttcatggaagggtgcttgttcagcttggtcaaagcaagatggtcatactgggttttggtgcccagacgttcccaacactcgcagcagagggcattaggatcatgtttagccaacaattttggaggcacccaacagtgattggatgtcatgtgctttcagaaggcacactacacatcttcggttcctccaagctctaggaaagggttgtggaattgggttgggtgacaacaggtcggtaagaagagggctgggctgagtgtaaagaaattccttggctgggcatggtggctcacgcctgtaatccagcactttgggaggctgaggcagataaatcacctgaggttaggagttcaagaccagcctggctaacacggataaacctcgtctctactgaaaacacaaaaattagcttggcttcctggtgcatgcctgtaatcccagctactgcagaggctgaggcaggagaatcgcttgaacccaggaggcggaggttgcagtgagccgagatcgtaccattgcactccagcctgggcaacagggagagattccatctcaaaaaacaaacaaacaaacaaacaaaaaccccagatattccttattatggaagaagaagcaggaaatatgtttttgaataatctgggtcagagaattgtgcatttattattgctaggatgcatatacacattgaactcagtcaacttactctctctaaattatctcaccggtggagacattgcctcaggagtcgagccctgtggtgtgcctcctgctgtcaccacatttgaccacctaactgaccccactgtggtcacctttgccacctgccctgctttggtcccttctctgcattcgccccatgccatgtagcactgctgagtttgaaaataattgcatctcctgaaaactccatttcttagagagtgagctccagcaccatcagcctgaagttgaagaaatgggactcaggaaggctggagtcttcaggcgttcttacaatgctgatgcgactcagacggctgcctgcactgtcctctgtgcttctaagtgaaattacccgtcggggggctcctgagagttaaatcaagcagcctctcttgaagcacagtaaatgctgacgtgatttgtgaagatggctctgctaatagggttggcagcgtcctttggcttggacctttggaccccggctggctgcggaagggagggaaggcagccttggaaaactgatttccgttgccctctgaccatgagaagatccctgtttaggagctagaattcagagttccacgtgtagagggggattccacagtgtgtggtgtgcagagagcactcgtctttcaggcatggggcgccgtttcatttctcctagtgctggaaggggacttggtgaaattgatttggcaaaaaggttaatgtgttgttatggctgccagttggccgattgaagcgctagtaattggggcaagggaagcattcaatttgacacaccaaatgcaggtccaccctggtggatatcttggttgcagcactctgtgtgtgtacgtgtgtgcatgagcgtgtcttagagatgcttttgctcctcttataactcctatgataaaaagagttgccattatcatcctttgtctactcaccagcccccaccagaaaccctcacagaaaaaataagagtttattttttcactatgtcacattgttggagaactgtgcaaatacaagcccttctcttacaggccatgggtctcctaagtgggatacaccacgatgatccactggggcagtggccagcaaagtccctgtccagccagccactcgtttttatcaataaatttttactgaaacacagtcatgcctgttaggttaggaactgcctagcgccacttcacactgcagtaggagagtgagtagttgtgacagagaccatttatcccacaaagcctagaatctttattataatcctgtaacagaaagcatttactgactccttagcattgccatgtttagcaaataaaattgcaggatgctggtcaggcgcggtggctcacgcctgtaatcccagcattttgggaggccaaggtgggcagattacttgaggtcaggagatcgagatcagccgggccaacctggtgagatcccatctctactaataatacaaaaaatagctggcgtggtggcgcatgtctgtaattacagttactcgggaggctgaggcaggagaatcacttgaacctgggaggcagaggttgaagtgacccaagatcaccactgcaccccagcctgggcgacagagtgagactgtgtctcaaaaacaaaatatctggctgggcacagtggctcatgcctgtaatcccagcactttgggaggctgaggtgggtggatcacttgaggtcaggagttcaagaccaggctggccaacatggcaaaaccctgtctatactaaaaatacagaaatcagtggggcatggggcgggtgctctgtagtctcagctactcaggaggctgaggcaggagaattgcttgaatccaggagacggaggttgcagtgagttgagactgtgccactacactccagcctgggcggcagagtgagacgctgtctcaaataaatacatacatacaacataaagtaagatgttaaagtaaattttaattttagataaacaatggataattttttagcaaaaggatgttccacatttaactggacattatctctgtctctctccctccttacctgcctcctatcctctcttcccaccccctacgatgtctatgtatagtttcaacctggcaaccctgtgacctcagcactaggatatggatagaaaacatagtagcccctatttacctttatcttttatctcaacccatttaaatgtcttttccttgcaatgttttgtaatattacatgtagattgtacatcgtttgtcgataaatcagtgtacaaatactaggggtgagtgtgctcaaaacttatttttactgataatagtccatgatcaaggcagtttggagaccactcaggacagggaaaacgcagactcatgtgacccatcagggcttcagggtgtcctctggtgaagggcagcagcaggacagagccccacttctagctctggctcaggttaagtgtttcagcgccctggcttctgtgtcttcatgtgcaaatggagataatagtcagcacctatgcaggttactgtgaaaacaggttggaagtatttatctacagcgtggaccagagcctctggtatgtactaggtgccctagaaatgttctttcctctgactcaaatgacaaatcagtttctagggaaaggaacgcacagcgatccccagcgcatcacgagaaatctctctccagctttgccctggctgcgctggtgactcactcggggctaaaactgtttatgtctgcggagtcagagcgttctgccctgcggtttcagttcacatggggttgggcgacacagttttgttttcactttggtttatcgtgtgagtttccatccatcaactcttttgtatctgatgttcttgggaaactttgcgggaattcacttgaaattgtccagtgaacagccattgcgagtctcatggtcagagccgggggcttcccagtgtagggtctggtcaaggaaagggccacttcctgggcctcccaaaaagaggaaggagaaggccctggcttgtggaagagtaagaggggcctcgttaatgtctcccaagcacagtaccccaactccccacatacagtcccaacccttactgcagccgggaggttaggtgtctgccgtgctcatgaacaggaagtgaacccgatcagcccccgaaggaaacatccgtctctctccttggaggagacacttgagtgtctttctctgtgtgctgcagccgttattgatatcagttcccaggcaaggttcatgctggcagaggaggccactctttctgcactggagagcaaaagccatcttatctctctgagtgcaaggtgacagtgaggagattggccctgtgtatccctcagagaccagtattccctcatttgccaatctagaaagaagactgtgtttgctgtcatttgtttcttaactcattgattctcaaacagaatcttcccagggatctgcttcatgctgtattttgtactgtgtcctgagatgatgaggattcggtgtctaccctcaagaagcatcatttagagaagaaattagaaaagtaagtgaggcaggagaacaggatctggaggcagggaatctaaggctgattcacgttgactttgtataattaaatcaaaaggaaaacaccaactttccacaactaagttataaaaggaccagaggctactccctctgcaacccctccccacttttctgagttgcagatggaaaattgaaagtacccctgattggttgctttccacgaccattcagccgtttgcataggagctgtaactttgtaacttcgcttcaccctctgattggttgcttttcacaacctatcagacatttgcataggagtgtaacttctttccacaaccaatctgactgattgtgggccattacttcatttccatgaggtgtacaccaagtggccaatgggagacctctatagggtatttaaaccccagaaaattctttaaccaggctcttgagcctctatgcttgggctgctcccaccgtttggagtgtactttccttttcagtaaatctctacttttgttgtttcattctttccttgctttgtttatgcgttttgtccaattctttattcaaaacgccaagaacctggacgccctcctccagtaacataatgaatgtctggatgtggtatgaagagtattggggtacaccacagcagcgtgtgctctgagaacacagtaaacaggcatttgatacagatcagaaggtccgtaaaggtggtatttgaactaagttttgagagctgggtaagagtttgtgaaaagacagggcttaaggaaggatatagtaagctgaaggcacaggactttagaaacacataggctataactgcaaggtgtgtctcagaaggtacatgtgacgtttcatttttatttgtttgcttttttatagtgactgcatgatcattatatgcagaagacgcttgaaggggccagattaggaagggcccatggtccacactgctttttttttttttttttttttttttttgaaacggagtatctgtctctcacccaggctggagtgcagtggcacagtcttggctcattgcaacatctgcctcctgggttcaagcaattttcttgcctcagcctcccgagtagctgggattacaggcacctgccaccacacctggctaatttttgtatttttagtagagatgaggtttcaccatgttggccaggctagtcttgaattcttgaccttaagtgatccacctgcctcggcctcccaaagtgctgggattacaggcgtgagccactgtgtatttctattaccagcctgcactgcatttctattacccgaaaacagtgtggaaaatattaattacaagggagattaaaaagtaaaactggttggttggcctgaagacccacatggtgacttcactaaagtcattgggtaagcaaagaagagcaacactctagttttcctccaagcttcaacgttttctgtttcctcctatgtcaggtcttaatttccctacctgattcaggctgcgctaagctgacttcatcatgactcctggcttccccagtccctgcttcccagcacataccatttattcagtgttggccagtgacgcctgccactgcattttattgatgaagaaatggagatctcaagaggtaaaaaaaactgactataggagccaagactagtttagagtggagtttgaatatgaacatgcctctgtctgtgaaagccagtgtcccttcagccaggatctttcctggaagaactcagtattaaggcacttgattagttcttcctgttggtggactgattgattacatttgaatctttcagcaagcttttggctgagctgggcatcttccccgccttcctccacctctgccttcaaaagcctgaatttccaaggctttctgccatgagtacttagctttgaaaaacatgagcatatttttcattcttcttgccggcctctccctgtgtcatgcctgttattcttttctccctcaacattgacctaggtcagaaggaccctattttaatgtttagcgtttgggggtcactccatagagaggggtttgtggaaatcctttttttttttttttttttttttgcttctttctgtggatctgtttggaaatgtaacattttaaagcccttcttggctggaggattttttatggtaaacataaaacgttcattgaaacattaaacattttacagctgtttttcagcacataaattttcatagacatccaccccctcactgccacaccccctcatagatttcttcttttcctcctccttctcctcctccctcttcctcctctttttccccccccttcaaatagttccaagaccagagttgagggtgggtgggtagagggctagtttacagataaaatggttggtgtagatcatctagtttggaaaaagcacattgtattttaatactaggaacgtgtgcatgccagaaacctgccaaggaaaacactcccgctgctccttccagccctgactccagctgctatgaactggaaccctgcaccacgtctcagaaggctactgggaagggccataatctgtatccatccacaaggagaggtggaggggggctactctaagaagccaaaatgctcaggaaagccagagctaagatggtgcaaaccagcatgtgatttgtccaaggacatcgttttgatatgatgaaccatgggtggtttgggcatttgtcaaagcagggtcagcagaaagctgacgtagttgggtctaaagtacaacaggactgagcatggtggctcacacctgtaattctagtgcattgggaggccaaggcaggaggattgcttgaggccaggtgttcaagaccagccttggcaatatagcaagacattgcctgtacaaaaaatttaaaaattagctgggaatgatggtgcatgcctgtagtctcagctacttgggaggctgaggcaggaggatcaactgagcccaggagtttaaggctgcagtgagccatgatcatgccactacactccagtacactccaggactttaggcctgctaaagtgcattgtagtaatactagatatcagcacccttgccatggcctcatgagcagtgaaatgaactttcttgctcctggatttttggctcttggccttgtaatttttttttttcatgggatattagtcaacatgatgtgagcagagtcttgagatgtgcttgcatgattggctttgtactcctgcatttttcccatagccaatgccttttcttcagcttgggctgcagaatgagatagatgaaacagacctgaatctgacttataccctggagccattttcagcaaacccagtcaatatcaggccaacctcaaccaattcttagactagtgagtgaggaaaataaatatttgatcttgtgaacccttgaaattttgaggttgtttgttatgcggcagtattttggcagtagctgatgaatacaccactccccatccctagtggcttcctataccatttagaataaaaatacacgctcttttccagggtctacatgtcctgaagacctgaactcctgcctgcctctcagtttatttcctacctcaagtagctgtgcccaatgtcctcccaatatcctgcaaccactctagtcttctttcttttcctgggacccacagagcctatatctgcttcaaggcttttgtacatgttgtttcttttgcctgggaagagtggtggggggcactttcttgcccattttttttttttttttttgagatggagtctcgctcttgtcatgcaggctggagtgcagtagcacgatctcggctcattgcaacctctgcctcccgggttcaagcaattctctagcctcagcctcccaaattgctgagagtacaggcatctgcgaccacacctgtctaatttcttatctttctaacacagtttaaatatcactttctcagaggcctaccctgaccatcctacttaagtaacaataataaaataaaaatacccatcatttatgaagtgctcattatgtgccagcgttcttagcatctcccaacaaccctaggagacaggcattacaatgagccttcgtaatgttcagatgaggaaactgaggctaagagagccttggcaagctgagttacttagctagcaaatggtggagtcgaattcaaaccctgcctctcctcacccactctgtttcttttcttttgagcacttaccactttctgaatatgtatacaattgtttcctcgattactgtctgcctcttcttccctagagcgtcagcccatgagcttatccagcctacagaggagatgctgcagcttggcagagcatggattgctcaacataccagagtttagtcctacctctgtctccaagctgctccatgatcaaggataaactataatctttctctctgcctcagtttttccacctgtcagtggaggggcatgctcttggatgcctgagtttttcttagactcagcatcctgcagccgaaataaccatgcttcttagtggtcctcttgcgtagcagcctaagaaactccaagtccatctgcgccgaagagtattgaacttggccagagcacttgggatctgcagaagtgtcccctgtctgttagttttttcacagactctgctctttctctcccagaccggaccctccactcctctatctcgcatttatccattgcaccccgtgtcattgccgaattcctgagctacaaaggtgaacaggcaccaaagctagggcagtgtccactcaatacatatctgatgaatgaatgaatgaaccttgtctaccacagatagctcaccacaaataaacattttaatctactataaaatagctcaaaagactctatgcaaataattactgttacccagtggtggaagtgcttcactttttatggaaagtctttcactcatttctatctgcagtatttactgggcatttttccacgccaagccctggggatacagagttaaataaaatagaagcttaatccaggcatgctggctgtaaagttcacctttcggctcctttctgccattcttattagggtcttgccccatcttggcagcaagcctgctttaccattggagacctcagctctgattacaatacgtccgtgatcaacatgccctaactggttagcagatggcagctgcatgaagtcactgggcccagataggaatcaacaagggagattaggtaaagtgcttatttgaggtgctgtcagggcccgtggcaaagggttccctcattccctctgcagttatttttcatgcacactcggattacactgctcggtgatattacatctgcatgcgtcttgccctctgacacggcaaacacagatgctgcccaaatccttgtaaagccatatatcttaagtaggaaggagcatctttgcaggggaggtgaattgatttgcaaagcagcctgacacatggtctcttatttctccttgcaatcaaataattcatctttatgcccgtagggccgtggtgaaatttgaacctgaccaaatcaacgactgcaaggtttatttgtagcagtgggatcagagaaattagccaagtgtattctaaaattatcaattgctgatcacatggtctggatgtgttttagtgcttaggggttggtggaccgaggctatggtggcatagtcctccatgaccaagggctgtctgcatgggtacgcagataaaacatgcactgccatggggtgacctgtgtgccatgcatcacacacagactactgtttaaccacctacatcataggtagatcctgcattttacaaatgaggaaacagagctcgagagaagttcaatcctcttccctacagagaggaaaggggaaaaaaatggactttcaagacagctgaaattcaaaacaaaacaatgttttaaaattgaatacagccttttgcattaaaattaccattttaataatagtttaaaagagagaaagagagagacccaaaatagtcaaactgaggttttgggttctggtgatagaatattaaatcataatgaagcatttaatgttttgttgttgttacaattgttgttttaccctagggctatgcaaagtagtttaaggatgtatttatttcagtggggaaaaaaagtggaggatatacatttggaggataaggaagcatgaattagggtggaggaagtgttttctggtctagctaaggaggaaaaattatagacctcaaaataggtgtcatttaatatatatctgtgaaaatgggccaaatagattgcctccgttaaagccgtattggatgttcaaatctcgagttacctgaaatgcaactgtacttcctatatttaaccaggctttttataaactgttcctcttaacacctcaagctgacaaccacatcctgggtggttatttaataccaagtttgactttcttcactttgagggtcctcaaaatagaaggtcagagagtagacttttaaaagtcttgcactgtttacaagtcagatgctttttggcagagtgactctcagctccccccaacaatcccttcttgtcgttcagtagtagatagactctatcagggaaaaataggagaaataaaataagacagcatatggaaggcattgctgaaagtctttttcacaccttaaaaacaaggaagaagagaaatgaaaataaaatagtgagcaacacctcggtgaaagtagaggtgtttgtacagttcagctgctgccttattcaaaaacaggaagaaaaacccactgcccaggtcagctggtgggtgatctccactgaactcctattcagaggctcagtttctctgcaggacagaaatgagaggcacaaaatttcatagctgtcttgcccctcctgtggtctgtaagaatgggaccaggactcctagttgtgaacccgaaaggatttccattaggatcaggaagtgtgagttggcttagaaaaagtaaagaaagaacagtgctgtttcatttatttatcatgtgtaagtaaactgggatttattttattttattttttattttttgtttcagtttcggggggtacatgtgtaggtctgttacatggatatcttgcaagatactgagatttgggcttcaattgaacccatcacccaaattagtaaacatagtactcaataggtagtttttcaatccttttctccttccctccctagtccccccttttgaagtccccagagtctattgttcctgtcttcatgcccatgtgtacgcagtgttgagcttcgacttgtaagtaagaacatgcggtatttggttttctgtttctgcatttattcgctcaggataatggcttcaagctgtatccacgttgctgcaaagaacatgattttcttcttttttatggctgtgtagtatttcgtggtgtatacgtaccacattttctttaactaatccaccattgatgggcacttaggatgattccatgtctttgctgttgtgggtagtgctgccaagaacgtgagtgcaggtgtctttttagtagagtgatttattttcctttgaatgtatacccactaataagattgctaggtcaaatggtaattctatttttagacctttgagaaatctccaatttatttttcatagggacaaggttgcagagaaaagagaagagtgctgtttcaaacagttgaaaccattcctacttccaaaaagaatttgactcaaaagggaatagtacactacatataaaagacagatgtatttaatttgtgtttcgaactacatatcagaaattagttagaagaagatatgagataaatatacctggaaactttatgaattatttctgacatctagcattaaatttagctgggtttcctgggagtcaaaagcaaagagttttcaaccaaaaaaaagaaacagaggtgtatagtaacacacctctgtcctgcaacataactgtaagaatttatcagattatatatatatatatttatcagattatatatatatttatcagattttatatatatatatatatatatatatatgcatatgtttgtatataaatatacatgtaaagacccaaaactcatataaaaagacaaggtgatacagcattttaaaacagtttactaaaaataacaaaacattcttccatcagtcatgcatgccttatatttatgtagatacaaaaatagagtttgatattaaacaatactccaagaaagccatttctgcagagttaaaaaatacgtaggttcagttccttaccaacacgtagacatgttgtgatgaaagaaggaaaggaaggaaggaaggaggaagggaagaaggagggagggagggaaagagagagagagaaaaggaagagaaaggattttctagaaaaagaaaggaaggagggagggaaggtaagaaagaaattaattcccattttagagtaagactggaggcagagtggtcacccagatgaaaatgaataacccaactgtgtctttcttctggtgcctccacgtggaagtgggctgccacaatacttctaaagagaattggcatttttctttaaataaggaggaggatgaggagagagacgacacaaaattcactcacagaagtgaacataaattctaacattggtaaaactttgtctttgttttaaataatcagtcagttgtctcaatccataaaagagtatctcttgtacaatgtctgcttttgagtgattcacttcgatgcgtactgaaaatatacctttaagtagttgagtgacttgaaatattggtaaatgttctttaatattttgtctgtcagtgttagagactatcaggttaaaacaaagatattctttctttcctttttgtttttgacggagtctcacactctgttgcccaggctagagtacagtgatgcgatctcagcttactgcaacctctgcctcctgggttcaagcgattcttctgcctcagccttctgagtagctgggattacaggcacacaccaccacacctggctaatttttgtatttttagtagacacgggatttcgccctgttggccaggctagtttctaactcctgacctcaggcttcccaaagtgctgagattacaggtgtgagccaccatgcctggccaagaatattctttctaatatgatttagctaacaggttcagcagatttttaaactcactttcaaatcatgataaaattctttaagataaacatttgtcttctgttttcccctgagagtggtttagcatttatggagccctgctttgtgctaatgagtttatatgccctgtcttctttaatcttcaccacaactttatgtaataagtagtctccaataaatttaatcacataattacttaaatggcctggcgagccgccttacctagctggccaggaattccaggagtcaggcttcctgatctaaatctgtcctggtcccatcttggctgggtgccaccagcagcaacggcacactccagcttaaatatcagtggggataattctaggccgtttgtctgcctggttcttccaggatagaggcagtgatttcagtaatctcttagggctgggcacggtagctcacgcctataatcccagcactttgggaggccgaggcgggtggatcacctgaggtcaggagatggagaccatcctggctaacatggtgaaaccccgtctctactaataatacaaaaacaaaattagccgggcgtgggggcaggcgcctgtaatcccagctactctggaggctgagacaggataatggtgtgaatccgggaggcggagcttgcagtgagccgagattacaccactaccctccagcctgggcgacagactccagcctgagcgacagagtgagactccgtctcaaaaaaaaagaaaaaagaaagaaagaacctcttaggcaactctcatttcattatccaggtacaaagacaatgagtaagaagagtattggggttgggaggaccagtcacccctgtgtcttaagatacttctcagttttctttgttgcagcaaatattactgcagagttttagtgcattatagccttcttaaataaaacttgcccaggtgcagtggctcatgcctgtaatcccatcacattgggaggccaaggcaggtagtttgcttgagcccaggagtttgcgaccagcctggctaacatcatgaaatcccatctctacaaaacataaacagaaattagctgggcattgtggtatgtacctgtagtcccaggtactcaggaggctgaggtgggaggattgcttgagcctgggaagtcaaggctgtagtgagcaaagatcacaccactgcagtcaagcctgggtgacagggcaagaccctatatcaaaaaaaaaaaaaaaaaaaaaaaaatatatatatatatatatatatatatatatgtatatgtatatgtatatataaatttaaggaagcatagaattgaagaggctattccaaggtcacatgacttttaagtggcagaaacaggggaattctgtctaacacaatccaatttatccatctcaagaaaagagatatgccaaagagaatgattattaaattatcattaatgtgaactcttgtaattactctcataattttctttaggcttatcccattgggcattgctaagtattattagattgtgattataaatggattccgccaggcatttctcttttgctctgtggcagctctttctctagagaacttggtccctggggatgccatcttctctgtcttcactcggtgaggatggactttaggatgcctcacttctcttcctgagattcttgcttccttcttccttaagggccactgatgagcaatcagtgagtttcaggaagaaggcattcaggctgatttcagacagcctaaggtcagtgtgcaagttagtatgtacctgtgtcttattattgaactggtgaatgaatgaatgactaggtcattatgaatttgtagatcagggttttgaagagtttggcaccggatttgaaagccaatgttctcttagtacctaccgctttcttttcctcaccttcctggatttcctgctcttaaggttttttgtttttgtttttctctccaaataaatggtatttattaaataaaaattcattttctcatttatcaaccagttgcagtctttggatgttttaattatataaaaaaagcatggaaactgggcattttaattagcaagtacagccttgacacaaataaaggcatggctttggttatgcagtgcatttatttggttttcttgaaataagaaaaaaagatttcttctccatcaccagagttgctgagtttgacagtgtgaatgagatgacctctaaggcctctacttatagatctgcacggttgggcctgggagctgtactacctcagctggtgggtgataacttactcacagtctgtgctgtgtcctgcactgtccattatctgcaggggtggtactgctgtccccagggaagagaatgctgtccacaaagagccagccatttatactattaaaagaatacacaggagttgaacaatgagaacacgtggacaacgggaggggggaacatcacacaccggggcctgtctgggggtagggggaaaggggagggagagcattaggacacatatctaatgcatgcggggcttaaaacctagatgacgggttgataggtgcagcaaaccaccatggcacatgtacacctatgtaacaaggctgcatgttctgcacatgtatcccagaacttaaagtgaaaggaaaaaaaaaagtttcatcaaaaaaaaaaaaagaaaaagaaaacaccggaaaaaagagactctcttccttgaaggatttaattccaggaattggagaatgtcttgtacatttcgagaaggcaatatagaaaatgcagtgggtagcccaggactcctggtccaggtaaagcaggccttgttgctattcccctggaccatgatattacatgttgggatgatggggtcttgtgatactgattaatttaaggctgcatgatgatgagggaggaacaaagatgttcttgagtcagtacctgccagagtggctgtatcctggtgttgtaatatcaaataattctacattatttagtaaatagccctgcccgaagcctctcagtgccacacacccactgggattcctgtgtgatttgtcacctggaggaacatcacctgccttggttggggagaggaagcctcaggaccctgcaccagggccatgtgacaaatacccattttgatagttcagtacccgctattaaatatgccgaatattattcctgaaaaggggcatggggataattacaaaaacatacctggttccactctcactttcgccatttaatagctttgggtctacaagtaaccaccccagatttttctcctcctctatgcaccagtcatatcaagaattactgtaacttcataggatttttgtcaggacgctatgatgagaagaacatatgccaaggagacagttttctggcaaatcagaggcctgtaagaaatgatggctttttgcttgtatgaccaagtctcttggagacaaggcctcatgtatgaactctgaggcatgagaaggctcagaattcaccccatcttcagtcttttatttgaaaaagggaagaatgatggaaaggggaggagagagtatataaaacacgaacggggatcctagagacttgaatttctagtatgtactgcctctggctaatagggatctttgacacatacgctttttctccctttccagctggccctgttgcttaaagtggcagaagtagatgtcatgttggcagacagttttgttcactgtcaaaactgggtttatctaatgtgtatttgaaacaaacaaaaaaaaatcaataaaatgagcagctttgggagccagggtgaaggcggttgagataggacagaactccagaggactcttaaacattattcaggaagctctgaagctccctcagtctgggattccagaaaaagattgattaggcaatagtttaccttagaccatgaggagatggactttagccagaacacactgaaaaacacgagaaaagttggaagaaggaattatttttagtgttctgagaatgctttattgatattcctatgagagtttcattggttactgacgctgtgtactgattgggtaaattctagcatttttacactcctttgtttcaccctgtttgttcattcattcttccgttaaactaccattaagcaactaccatatctaattttaaggtggtggacaaagaatcaaacctaagttggggaatgtggcctctggtgattctcagttcttggtagccatgtctcagcatagtcttctcggacacctaatactactgacctgtataatcgatagggtattgcagacatcagagcatgtgacttacgaggctagaccataaaaatattgaggcttctgccttactgatgtggatcattcactctaggaaaagccagctgccatgttgggaggatactcaagcatacccgtgtagaagaactgagcctcctgccaacagccatgtgagtgaaccacgttcgaagttgattctgcagccctagttaagccttgaggtgattgcagcctttgctgcaatcttgactggaactttatttgagcccctatctagaaccaccgagctaagctgctcacaagtttctgcaccacagaaattcttgtgcgagataataaaagttaattattgtttcagcccacttagttttgggataatttgttatacaacagtggataactgcccattcaaagagtctaaaccattaactgttcagcattaggtaagaaaaccagttaattgttactttcttaccacctaccccagcaccccagcaccccagcaccccagcatgaccaccatttagagggagctgcgcttttgcaaaggtacataggacactgtctgttgcttctgtacctcttgcctcatcagttagtggtgtgatgtgtttgcctgacaaataccatctaggaccctggctgcatgagcttgttgagacagctaaattttacaggtagttggggtttcaccatttaacccagttaactcttctataagtgccgtattaaagcaggtggtgtattttgaaagacgtatgtaaaaacatttgtatttatttatatgaatgaatacattttatttatttatataaatacattatatttattcacataaacacattttatttatataaataaatccatttttatttatttatataagtaaataaattttcctataaataatctttctgattgacagatagcgaccttcctgctatgtccttacatgacagaggaagagatcatctttcttcagcctcttctgacaagtccaccagtctcattcatgagggttccactctcatgactgaagtacctcctaaaggctccccctcctaataatatcaccttggagattagggtttccaaatatgagtttggggggacacattgattccacaacactgaccttctatcagatcagccaggatgctctttttcaaacttctgtcaatctttccccaccttcacaatgtgcccctattattattaatatttaaaatattgaagatctaattaatgttgaaatttttctttaaatcaattcatagattcattaactttgttttaaaaggaaatgttctatttccatcgtaaagggaagatcaatatgatttgccacatatagatgaagataaacctatatacaaagaaaatagaactatagtaattccatgtagctattattaccagagaatactctaagcccaatgcttgtgttctctttgggcaaatggaagatgagccacttgtagagaggtattaaaaaccaaagcaagatcttttgcaagtagattaattgggcaagacaaagggaataataactatgtcaccaaaattatttaatgcagggtccaggagccaccttaatcatccataaattggttaggcatgtttattaccacagattggaagcaggcttcccccaagtgtgtttccctttgtaatgccagtgtcgtaacgccactatctatacttttcaacacaattccaagtgctacctctgcatggcagaaactatcaaccgtggatggtttctttttagcttgtccttcccgttctacagcatggaggttaagagctctggctttggttccaatcgtgtcccctttcctccctgtgtgttattgattgacctctctgagcccattgataaatggagttaaaaatttatactcactggggtggtgagaaggttaagggcaatgatgtatacaagacattagcatttgctataaggaggatgtatctcagttgccatatttgtatcactaaccatttgaagattttgtgttcaagatttggaagagaatcttcttcccaagccagcattttatattttgcattaaaaaaaaccacaaaagacaaaaaaaaaaaaaacaaaaaaccttcacagacaaaacccagggcatattttaggtgtgtttaattcgaagctcctgatgtctagcaggaacctggaacttccctttctatttttgtgggtcaatatattcccacttttgatttaaggtagtacaagttgtatatgggtgccagttagggattcctggctgatctgtgcaattttttcagtgaagttatatgtggtgcttagtggtgactatgggaagattacacggagaagtgttagaacagggtaatcaactgggaacccatttcaggtgaatgccaagatgttttgaaggtgggcatggcagggaaataacaggatgccatgcttggtgagaaatgaattcgtaagtgtgcactgtctgccataaagagccaggcaaggcacagaaaatattcttctgtttctttttctattctaccctctctctgctttttcttctctcactgctgctgaagcagtgagagcctgttgagttaaaataagccagtgaggattttggtggtgtttgcccttgaagcctcttgacatacagtgtcatcaaggagcagtgggtgagcctgcccatatctcgggcacaaacctaggtactcattgaatcctttaaactaaccctctaaagaattctcaatctgtggatgagaaatggcaacacagggatgttaaactgcatgcctacaatcatccatttggaagaagcagggctggaatttgaacatgagactgtatgctccctgttgtagtttcctatggctgctgtaaaaagttagcacaaatgcagaggcttaagacagcacaaatgtcttatcttacagttctgaaggtttcgctccagagtgagttttatggagtgaaaatcaaaatgttggcaggccttaggggagagtccattcctttcatcttccagtctctagaggctgctggcatttttcagctcacggccacagcactctaatctctgctttcactatcccttcttttttctgtgactctgaccttcttgcttccctcttacaatgacccttttaattgcattaggcccaccaggctcatccaggatgtatttgtctgtgttcacactagtgataaagacatacccaaaactgggtaatttatcaacaaaaagagatttgatggactcacagttccatgtggctagggtgggtgcacagtcatggcggaaggcaaaaggcacatctcacacggcagcagacgagagagagtgacagccaggtgaaggagtttcccgttataaaaacattagatctcatgagacttattcactaccatgagaacaatatgggagaaatcgatcctgtgattcaattatctcccaccagggtccctcccacaacatgtgggaattatgggagctacaattcaatatgagatttggatggggacacagccaaaccatatcacaggatagttccccatatcaaggtccttaacttaatcacacttgcatttgattttatcatgcaaggtagcatactcacaggtgggattaggacttagacaccttcagcaagaaacattactcagcccaacacactcctcaaacctaagcttattcccaatcacacagtcaggagaggatgcccacaatgcacttggggttttgtgtctgtgtctcccctccaagaacaggtacttgcccttgtctttggagctcacagccaagtcctacagtcagcatcagacggcttgtctcaagctgctgatttccgggagcaaagctgctgtgggacatgagactctttgaggcagaatacctctcatgcctggagagcattacaggctgcattagtctgttttcactctgctgataaagacatacccaagactgtgcaatttacaaaagaaagaggtttaatgaactcacatttccccatgtctggggaggcctcacaatcataatggaaggggaaaggcgcatctcacgtggtggcagagaacagaagagagcttgtgcagggaaactccgctttataataccatcagatctcatgagacttattcactatcatgagcatagcacaggaaagaccctcccccatgattcagttatctcctaccaggcccctcctacaacacgtaagaattatgggagctacaattcaagatgcgatttgggtggggacagagccaaaccatattacaggctaatgactgagcgggggctgtttcttgttgtgttcttataagaactattgcattttctttttcttccaaatatagttaatggcctcatcttttctggactaggtttgtagtagaccataagcaaaagagttcagaaagcacggcctccaagaagtcggatctgcttgtctttatcaatctgtttggattttcctggcccatttactcacaaatttaaaagacatgatgagttttcagggagaactctttagcatttacattttaatttagttttgtttacctgtttagtgccctctcggttcccagaccatcaaactcaccattgtcaccggggagaaatttgtgttggctgaaatctgtagtggttggtctgctgcttttctttctctgctcatctaccctgatagtttccctgtggtttgtggtgggctcacagctcttgacctcaggactctcgctggtctagaggagattggtttgtgggggcgtctgacatgtttgggttctttgtgacatctgggccacccggttgagtctgacaagaaacacttaatacctccttggctttgaagctctcctttgtggcactacaaggtcctctttgaaatcccacattcttttttggatttaggtattaaccccttggtgtgaggagaaagataattgtcaacacacttaggagagaaatcatgcagtaaagctgacccgacatagactaacttaaaactaactagttcattagtgctaacttagttcattagtgctttatctccttgtgtgtgtgagtgtgtgaggggatcaattatatacataagacaaagaccacctaggaaatgtttgagaaactgtgcagtgaggatgaatcaacaagtaaatatcatgagaatttcttagattgaagaaatattactcctatttggtgtcaactctgtgctggccttttcactgaagttctctgatgtaactgcccacagtaatcctgtaaggtatggctaatcatttccattttatagattaggaaaccaaggtcaaaagtggtgaattgatttgaccaaaatcacagacccaggaatttcctcagccaagagcatacagcagctgtgtcttaagactgtgccctttcatccaccctcttggtactcaaagcttggtccatgaaccagcagcttcagcatctgctgagagcttgctggaggtacagaatctcaggcctgactgaccccaggcctgctgagtctgaattttaaccagagtctcttggtgactcgtgtgtactttagaaggggaactgctcaccgcccccacttcccactgagtcgaatagacattaagtgagccttccttatgtgctcagcctgtggtgaggctgcaaagacaatacgacccagcccctgtaatgcaaaattcagagcatagggcagcacactgctgccatgagtcgaggtgacacagtactaacagtgggcacagggggctcggggcacagaggaggggtgcttcccagggagactgcccgttggagcttactcctaagctaattgggaggcaggaatccactgtggctgagaacagcagctctgaatttgcactgtctggtttcaagtccaaattctactacatcccagctgtgtattgtggggcaagttacttaacctctctggcctcagtatctgtatctgtaatatggggaatcataaaagcacctacttgttaaggcatattaaatgcaacgctactttgaaggactcatggtagttaacacccagtttggtaagtgttattattgaaggctgagaacagaacgacaaacaacaatcacaacaaaaggctggggaagattttcctggtggggggaccagatgagcaatagatctccatatgcagaggggtaactgagtacgactctgggacttacactagaacattcatattgcaataaagcagatttttcctgagcacctactctgtgccaaagcactattgtaggctgtggagatagggagctgaagtactgaaagcgttacagtcaagggccagaaaaccattgttcaagcagttggcgtatggcttgatctgtgtttattacaaagcgatacttttccttctaagtactgctttacctgcatcctgcaaattttggtatgttgtattttcattctcattaattcaaaatatgttccaatttcccatgtgatttcttcttcgaccctcacatgtttattacagcatttacttgtttctgttcatccagaactcattgaatacctgctatctaccaggcagtggcctggtcacatcttctgacctcaagtagtttatagtccaaaaagacattggctctttgggatagaggcactttttgggggagagaaacatgaatgcaattttttacatagagtatgaaactctgttccaaatctctcaaactcaggttctttgattcttaaggtatttttcactgccgagttgctgtcattgaaacaaaatctgtcctggtcaccactgtatgcccagcacctagtacagtgccctgaacatattaggtactcattaaatacttgttccacgaagttgttatttggtattcacgagttttgtctcaattccttttgattcttcttttcacccatctcatgttgacttaatttctccagcattcagttaagacctagccgaagcataattgtcagcatagtagagctggctctcctctttctaattgccctgcagagtttttggggagtctgtatgcaattgtgtacaccccaatgccccaaaaccctcttctatttcctttagcactcttgagctgaagaagccccactctccctctgccccacatctattgtgggctgggatacatgttgggcctctgcccagatcatgcttggagtggcaccagctgcgtaggatatgtgaaatatttgctcagagagatccagaagggttgatgtgagtaggatcagctggtgctccaggataaaaatcgtgtcaccacttttgccgaaaagtcactgtgtttctcctgtactcagcaggttacagggtgccatattgttctcagtcttccggctctaccctgttttgaagtgcggccgggtgttgttaaacggctccgccttcctgccagaatttctccgtggggaggagctgccacccagtccagtgagtatggccttttggtcagcattgcagaacctggcaagtcctaattccctgtgagcttgacacaggaggccgcctcctcctccaggcccacttggaggcattctgtcctcttgttggaagggaaattggtatggtagggaggtgcttcttctgggagtgggtttgtaaaattaagactgttttcatccaaaccagttacctgtttgtctagaacctgtgttctctgctttctgcctcttgtgttgacatttctcctttggccttcatctgttactcgctcacatgtgccgtgccccgggtgggtttggaagccatgctgctatggtttgattcctggctttccaacattacctttgataaccaagacaagtggcagtctaagcctcagtttcctcatctgcaaaatgggtgcaattctagtacctccttcctaaggctgtgaggattcaatgaggtactgcttgcaaagtttctagcacagtgtcttgaacacggtaaacaacttacctaggtctgatctcatttgatattgttgctcatagcaaaggtttgttgagtttactatggatataacacttgttcttttttaaaataacttttaaaaacgcaagtgttgaattatctgcattgtgcctttagggcatacacatctgcttacaatattttttgagctttcagaaaacttaagatatggttgagggatgcaggaaggaacaggacaagaacccagatccctgcccaacaggacagtggaagggaagtctcagcatctcgaaatgagtgcctggagaggatgggtggcggctgtgcggggatgtggtagggtgatggtccttgaaggatgctgcagatcacagtggccccacagtgtggggattggggtgggatatgtgacaacaaaggcatccctggcagaggatccagcacgagcaaaggcagaaagtccaggaagtgtcaggaatgagaagagcccagtagaggatgggcttagggacagtgatgagaccttctggtagaggcgttgaacactagggtgagggctttgctctgacttcaggaagcaggtgagaggccctgaaatttccacgtaagattcggggccgggcacggtggctcatacttataatcccagcactttgggaggctgaggcgggtggaccacctgaggtcaggagttcgagaccagcctggccaacatggtgaaaccccatctctactaaaagtacaaaaattagccaggtgtgatagcgggcgcctgtaatcctggctactcgggaggctgaggtgggagaattgcttgaacccgggaggcagacgttgcagtgagccgagattgtgccactgcactgcagcttgggaaacagagtgagactctgtctaaaaaaaaagaagagttggatcacagcaaaggtgagctttaatgagttcactctggcagttgtgccgaggagggactggcatggagagaaaacagaggcaaaaatcacaacctctgtcagagaactcatcgcactatttctgtcctgccctgggatggtggagcctaagggaacagagaggacagagtgggtggcacaggcattgcggaggcagaaatttacgtggcttccatgcccattggtgtgaggagtgaggggtgatcagggatcccagtggcttgaaagtataacaaaagtatgactagatccaggaaatacagctggagagacccaagtctgcacagaaaaggtttacagagcccaggcacacagatgacatgagcagttccaaaggagtgggacggggtgaatgatttgtggtcagaggtgtggtcacacataccgtcccctgatagtcggtgggaactgggtcaggttccatttgccaggggcaggacatactgcgtgccttggccttttctgggctactcaaaaaaggattccaccaggtaaacttgaatcacctagcgctggtagaaagccttgctcttcgtcatctctcctgtgtgtcgctagccttattaaaatgtgcagaggagaccgggcatggtagcacacttgtaatctcagcacttggagaggctgaggtgggagaattgcttgaggctatggcttcaaaaccagcctgggcaacacagcaagaccccacgtcttaaaaaaatttagccggctgtcgtgtctcctccgtgtagtcccagctattcaggcagctgaggcaggagggctgcttgagctcaggaggtggaggctgaagtgagctgtgattgtgctgttgcactccagcctgggcgacagagggagagcttgtctccttgtctctaaaaaagaaaaacatgctcagaggccttgtgagttagctctctccaaagtttttaagacaaggaattcagttaatcaagtttgttagacttgtttgaaaaaagggcctgaacaggctcagagcaagggcagatcaagctcttccacagattttaatgttcaggttttgtgacctttactttttttattttggcaaaatgtacacaacttagtatttatcattttaatttataagtgtaaaattcatagtcattaaatatattcacaatgttgtgtaaccatcagcattacctatacctaaaatattttcatcacatcttttaaaaaataactgccccttcctcacttccccaagcttgtggtctctggtaacccctactttactttctgcatctatgaaattgttttcaaggtcaatccatattgtagcatatatcaaaatttctttctttcttcctctccttccctccctccctccctccctccttctctctctcctttcctcccttccttccttccttctttccttccttccttccatttttgacagggtctcactctgttgcccaggctggggtgcagtggcacaatcaaagctcactgcagccttgacttcctgggcttcagtgatcctcccacctcagcctcccaaggagctagaggtgcatgccaccatgcctggctttttaaatttatttttattattatttttttatttttagtagagacagattttgccgtgttgccctggctgatcttgaactcctgtgctccggtcatccacccgcctgggcttcccaaagcgctgagatgactgcgccaccacacctgccacaaaatttctttgttatggctgaataatgtttctgtgtgagtgtgtgtgtgtctgtgtgtgtgtgtgtgtgtgtgtgtgtttgaataatactcctatgaacattgtaccaatatctattcagatctctgctttcgattcttctgcatgtatacctaggagtgaaattgctgcgtcgtttcgtatctgtgtgcttaaccttttgagaaactgccaaactgtcttcaacagcagccgcatcattttacattcccaccagcagtgcatcaggattctagttgctccacatctacccaatacttattttacttaaaaaaatagaatagccatctgagtgaagtgttacctccctgcagtgttgattcccatttccctaatgatgttaagcgtactttcacgtgcctactggccgtttgtgtatcttctttggagaaagtaacatccatttttgatactcacatggctttttggttctatttttgctttcttttggctaatgataaccttccagcaccacgagtttggactgtgctaatgtcttctagtactgtttagaagttgaggtaaaaagaaaacggtaattgaaagagacagttgttgtttacattggggaggttggtattccaccccctgtgctttttcattagctgtattgtattcttattatgtgttttaccgggtaattgtaattcttggctttggattttgtcccttttttaggctgcggggcgggggggtcggttattttataagcaaagaagtacagccagtatgattctgaagcaactaggtcacagtagaaaaaagttggagagtgaaatctcaagcaagccaaaaagtgatagatgagttaaaaaaaaaaaaaaaaaaaaagttgcctggcttggtgcagtggctcatgcatgtactcccagcactttgggaggctgaggtgggcggatcatctgaggtgaggagtttgagaccacactggccaacatgttgaaacccgctctctactaaaaatacaacaattagccaggtgtggtggcgcacgcctgtaatcccagctactcaccaggctgagagtggaaaatcacttgaacttgggaggcaaaggttgcagtgagcggagactgcgccgctgcactccagcctgggtgacacagtgagacttcatctcgaggaaaaaaaaaaaaaaaggctttggagcttcctaatttctaaatagatttcctttataattttcagaggttgtgaaattaactctgtagattggggagtgtagtttgtcactctaattgcccagcgttttaattatcggcgtgttttatgcttttgtgaaatgctcatttcacagcttgctggtgggtctttttgtggaacgagaaagtgaatattcacaccagaaatgaggtactgaccctgaagggctttccagtcaaagagaaaggagagcatgacccgccaatgccgttgtttgtaagcaggaagctgacgctgcgccatggtgtaggggaggaggacggtttccattctgttttgagcatcagaataaaaccaagcaccagaaggtgtggttcaaagatgctttcctttttcagtctctggtcaatttgttgttatttttcttcaagagagttgttggggttgggtaggcgcaggggccacaaggccatctttataaggctctggcatttgatagtgaggtattttggtattccaaataattggtggaaggatggaaaggttaaatggaaattatgtaagggctgcaaagagattcatatatgactatttcatgagtgcttactatataccaggcgctgttacagcccgtgtaatgccacctgggagttggggggagtcaccatcgtccatccgtctgtccatccatccatccatcctgcctccctccatcctttctctttttcacaatgtctcttgctccgccccctctcttcccctccttccttcctatccagtgcttgtaacctgtcaagcacatgttgtagccattggggacatcgtggtaaacaaagcaaagtccttgcttgcattctgtgacagatggagataaaatgggtaattaacaaatgtaatccctcccacccaccccccacattatttatttatttatttatttatttatttatttatttatttatttatttatttttaccatgtctgttactccatcagtcaggatccagttaggagacagaaactatatcataattttaacagggaagatttaatattaagaattattagctacaacagggttttggctactaaagggtaaagagaatcaggccgagcacagtgactcatgcctgtctgtaatcccagcactttggaaggccaaggtggaaggatcgcctgagtccaggagttcgagatcagtgtggacaacatagggaggtcctgtctctacaaaaaataaaaaataaaataaaaaaataaaaataaaaataaataaaaagtagttgggcgtgtgtggtggagcatgtgggggtcccagctacttggcaggctgaagcaggaggatcgcttgagctcaagaggttgaggctgctgtgagctatgatctcacctctgtactacagcctgggtgacagagtgagaccgtgtctttaagtaaaataaaataaaaaagagtaggtcgggcatggtgggtcatgcatgtaatcccagcactttgggaatacgaggtgggccaatcactgaggtcaggagttcgagaccagcctggccaacatggtgaaaccccgtctctactaaaaatacaaaagtgagtcggggttggtggtgtgctcctgtagttccagctacttgggaggctgaggcaggagaatcacttgaatccgggagccagcggttgcagtgagcttagattgcaccactgtactccagcctgggccatagagtgagactctgtctcaaacaaaaaaaaaatttaactctaaagaatccaagaatacagatttgggagcagccagtaccaatgggggatggggcagtacacccaggaaagagcaaatctggggtccccacgggccaggactgggatctggactgggccatggcccattggatggcagaaaggttctcactgaagcccccataaaggtgggactcactgggaaaccgctctctgtggtgccagggaaggacgtctgtgggaggtgcctaccaaggaagtctctggaaatcagcctgcaggggtggagtgccgggaaactcccgccccctccccccctccccgaagtgaaccgcccacagggagatgcccctatgggagcttcgcaccagaacccgtctgcgccagtgtccctgcagcgccctctactggcgaagctggacatggcgtccgctggcaaaggggaaactcttctttcctcccaagccgagcaatgctaaatgtgcctggtactgagacgtcatctgtggacggttggcaccgatgctaatcagtgctatgggaaaataggcagagcgaggagcgtaagaattattatgtgtgctgtttgatagagactgtacaaggaagacctctctaaaaaggtgacatttggagcagagacatgaaggaagggattgctggaggcagaacattctaggcagaaggaaccgcacgtgcaaaggccctcaggtcagccggcatggcatgcaagtaagccagctgcaacacagcaggtgtggatgaagggaagagaattagcatttggccagagcacgcattttaagggatggagatccatttggatagtcttgaacacagaactgaccggaactgacttactctttgaaaagatcgctctggctgctgtgttgagtggattggtaagggataggtggtgaagactgaaacagggtatccagttaggaagctatcacagtgatccaacccccagcttctgttgaggttgaagaacatgcatgcccaacctaaatatatgttcaaaggtggttattactgtttgaggtgatgaaagagttttggagatagaagtgatggttgttcaacatcatgagtgtaattaatgccacggaattgtatccttaaaaatgcttaaaatgcgctgggtgcggtggctcacgcctgtaatcccagcactttgggaggctgagatgggcggatcacttgaggtcaggagttcgagaccagcctggccagcatggtgaaaccccgtttctactagaaatacaaaaattgggcgggcattgtggtgggtgtctgtaatcccagctatttggaaggctgaagcaggagaattgcttgagcctaggaggtggaggttgcagtgagccaagattgtgccactgcacttcagcttgggcaacagagtaagactctgtctcacaataaataaataaataaataaataaataaataaataaataagagttggatcacagcaaaggtgagctttaacgagttcagtctagctctctcacaaaaaaaaagttaaaatgacaaattttgtgttacatacattgtactacaataaaaaccatttttttgaaaagaatagtacaaaaatgatacttccctctcagtgtattttaccaagggattattagtgtatatgtgtgttcttactggaaatgttaattggacctgtaattctttttttaacttttattttgggttcaggggtacatgtgcaggtttgttatataggtaacttcatgtcacaaaggtttgttgaacagattatttcatcacccaggtaataagccttgtatccaatagttatttttctgatcctctccttcctctctccctctaccctcaggcaggccccagtgtctgttgttctttctttgtgtccttgagttttcatcatttagcttccacttgtaagtgaggccatgcagtatttgattttctcttcctgcattagtttgctgaggataatggcttctagccccgtccgtgttctcgcagaagacatgatcgcattcttttatatggctgcatagtattccatggtgtatattcactactttttttttaatccaatctgtcatttgtggacatttaggttgattccagtagacgtgtaattcttcttggaaatgttaatcttgatcatttggttaatgtgatgacttctgggttctgcagtgtgaagttattatcttcccttttgtaggtaacaaatactttggaagagattaaacaaacaaataaaaaagtggtgattgttattaccagcatggctactactagctaattccaggcttcaagccactggggcataggcatatgtttagctcattccacaggaggggaacagaggctcaaagaacctaggtaagttggctaggcgcggtggctcacacctgtaatctcagcgctttgtggggcttaggcaggaggattgcttgagctcagaagtttgagaccagcctggacaacatagcgtgaacttgtatctacttaaagtaaaaatcaaaaaaataatggggtgcagtggtacatggctgtagtcccaattactcaggaggtggaggtgggaggattgcttgggcccaggaggctgaggctgcagaaagctgtcatcatgccgctgtgctccagcctgggcatcaaggtctgttttgcagaccttgtctccaaagcaaaacaaacaaacaaaagaaacaaacaaacaaacaaaaagaaattaggtaacttgctcagtggctagtgagtggctagattgtaagcttcatgagggcaggggactttgacgattttgtcggtatcctaagccgctagaacagtgcctaaacatttgttgggcagttaatatatatttgttctattaataagtagagcccgagtttgtgttctccgattccacaccccatgttccttctactacaacttctggctctggcttctggactgtcagtcattagcactccctatccctaaggtttcaggaatgttcagctgtttcctagcttggaatggaccatcctctggtcccacccatgggtaagtcattggctgcagagcgcagacatttggctcccctcgggacattcctccctcatttaaaacaatgaggcgggcagcagggtactttgtcccttgtgttagctgaagttggaggatgctgtgttgatgggaaaacgctgttactattcttagactagtggggctctcacttattcatagctccgcactcgtgggtggaatgagaagttataatagagtgcaggtgcctctcattgttttccgctactcactggatagtgtttattaaaaacgaaatcacagtggtgtgtctggagttgaagtctgaacaaataacccaaaatgaggagtccctggaaggtgggcaggaggcgacaaacaaagagaagcaaaaacaagtttgagctaattgggatcaggcagtactttgcatgtgagttctgaacagggagcttggctgcaaaacgattattgtatttaacttctgttggcatcattcgcatacttgtatgggagatccagaattggaatttaacacagttttcccaggcccttcatggaatttgaaaacatgactctgaaagcatgtggctgaaatgagactctttcacactgtttaaagatgcatgtgcatatgttggtgtccacacatcaacttaattttttcatgttccttgaaggaagcccgtctaggtccttctgaaagaagggctggagatttttattaaacattacttctaggctgggtgcagtgactcatccctgcaatcccagtactttgggaggccaaggcaggcagatcatgaggtcaggagatggagaccatcctggccaacatggtgaaaccctgtctctactcaaaatacaaaaattagctgggcgtggtagcaggcgcctgtaatcccagctactcaggaggctgaaaaaggagaatcgcttgaatcagggagtcggagttttcagtgagccgagatcgcgccactgcactccagtctggtgacagagcgagacaatgtctcaaaaaaaaagaaagagttctgaatgatgataggtgttggaatccacgttggtgtgtctcatgtcattttttcgggcagtttcttgacagacccattttgtgtgtgtgtgtgtgtgtgtgtgtgtgtgtgtgtgcgcgtgcgcacacgcatgagcctgtacgtgtccccctccccccccacacatatgcacataagatagcataaggtagttcctggcacatggcgttgttcttaaccatgaggtgctcccaggctccgggcagttccttgaaagactcattgtctgtgtggggggaggggaggctgtacatgtccccacccaacacacacacatacacacacatgggcacatatgatagcataaggcaattcctggcacatggcattgttctgaactgtgaggtgctcccaggagatcttgtgcttcctatcacatgcccattctgcaagtccatccccttattgagcagatgtttaccgcagagcactaagacagatggaacgtcaccgttgcccatagcactcatggacagcatggggtcccctgtagcagatatttgtggtgtatgctcgaagaggggctgcaggtagaactagaaaggtaggtaagttgggcagatggcgagagacatcacagccctcactcctgagggtggggagccatctcaggctcaggagaagaagagtgacagagtcaccaactcactccatcaaatgtggctgtatttttagaagtgtctggttcctgaaatacctcaattccttttgcctgcctggctcctctcctctcttctgcctgttcattgaactgaaagattatcaggactgtattcagcccggccaataatatcacaaaacaaaaatatcttgtgggtttgaaatttatgagtgttttgactgttcacagcaatgcctttgagaatcacagtgtgtcatcccctccccacccccacgaacatgtagtttttgggcaacttttcgatgagtaaaacagggcctgacttttaccccaaagtgatgttcttttgtggcttgtctactccaagaactgagatacccagactcatttctcatctcttgttgaaacagagaagtcactgtagcgccctccggggggtggggtatcaagggagagtatgggctttgaaactgctcatcccgtctacaaccttggagggcatggtgtttcactcccccacctctccccacaacttcaccctgctccaatgaggatgaaaatgtctttcttatagatgggacaggagccttagtaatatggtgcgagcaatggttcacataggggacaggtgttcattcaatggtgggtattattataataatcattagcatcattgctagtgactttatttttcctttagccaatggagcagtggcttttggcccactactttcgactgaatctatgagtgaatgtgatcctccgttttaaccctgtcttattggatgttggtaaacagtatatcatgagcccctgtaagagcttgaatccttcaaagacaaggtcagtcagtggccatcactactctaaacgtaagaccctgtgatgactgacacttactaggtttctcatttatttatttttctctgcaggacacagctatgtgttccaaagatggtcttaaacctataggagtataacaccatggctagttcagaaaaccttattccaacttccaaacttagaagatactgggaagtaaaagggagagaagggaatgcatggcttgggctaaaaaaatgattctgcattcatctcagaaggatgttttccagtctttctctagaaacaacttttgtgtctaaggattgtgggtgaacaacagcagcacaggctacattggcttggctcggtggttgggatggtttggctcttactgggcagtaagcacagtggctgggataggaccttggcatctcgtgcgaagcccctctgcctggagtcctgcctctgtgacacttgcttactgtgtgacctgggtcaactcatacctactgttcgtcagttttctcatctgtaaaatggggattccagtggttattatgagaattaaatatgacgatacataaatagcacctggaaaagtgtttaggaaaccttgacatgatgacctgtttagcagcagcagtgtgtgccatacttacctttatggaatgaacagatttggagtgaggatggatgtttagctcactttattagtctggtctcacactgctataaaaaactgcccgagattgggaaatttataaagaaaagaggtttaattgactcacaattctgcatggtcggggaagcctcagaaaacttacgatcatggtggaaaggaagctagtgcaccttacatggcggcaggcaagaggggcagggagggagagagaaagagggagggaggaaaccaccacatataaaaccatcagatcgcgtaagaactcgctatgtcaagaatagaatgggggaaccacccccatcatccagtcacctcctaccaggtctctcccctaacatgtggggattacagcttgtattacaattcgagatgagatttgggtggggacacagccaaaccataccactcatggcatctcgtttttacagagtatatgtgttttcagattttgcatgacattttaggataaatgtgatgaaaatgaggaaaattgggaatgaagtttaggtcagaaaagtttcagtgattattttttcagaatcattgtttcttggtttctagggtccaacatgccattgttcaatggctgtatttcaatggctgtatttcagaggctgtattttttttcccatctcttccttcctacttagaagacagtgacatttcctctgtgcctctcaggtgtcaatgccatccaacaggaatttgtacaaagaaagggaggactttctgatgatgttgtccaggacagtggccccatgtagctactgagcacttgaaacgtgactagtatgaccaggggctggacttttagtttaattttttgtaatttaaataatttaagtagctgatgtgtctagtggctgtcgtattggaaagcacagagtagacattgcaaatacagacgtagaaagacaccgtgcctgctgctaagaggcccctggtcctactgagtggtcagctgtttacactgacagtcccagcgtggtataataagcattaacacagagacatgtacagggtgctgagaaagctaatttttgcaatagtcaaaaaagacctcagggcagactccccagcacagagttccaagcctttacctaaaaaggtaatcattttataagtacctattatgtgccagatactaggataggcactttgcatagaaactcacatttcgactgggcctggtggctcacgcctgtaatcccagcactttgggaggccggggcaggcagatcatgaggtcaagagatcaagagcatcccggccagcatggtgaaaccctgtctgtacaaaaaatataaaaatgagctgggtgtggtggcacatacctgtagttccaactgctcagaatgctaaggtaggagaatcgcttgaacccaggaggtggaagttgtagtgagccaagatcgcatcactgcactccagcctgggtgacagagtgagactccatctgaaaaaaaaaaaaaaaaaaaagacatttacattttatctttactgtagctatggctgcctatcccaaggatgggaagtctgaagttcaaactggtgatgatccccaccccaagtcacacagttagctttatagttaaatcagggtgtgcctgatttcctagccataccaggcagcctatttcttgaataacctcccatcccctgtgtctcctttgtggagctcttggcaatactctggtgattggtaaccactgatacgccgccagcagtccacgcttgggtggaaggcaggtttcacgtaactgatttaccacttggtaaaggaacgaggtgacagcaagaccacaaactaataaatatgccggtattgacataatgtcggacctcagtatgattgatgcatgtgttgttgactgggatgtcacatgttcaggctgtaatcctggtctcagtatgactgtgaggacggggccaagtcatttcacaatttgggtgagtgttccaagcttctcagaagagcgacgcaatagaaattcaaggtatgaaattcaaggtgtggtctcagagtcattttatcttacagcttctctgctgtgttttctcagtatgtgaaatgggaacatcacttaccatctactcacctcctgtttgagttcaagggaaggtttgcagattggcctgaaggaagacttctcttgaaaaactcaaaccaaagagcacaccgccgtccccaaccctgagccatttctgtccttttcatggaaagggaactgtgttcgccagctcgtaaagccccggcgtctcctcctagaagaaacacccacattgacccagcagtgttcattttcccataaggtggtgctggatagggataggatgtcgccccttgttcaccccttggcaataatctgtttgattcactccaaatgctgcttctgatctccatctatttcaggggatgaccagtctgaataaaaccaatgagcttaatctacttgtggaatgttatagccggaagggattcatagagatcactctatcgcctaaaattctctcttctacatatctcagtgttggaaaacataaatgtgactccaacttgtcttttttgttgtttgtttttgagacagggtctttgtttcccaggctggagtgcagtggcatgatcttggctcagtacaacatctgcctccctggctcaagggatcctcccatctcagcctcctgagtagctgggactacaggtgcatgccaccacacctggctaacttttatttatttttagtagagaggcagttttgctgtgttgcccagactggtcttgaactcttgagctcaagaaatccttccacctcagcttgacattacaggtaagagccaccgtgtccggcccccctttcttcttttttaaagtggggtattaaggctcagaaaagagtgtttctgccactgcagaggattgctgacattattagttgctcactctgtccaaggcattgtgctcagctctttgtacagattgtttaaccctcacaagtctatgaatagagtatattacccacttcattttaagtaggaaattgaagctcagggaatcgtagcagagggccccagttcacactgctgatcagtgatgcgactgggatcaccacagcccatctggttcagaagcttgttctcctaaccaggatgtgagagacattcttgtcctaggcagcacgttggtggcagaggtgggatctagactgaggctctcattctgtaccctctctggccccaaggaaggaaaggggaaggagaagggcctttgggactgggtggatgtaacactttctgccacctctactcttcctgctatagattaaaacagaagctctgaattgcagccacaaatcaataatgaaaagctaccagaccaagccctttcttgtttagtgttgtgtcttctgtgtcaacatctctggaacatagtcaatggcagtacccagtagaagccatatggatactttttctcaagtgttgaaataaattaatggtgtggccatggttctcgtacttcaggtccctgtgagcccctggggtcctacacaacttggggtaatgctatggtcacctgcatcccctcctctccagccctcacctggttttctcttctccttccaagaaaaaacacccataccattcttaacatctctggaagctgggggtcaggagagggagatccataaagttcttgtcttccccgactcaagaagcttaagggtacattcactcactcatgaattgactggtttattcattcactggttgattaattcattcattcactggttaattaattaattcatgtcatcctttggatgtcttgcagagctgagtgctgaaataaaatgataaacaagtcaaaaacaaaaaggcctctgacttaacaggacttccgtgatgcgggggaagaagacaataggcaagtaagcaagtaaatatacaagataaatagaaactgtgatgagggagttaaagaaattaaactggtccttgtggaagcaacttcgggggaggaggaaagacagggaagaccattttaaggaggtgatgtttgaacttaagaatcaaaaacagtgcaagcgctgcatgggggagaacagtctaggcaaggtgaacggaagtgcagggtccctgaggcagaaaggagctcagcctctttgttagctagaacaagaaaggggcccgtatggctagcataggatgggataggggatcgtggtggataccagctaggatttcactgtaaaagaagaaaggaagccactgaagggcattaagcagggcagtgatgttttttaaagatctgtctggctgccttggggagcatgggttcagagagcagcagcagaagtgtgcaggatgacttggactgtcaccttggggccagcctgcagactggtgtggccgaaggagtgccgtgactcctctgccacctctccacatttggaagattgttttgcagctgcaacctcaaaacagaagcctcctaattaccaggtagctttctagagccaaacaaatgctgttgtttctgacaggtaaatcaagacagggaaatgatgacacattcaccacaactgaagtgttgatggggtgtgttgtgacccctggcttgttccaaagcctatgtgggtgggaattctttaatgtctgcctggaactgggcactcagctataaatagagctattttggaaattctgcacctcaatttctaaaaagttggaaggacaggaaaggggagctgtgtttgagatctcagaaatctgcaccccaccttgctatccaccactggtattccgtcagtcttactaccccctcccacctctagcccaccctctaccatcctcaccaggaaggaggctgcattcatttcaagaactgcttttcttttatcagctggcattactaggtatagacattatgaccctttaatgggcgatgggttaatacctgttgcttttgtgtgcttcctatttaaaacatgtttatctatcccccacccccactttatccaaaagttattcagtgttttacaaagacatgaatattgggccgggcttggtggctcatgcctctaatcctacctgaagcaagagaatcgcctgaacttgggaggtagaggatgcagtgagctgagatggcacccctgcactccagtctgggcaacagagcgaggctccatctcaaataaaattagtcagtcaaagacatgaatattttcttctaagtagaagtaatgatgacgatgatggtagcagttatgagcaggtaacatgcattgaacacttatttgctccatgcaatgttcacaggtctttacatgtaaaaacaaccctgtaaaataaataacattattctcttcattctccaagtaagctgaggcagaggattccagcacaagcaatttggttccaaaacctgcccttttaacctctaccagattttggtgaactctctgtctttggaagggtaggtggcggctgcggggagaaatagatgaagctgttacatttggcagcaaatgtaaatcaccaccttcactggctttaatttccccctccagccttctcgccttgccatcaccttcaccctgtccttcctcttcaggccacctatcccttccgattgaccccactggacttctctgctcctggcttctgtcttccctctagtgaccgctgtctttaccttcagctgcacgagctttttcaagaaccttcttgctccctctccatcctctctgttttcctacttttctttggccactgtttttgccacagcttctaggatttctctttcccacaatctaggagaaaggtagagctctcttatgctggggcaacgctaccaacattggtattccacagcattccaacgattctaaatactctcccagagtagggaggaaaaatcatccaaactacttggtaattgaattcaagagtgatggaccaaaaattattaatgcattcccttccgtccaccagccaaagaggattccatctttattctcctcccaaatgcaggctccattaaccttttacctttctttctttccggtctttcttttctatatctttttttttttttttttgcatttttccaattgtgatcatactatatatgcaatttgaggtatttcagacaacattattacatcattacagaagtctcatatgctgtattttataaatatgtgatgcaatcaatcattgataagatgtactgttattttatgtttcactaagagtgcgaagaacattgttaattatacaatgatccaaaaatgtcttctctctcagaatgtattgttttatatctattacaaaggctcttttgacttaggcatagatttctcatacatcaggccatttctatgcctgcctgtgaacacagggattttgaattacaatactgaatcctagtgtgatctttctgaagtcattttaattatcacttaaactcaatatggaaagcatcagcaatgcacctatatgcacaaaaatgagcagctatgatcaagttatcaggaaaaaccaaaacaaaacaaaagcacatctccatcatttataatggcccatcatttataatggctgcctgataattggagatacatgcaccagacttgacttaactgttctcttagtcatcagacatttagatttcaacaggctcctgttaagctctccttacagtgtgtgtggcactgtgcagttgaatgaaacatgccatggccagtggagacaggcttgggctgatggagagggcctacagggccaggccttgaaggggagggaaattgttagctacacgaccaagagacagaagagaggaaggagtttgtacccacaactcagctttattttatgtaagctctttctgcaaagggaaagtagctctttgtaccaaagcaagggcctctgaatgagagctgggagaggccagaatgggcctgtaagaggttgatgtgtatgagacctgaagccctatgcctttgggaaggagaggaaggagtaatatttgtgtggtacaaaggatgtgcctggcataccccatatcttttacaaagacataaatgtcttctgaataaaagtatgatgatgatgatcatggtgatgaagatgagggtgatgatgttgatgttgatgatgatggtgatggtgatgatggtagtatgataatgctgatggtggtgatggtgataggagggtgatggtgatgatgatggtgataagatgctgatggtggtgatgatgatggtgatatgacgctgatgatggtgatgacgatgataatggtgatgatggtgatgacgatggtgatgatgatgtcgataatgatggtgatgctggtgctgttggtgatggtgatgctggtgatgatgataatgatagtggtgataatgttggtgatggtgggatgatgttgatgttgatgataatgatgatgatagtgatgatgatatcaacagataccatgtactgagcacttactttgtaccatgcaatgcttatggttttttaaatgcatttacaccaaattcttataacaaccctataagtcagtgccattgcttttcccatgtaacgtgcacatcattcaatcactcaacccttgtcataggtagatactattatcctccttttatagatgaggaaaccttggcttagaagggataagctcaagttcacaggcagaaaagagacagccagtcaagccctgactccttttgtgaccctgatgagattacaggtcctcagtctcctcattgtatctgaagactaaagaatcagaaatctgtgactccacttagtttttctccacccaggagcccttaggccgctggtgagtgaagttcttacccattagggattattaatatactagataagagtacagtctctggagctaggcttgtgactttgaacaaattattttatctctctgagctcagtctcctcatctacaaagggggaattgataataggaattgtcgcaaagagctgttttaaagattaaatgagataatagatataaagcacttagaagagagtttggcatttgctaggctcacagtcagtgtcagtggttcccaatgttactgttttagctgcccccagtcaggtggttgatgagttggggagcctggtgggcagtctggaagagagcacagtgactgcaaggtcagctcctgaccttcataataaggactcacatgtgtcggtcccaaggatccccaagggatactcatggttgaaggtgtctatgtgttctccttggtgtccagcgaatgcctcttgacaatctgtggtcatactcacaacctatgaccacatacgaggaagcgaggtgtcccttttgcagttgttcagaaggtcccgtgggcaggagcagccagaggaacatgaaaccagctcgtaggtggtacttgtggcaacagcagttatagccaaggagaagttaaattctaaagacttgggcagtctccagggaatatactaactgagaaataacatccataaaaataattcaatactagtatgtaaaactaaaaacaataaccaagtgtgactggctgtctaagaattaagcaaagtaagatgaagtgtcttttgctagcaggcgctctcagcaaaggagataaggctgcagtaattctcttcccaccttcgatgggcaggtgcaacctttggctgcagaaattctcacttcccagcagcagctttgagcaccctgctctgaatgtttcttgggcagcagcagctagggaagaaactcagttaaggctgtttgaggacccaaggtggtctcactctgcaacacacatcggcagccagtggtgtgctggtaaatgattaacaactggctctctgaaaaacaaacaaacacattgtgcacctatacatgtacacacacagcttattatttattatttctctgaaatatgggtagcatataatttacaaataagaagaagaatagtatacacagtactgtttcttataaattcgagatagtcagtttttaccaaatgcttctgatttttgctgcgctattatatccattacaaaaccattgttgcagtataaaattgcagtatgtagctgtgacatgaatattggttgatattttcatttttattaagaagtaaggcaaaaacaaaataagacatatgtcagaacttcacttatccttctttgctgaattggataatggttttaaaataccaaaaaatatttcttcaatttttttctgctactcataatgtagcatctgtagagcgacacacttttgaatttgagttaatatttcttttttattttattttattttttgagatggagtctcattctgtcgcccaggctggagtgcagtggcgcgatctctgctcaccgcaacctccgcctcctgggttcaagcgattctcatggcttagcctcctgagtagctgggaatacaggcacccaccaccacgcctggctaattgtttttgaatttttagtagaggcgagattttcccgtgttggccaggctggttttgaactcctgccctccggtgatctgcctgtctccgcctcccaaagtgctgggattacaggcgtgagccaccgcgcctggcctgaattaatattttctaccccactttcttaagtcgagacaatcaataaagcaataaatgacacctggatttgtagcgaatgtctatttccatggtgtaaatagtggtaccctgagcaattttaagttataaatatgagatcactgaaagtggagttggggaacacgttattatatagtattttcaccacacacaggatacagtcaatgacttcaagagcataggtaacagtaaaatgtagtaaaacaatttagaagtcatgagttttgagtacttagtactttttagtatgatttatttaatagtaaccttatataatgtttttcttttaattgttttattgagatgtatttcatacactttccaataagcccatttgaagtgtaacattcaactttttttagtatattcgcatggttatgtaattttcatcaaaatctaattttagagtatctttttgtccccgtaaaagtaactctgtgcccatagttggcagtttgtcatatcactcaatcactgtttcctttaaagagcttatcattaaagacagcaggcagttacacaacatcttctacatgccaagaatgtttctaatacatgctttatggatttttaaattgtggtaagatttacataatgtaaaatttaccactttggggctgggcgtggtgactcacgcctgtaatcccaacactttgggaggctgaggtgggtggatcacttggggtgaagagttagagatgagcctgggcaacatgatgaaaccctgtctctactaaaaatacacaaattagccaggtgtggtgctgggtgcctgtaatcccaggtattcaggaggctgaggcaggagaatcgcttgaacctgggaggcggaggttgcagtgagccaagattgcaccactggactccagcctgggcgacagagtgagactgtgtctcaaaaacaaaaataaaacaaacaaaacaaaaaaagttcaccactttgaccattttaaagtgtaaaattcagtgacttttaatacgttcacaatatcgtgccacaatcagcagccatttcagaacatttttaccatcccccgctaaagaaacaccatatccattaagtggtcattccccatttcctccttcccccagcccctcataaccacatctactttgtgtctctatagatttgactattctggatatctcatataaatggaatcacacaatatgtggccttttgtgtctggcttcttgcttttagcatgctttcaaggttcatccatgttgtagaatgtatcagtacttcattctttttatggttgagtgatattctgttacatggatataccactttttgtttatccatttgccagtgggtggtcattgtgtttctacttgttggctgttacgaattatgctgctatgatcatacatgtactgtttttatgttttctgcaaactcctgttttccattcttgggcatattttggggagtggcattgctgggtaatatggcaattttatatttaactttcagaggagccaccaaattgttttccacggaggctgcaccattttatatttccacttgcagtatatgaaggttccaatttctccacatccttgccaacactttattttctgttttctttgaaggtatgaaattgtatcgtggttttgatttgcatttccctcatgattaatgatgttgagtatttttatgtggttattggttatttgtatcttttttaaaatagaaatgttgattcaagtcctttgcccagtttttaactgggtcatctggcttttgttgttgagttgtaaaagttgtttatatattttggatactagacccttatcgtataaatcctttgcaaacattttctctcaatctatgggtaggcttttttactctttttatagtgtcttttgatgaacaaagattttaaatcttgatgaagtcccctttatctattttggatgttgttgcttctgtttttggtgttgtatctaagaatccattgccaaatccaaggacataaacatttactcctgtggtgttatgatatatatagggttcctggctcataactctcatagcccttgttgcagtctattgttacaatattgcctgtgttaggcatcaggaaacagaatctctttgtctcctgtccttctttcacctgccccaaggcaggactctaatcttccccacctttttgattgtgagtcttcagaccctccccagagagtcagtcctgccttatgccctggggaaaggaatgctgacctcatgaagctcccataaaaacccaagagggctgggtttgggagcttccagatagctgaagacaaggaggttcctggagcgtggctgcctaggaagggctggaaagctccatgcccctaccccatacctcgccctatgtgtcttttcatctctgtccttagtactgtcctttataataaagcagtaaggggtagcaagtgttttcctgagttctgtcatctgctccagcaaattaatcaaacccaaagagggggttatgggaacttccacctgaagcccctcagccagacattctgaagtctctgacttgctattggtgtctgggggtatggggggcagtcttggggactgagcctccaacctccaactaactccacgtagacagtgtcaggattgaattggaggactcccagctgctgtcccctgcttagtatgtggggaaagttgagttgtaaaagttgtttatatattttggaaactagacccttatcatataaatgatttgcaaacattttctctcattctgtgggtagtctttttattcttttgatatcatctcgtgatgcacaaaagttttaacaacaaaagtttgggtgttgtatctaagaatccattgtcaaatccaaggtcatgaacgtttacctctgtggtgtcacccctcctctcgcatttggtgagaggagtcttctgtgttgattgtcatggtggtgtgagagcagaagggaaacatggtttcagaaaagagtttttccctgaaaccacccctctattttcttctcagacttttatagttttagcacttatgttaagacttttgatccattttacgtcaatttttctatatagtttaaggtaggcattcaactttgttcttttgaatgtgaatatccatttgtcccagaagcattgattaaaaaagataattctttctctattaaatggtctttgcacccttatcagagatcaattggccataaatgtaagtatttctttctggactctgaattatatcccattgatctgtatgcctgtccttatgccattgccacattgttttggttactgtactctgtgtaagttttgaaatttggaattgtgaattctccaactttgttcttcattttcaagattgttttgggtattctgggtcccttgtatttccatttgaattttaagatcaatataatttaaattttaatcatggcagtgttcaataactggcttgcatattttttgaacagtcatcagctcttgtgagccacggttggccagctcccaaacaccatgacatacaacttgcaggaaaagctcattttccagtttttccccctccagctgtaggggatatattttcgttaattcctgtgaccatatggcagcatggttaggatcttgggcttccaaatcagacagttgtaaacttaaactccaattctgccacttattgtgtcactttggacaagttacttcacctctccaagcctcagtttccctgactataaaatgctaacaatagttgttctttccttattggacactcaagaggattaaatattattcatgtaaggctcttagtataacaccttgcacataggaagcatttaatacctaaaatcgagtactgttattgtttcaggattattattttttttaaatttattttatttttttgggacagggtcttgctctgttgcccgggctggagtgcagtggtgcgatctcagctcactgcaacctgcttcctgggttcaggtgattgtcctgcctcagcctccctagtagctgggattacaggcgcacgccagcacgcctgactgatttctgtattttcagtagagatggggtttcatcatgttggccaggctgctctcaaactcctgacatcaagtgatttgcccgccccagcctcccaaagtgctgggattacaggtgtgagccaccgtgcccagctcagcattattatttttagtctacacacagtgaacttaaatctcctctagaaaagtcagaaggtctacctacaactttaagagttcagccaaaagagaccagtatctactaccgtggacaaccctatttaacatggaggagataagcagaaactgaaaagaggagcctgttttctctctggcagattaattttctttctttcttcacccatgccttggacatgaaacacaagtacaaaggttcagagaaaatcaaaacaagactgtggtttacaaataagtagtactagtaacatctcactgttggctgggcacagtgactcatgcctgtaaccctagcactttgggaggcagaagtgggaggatcacttaagcctagggttgaagaccagcctgggcaacatggtgaaacctcatttctacaaaaaatacaaaaattagccgggcgttttggtgcttgcttgtggtcccagctactcaggaggctgaggtgggaggatcacctgagcccaggagatggaggttgcagtgagccaagattacaccattgcactccaccctgggtgacagatccagaccctgtctcaaaaaaaaaaaaaaaaaaaaaaagtgaaaaaaaggaaaatcttcgttgttcttcatcagaagcctccacacagggcccctgaaggaagggcagggaagaagggggttggaggtcagtgggaggaataactctgtgactcagtgctttcctgactaccatctggatgtgggctgtatctgcgtaaggtgccgggacagggcggcctcatgaactcatgggaagcaaacacacaccctccctccgatccaccaggcactcgggtttcctgtgtgtctggtgatgtgctgggtgttgtggatctggactcaacggcagtctcaggtttatgtattaggaagcattcagcaggcaggagcagccgatctgagactggcatgggcagtggagacatcattcatctcctgaaacgtaatttggaggagactgttccagggctggctgagtgactccttgatgtcagcactttgccctgtcgtggtcttggcctttctcttgtgttccccagatgggtttcactgctctaaggatcataccttcgcaggccatctgaagttagtgaatctgaggcaaacagaagggctgggtgcggtggctcatacctgtaatcccagcactttgggataatgagatgggtggatcacctgaggtcagaagttcgagaccagcctggccaacatgatgaaaccccgtctctactaaaaatgcaaaaaattagctgggatttggtggcgcctgcctataattgcagctacttggaaggctgaggcgggagaatcacttgaaccggagaggcagaggttgcagtgagccgagatcgcgccactgcactgcagcctgggcgacagtgaaacttttgtctcaaaaacaacaacaacaacaacaacaaacaaacaagaaacaaaaaatacatagaagaggccttctcttcacaagtttttcttattgttttttgtttttttaagggaggaaatttctttcagaagtcagtactggacattcccttatttcaccttgagctacacatcccatagtcagcttagccctgtccctggtgcgggggagcaggacggttgcctgtatcccttagtcattgccgcaggcttgctgcatcacaaaccaccattagacctcagtggcccgcagcaataaacattcgattctcgccatctctgggtttgaggtgaccttggctaagctcccctgcattgctctgctcatctttctcacgagtctggcaatggggctgggaatgggctgatctaggctggacttggctggagtaacccagccccaccttggatctctctcctctacttcccacatgtatccttttcatggttaaaggtagaaacagaaaaaaacaggcagaaacataaaaagctcggagatggcttcctattgcttcttcattctgggccagagcaaatcatatggtcgtactccagggtgaggaagtatgtcccacttacagactgaaaaggtgctgcaagtctgcacggcagagggcatggataaggggttcgtaaaaacttagggccatttaatacaaatttgtcacatcacactggcttggattgattttgattcattgctctgtcgcccaaacagaattataattattttagtaaggaaagaggaaggatacctttggggcagacaatggatagagcttactatacaagtctatagaggcatctcacctgtagaaatcttaagatgagggttagccaaagcaaagagtggttcagggtgggaaagccaaggaaggccaggatcctcaccaagattgccagcagggagctctgattgtccacagctctgctctctgctcaccccggggatttagcagtaacagaatccacactagaaggacagagtgctgtacagacagaaggaaagacgcagacccaaaccttgataaccatggcaatgcaataggaaatctctttatttcgttggtgctcaagtgataccattaagtcccttaagatgcggaatttccttgcccccgctgccccctttctttctttcatcttatctatatatctgtatctatatctaatctattttttgagaaaggctctcactctgttgctcaggctggagtgaagtgatgcaatctcaggtcactgcaactgctgtctcatgggatcaagtgatcttcacacctcagcctcccaagtaactgggaccacaatgcccagctaatttttatatttttttgtagagacggtgttttgccatgttgcactggctggtctggaactcctgggctcaggagatctgcctgcctcagcctcccagagtgctgggattccaggcgtgagtcaccatgccaggcccctgcctctgtttaaatgctcaaacttggtatggaactgcacagactatacggctgctctccactcaagaatacaaattgaacattgactttcctcattttttatccagttttgctttccagagacccagatatggcttcattttttaaatgaaattttgcaggtcattagctcataatgattaaatgattctggttattagcataaaacacagctgtagtacataagaggtaacctttattgtttaaatattattcaatgtgcctacatagcacacagcaaaaaaaactttttttcagactattcagccattatggaaataacttataattacattcagaaatgttgcaaatgcaactcatccttgcagtgggataaacattgcctagaagggtttgaagaggaatccaggttagaaacaatgaaaatttttggctgggcaaggtggctcacgtctgtaatcccagcacgttgggaggccgaggcaggagaatcatttgagggcaggagttcaagacctcctcatctctacaaaaaataaaatatttgaaaaaaaaaagtgaaatttttgatatagaagaggatgtagggcaggtagggctcagaaagacccatgccatatagcaaagttcttagtaacacaggctttgggttacagcaggctagattcaaatcctgctgtggtcagaatgtctgtgtcaccccagcattcatttgttaggagatggggtcttttgggagatgatttggacatgaagacagagcctgcataattgcatgagtgcccttataaaagtgaccccagaagctgccttgcttcttccaccatgtgagaaaacagcaagaagaatatccatgaatctatgaggaggcgggactctggccagacattgaatttgctgcttccttgatcttggacttcccagcttccagaaccatgagaaataaatttctttttttcaaagctccccaggagtctctctcggtctgttctggctcaggaagctgccttatttgtaacaaacaaataaacaaaaaacaaaataaataaaagctacccagcttagattattttgtcataaaagccccaaaagactatgacaaatccttccatctatgtgtccttaggcaaaatacccaaactctctgaataccaattttctcatccaaaaaaatgggtgaataatatctaagaggtaataaccctaatacctcttagtgttgctgtgagaattaactaaagtaccatcttcatgtggtcagcacaatggctgacacatagcaagaccttggtaagttatagctgttgctgtcattcctgcagctgttatctttgtcattacgcttactgttattattagctctgctatcagagtgatgctgtggctggagaagatggagacccatgtgttcaggctgtgagcataggcagatcctttctaatgcagaaggtgcagacacagggcacagaactgccaactgtggctgctgacacctgtctgactttgactgggttagtgacaaagaaatgacttgccttttgtatgttagccctgtgcctggcatactgcaaatatctatggttgataaattaatgttatcatcatcacgtaagcatcttgggaagtctgtaagtaatgggagttggaggcttaacactgatctttgagctggcgatttttccagccaactcattttggacgttggtgcttaagcatatcctgttttcgagggtggtgttggtggtggaggaggtgatggtgatgatattgataatgacagcaagaatgtcttacatttatagagtgttcaaaaggtgccagatattgtgctaagtgctttgcgggcattatgttattcacacttcacagatattctctttctacatgtaaggaaaaaaaggcataaatactttatataatttactcaggattttaagtagagggtagattttaagtccaggcagtccaaccccctgaaagctgactctttaacaccatatgcttctgtcttcctggctgttttgtgaatgagtaggatggaaaggagatccttgaattgggaaggctacccatggactacaactagtacttgtcttcaacctccatctagatggagtgctcacaagatcctctacatcaaacctggcttcttagtccactgctgagtcttcccaattctgaaaaaaaggattcagggtataatttctcacacagatttctgggacagtgctttcttggagcaccacgcctcactaatggaacactcatgtataattctggcttttgaatttttatttttttattaacatacacagtcagcattgggtgtggctctggggattcattctagtgggcaagtctcatatttctcaacctcaggtttttcatctgtaaatggggacaatactgacatctagctaatgtccttgaggatggaatgagatattgagtataaagtatctagtagagtggctagcgtatagtgagtacccaataaatgcaatagatgttggcttttattactgtcaagtggaaacaaaagtataaggtttaagtaagcgaacgaaatggaagataattgaggaagaaaatcagatgatgtctaagataaggcaaagaacattttgtgaatgtttaaatatcctaagacccactaaggaagtttgtggcaatatttgctcaaagacagtatatataataaatactttagactggctaagagaatggctctgaatgtctacctagctatcacatttagaaacgccccttgccttccttccaggactttcttccttaatcaggattgacttaactgttaactcctagaactgtcgttgattgcttgctgaagtaacaattagtatagacattcagcaactggcctcccatactgtgattcactgacccagactttgacatcttgggctcagccataccctggagcctccaaatcctctgctggatcctttaagtccagacatctgacaggggaagaaaaagtacaagtttccaaggagttattataggtcaagcctggaagcagtgaggtcacttccacctgcttcccattggccagaattcagtcacatgatcacaaccaactgcaagggattctgggaaatgtagtctggtgatgcctcgaggaggcaagagaaatgttttcagtgaacacattgccttctcaggcttgctttctattgtagattgcttacaatattgcttttaaattgcatggtcttgtacaaatgatacgagttttattttgccttttggaaggagttattgtccatatttgttagagatatatctgtttatcagcatcattgcaaagtattagaaagggccctgcctgggctaggagccagaagcattcttcagttcccaacggccatccagccactcattgctgtgtgagctctggctggtcagtaagaacctttgatcccatgtttctttatcttcttctttttttttttttttttagccatagtctcactctgtcacctaggctggagtgcagtggtgcgatctcggctcactgcaaattctgcctgctaagatcaactgattctcctgcctcagccttccaagtagctgggattataggcatgagccaccatgcctggctaatttttgtatttttagtagtgccggggtttcaccatgttggccagtctggtctggaacacctgatctcaagtgatccacccacctcagcctcctaaagtgttggggttgcaggcgtgagccactgtgctgggccccaactttctttatcaatagaagtggggaaatcgtacctgccctgtctgcctcattggatgtggaagaaatgacataatccatgagagtggcttctgaatgaagagaacctgctaaagggaagacatgatctcaagtcagccacctctgacccaaataagaacacataattacaagactgtattgtataatcatgcaggacacaaggtatgcaattttaagggtcaaagtggtaaaaaaaaaaaaaaaaaaaaaaggaaaatcaaatataaaaaggcagccccgacaggtacgagcttgtagtcatttccccaaatgcctaaagtagacccattcccattgctctaatttgtagagatgttctcgaggcagcctggagtcaagacaagagtgccagccaggattgaggcactgttccaactccagtctggctgctttttcaacctggggctttagtcatgtcaatattcctgagcttccatgtgcttatttgaaaaataggaagattcgtccagtctcaaggaactatgataagtagcaaacaatatcccagaaaaatctccaggcaaaaatccactggaggccaggtgcgttaggtcatgcctgtaatcccagcactttgggaggtcgaggcaggaggatctcttgaggctaggagctcgagaacagtctgggcaacatagcaagtctctgtctctacaaaaaatacaaaaattagctgcgcgtggtggcgcgtgcctgtagtcctagctactcaagaggctgacatgggaggattgattgagcccaagaggtcaagacggtagtgagtcatggtcacaccactgccctcaaccctgggtgacagggtgagaccctgtctctaaaaacaaaagcaaagtctactaaaaattcactggagctatgagaaatcttagcccatggaatccagtcttctccttttgtttctggggaagctgaggttcagagagatggggtagcttgctcatgttatatagggagcaaaggacagagcttggaccagagcgcagaggtcatgataccaaagccacggcacctttgccacaacgtgagcaagaaaggatagccttgttatttttaatccaaactgaagttatgctttgggcttccagaatctgggtcaaaaagagtagaagtcaggctcagattgacgcttttcaagagagagaaaaaaaaagaaaaaaatcttgcctttccctagctagaggtcagatgtcaaaaaagctaataacacaacccaaggatgtcatcgacaaatgaaaaaactggtgcgatgcgggaacaaaagctattttatcattaatatgccgcttttttgttatgtactcatgccccagaaattattgtacagcctgtacttgagtccttagacagaaagcatcttatcattcacaagcttagctatgcaatatattcctccctccccccaaggtagttgttgttgggttttttttttttttttaagagatttacagtgatctttccatataggtttttctcgaaacatatatatttttaatttctcaccatctcaggggtaaataaatatattaaaataagctatgggatgtacagcagagtataacaatgataaatgatgttgtgtgtaatttttctactattaacataaagtaatataaactgaaggacactggtctattgagagacttagaagctaatgttccatatcagatgcggccaatgtcaggactgaatacagattaggcagtgtccttttctccccaggggaattaaagtttgagacaccacttgctgccagtggttttatggcattttgttggggccggtggtgcctttcttggtctattaattcaggagccgtaaacaacaatgtgagcaaaatgcttttccggtgggatgcatttcatttatatgtgcttgtatcgtctataccttgtcaatccattttgtcacaataagtgtttttaaattgtgtagattacctccacttcattatggttcctggcatttgtgtcttatgcaaggctattatgtgaagttaggaaatatttaaaactctgcctttctaaagaaacagggacacggtgcagaaaagttcatctggagttaggcttgtgtcttgccgtctctttaacggagagttcatgggcagggtacagtctgtgagaaggaatgaaaaccccagggtagatgctaacaaaaatcacttttaaaaaatgtatggtgtccatctgggttagcaaacacatgctcacacgtctgtgcttgctggatttttaagaacttaccagcatttaaggttttcttatgaaactgattttactcaccagggatagagtctcaaagttggaggtattttatgttgttttaaataatatcgtcatcacatgtcattttagaccccaaaagtccactccgaatctctgcgtatggaattgaggaggggtgaggctgtcagaagccgagggacttggccaaggtcacatggctttggacggccccctgaaccttggagctcatgttctgtggcactttgcatactgacctttctgctcttttatgctgcctgctctctaatattgtccaaaaaccttctctaaagaaagtacacaaatggagagagggggaattgggcatgccattgggagaacaaatttatttagatatctttggctgtgttgacagaagctgcccaattatacccaatatacaaattttaaatgcatattagtcaaagttccagttatgtagctttagaaaaatttctatgtgaatgactacttttccctgaaatacgtcctccatctcaggcactagttaggaacttcccccgcgtctggcattgcaggtctgaggttccgatgaactcttttttctctccttccccattaaaatgggcagaagggaaggaacacttgggtttcatcaagcacattgttatccttcgggttggctctgagatgatacgtttgtcacggttcataaattttatctttgcactaaaaacagggttagaatatcttcaatgcaattataaaaatgtattaaaactgagaaggagaaaaaatatggcggtagatgcgattttaatgattgtgtaaatgttcattgttccatggcaaaaaaaaaaagtcgagcttttcagccacagtatttcagacaaatgccagggcctgtttttctgtaaatgtgtaccgtgtgcttttaacacaaagacaaatatgttgctttaaaattccgcttggaatagagtgaccagctgtcgttatataatatctgcaggctatgattgtgtaggtgcctgtagtcactggctatgaaaatggccccaaataaagtggtatccacacttcttctttctcctacgaatttggaggtctaggaacgggggtaagcctatatggtcataattagcctgcaaacgtgaattaatatgcagaatctgtccccactgtgatagaatttgccattcgcttcctttgctaaatggcttgcagtggcagctgacggccaaaggggaagctgagaacagcaaagattcaactgaaaacattttagggggttcctgacttcaggcctcttttcagaatgagggaattgtctaaaatcccaaatgcattcttagctaaggtcagtgtgtctgggtctgtgtcaggcatgtagcagccacagcaaacttctcttgagatagcatctcctccccagcactcacttgacagattgtggtcagtcaacactcagtctgatagtttagaaagcttttgcaaggcattccccaatataaccattaagcatcaaactctcaaatggaagtttcgaaaaacagaaaaaaaaagtgagcataaatgcaaactatcaccccatgtaatagtttatttatttcatgctccacttttctgggcagttttgttgtcattctctctctacctctttttttttttttaaagacagagtctcactctgttgcccaggctggagtgcagtggtgcaatcttggctcactgcagcctccacctctgcctcccaggttcaagtgatactcatctcaagtggtttctacctcattaaaacaaacaaacaaacaccactcaccatttttgtggtgggcatggtggctcatgcctgtaatcccagctctttgggaggccaacgcaggtagatcccctgaggttgggagtttgagaccaccctggccaacatggtgaaatcccatctctactaaaaatacaaaaattagctgggtgtggtggcatgtgctataatcccagctactcaggaggctgaggcaggaaggtcacttgaacccaggaggtagaggttgcagtaagctgatatcatgtcaccgcactccaacctgggtgacaaggctagaccctatctcaaaaataaagaaacccttgctattttagcttccgatgaggatatttatccttctagcatttgaatgcagccaaagtccttactgggcaaatttttgagctctcaccccacattaacaatttctctccttaactttgtttctgaatgaagttatccacagagttttaaagtgagtggtgagttgtggatacctcttccgagcaggtgcacccccatcctgccattgtccctctccttagtgtatatggattgatgacatttcagtttcagacaaagggacatttcattttttttaggagattaaagctgtgtaagatatacaatttaaactgaatgttgatattttatagattgttgagtccgattgtcctgatctaaaattaactggttttgtgatttggtgtaaatcgcttaacctctttcaatgttttttcagcaaaatggggtaagaacagaatctgccttgcagagaattaaccgagatgatgtgtggaaagggcctatcccagaggctggtgtaccatggtggcttctcctggctctgctggttattattattagcattattgtcattgtgaaagtgacaaggaatgtgcctgtgcgtgaatctcactcttagatcagacgtgcttttgaaatatccagatatatacaacacaaagagcgaagtttgttttatattttgtttgtttaggttttttttttttttttttttttggctggtgtttactgaatgcgtgcaaggctttctgtcacaggctctgtgttaagatatttaacgggtgtttcattttcccagcaatgctataggacacagaaaggaacataaattgttacagagagaaagagggtaggtctgtgaatggaattgaacaggtaggttgaacaagataaatgccgaggaagcaagtgtatttaaataaacagttgtttatggaaggctttggaaatccactatattaatctggaattttatgaaattttaccagaacttaaattattaatagttgaggacaaagaccaaccattttccccaaaacttagtcactagttttgtccttaacaactaattaataaatatttgtgaatatagtgagtgactaaagtaatgcattaatggttgaatggctggccaccgtgcctcatgcctgtaatcccagcactttgagaggccaaggcaggcagattacttgaggtcaggagttcaagatcagcctgggcaatatggtgaagccccgtctctactaaaaatagagaagttagccaggtgtggtggtgggcgcctgtaatcccagctacatgggaggctgaagcaggagaattgcttgaacccaggagggacaggttgcagtgagacaagatgatgccattgcactccagcctgggtcacagagcaagacttcatctgaaaaaaaaaaaaaaaaaaaaaaaaaaacaacaaacagaaaaatgaacgagtgagtggcaagaaagatgaaatgattttcatcaccaggcctgccatggaattcatggtgccttgtactgtggccagtaggtgcaagagtatctagtaggtgctttatttttaaaaaatgtcttggaatcagtcatagtttaatatcaattatatataaattagtctttcaggatccaacagttctgatttattccactcacacaacaagtcagttcttaacacaaaccacataggttcttccttaaataaaaagctgtggctatgaagaagtgagagtttttttttttttcctctccaaaccaccacgtgctcttgtgtgttattgtagtggcttcgcagagtatttatttggccagaaagtctatagtcaaattgctcttcattctcaagtgtagtatttatttctccagctcatgcagaattctgttttatatggaggttttaaatttgtgcagaaaagtattacgtgggtttcaaaggtactcttttttcttttttgagacagggtctcgctgtgttgcccatgctggagtgcagtggtgcgatcacagctttctgcagcattgaccttgtgggctcaagcagtcgtcctgcctcagcctcccaagtagcttagaaccacaggcatataccaccatacctggacatgtttttaactttaatttttatttttgtagagatgtggtctccctatgttgcccaggttgctctcaaactcctaggctcaagcagtcttcccaccctggcctcccaaagtgcaggcattttaggcatgacccatcgtgtccagcctaaatggcattcttggaagtaaaaccacaggggatctgttggaagtggcatgatggaggaattttaaaagaattgaacaaataaaatagtcagagctcaaaaattgagtactgcttcgtttctcccaaataaccatcaccagacaaacaggtgtgtgtgtgggtgggggaggtggcctggtggtacttcatgatcttggaagaaggaaggcgcccctccttcttagctgattgatgatgagatagaaagatagaaacagccccatcactatgagatggaaacacttctttccttcatctgacttccctctccttcattcccaaccaagtttgaccccgccgcagtggagattgtggcagatgggtcagatagcatgtgtcctgtcgctgtcacaactttttaataagggctgggggtcctcttgaagagcccaggaactgcagtccctcctctatgccttcccctgaacacagtgcgccctcactaataaattctgagggctgacactgcctgagccggctggtctttgccctcaatttcattgagatgggccattgaaaactcattacaagctgtttagactctgactttgacttttgctcggcagcgaacaaaattaacagctcttggaggtaggaaaaaaggcgctcagccaaattaaaaaaaaaaaaaagaaagaaagaattgaaatgatgagaaaagacttttaatattaactccattagtcatgcaaacaagcgcacatgcgaagcgcatatgttctgcgtgtggctctcatttggagcctgatgagaactgtggtttctcccactggagggaaattcatacccaggtcttacacgtagctcaaaatgttttacatgtcaagcaatgagcctttgagtgtagcagaattgcttcataaatttaactatcactttcaaatttctgttttttttctaatttagtgcttgatagttttttatgtgataattttaaaatgctgtttgtagcaaaagttaccttgatagttcaggtgtgcagagaaaattcacagccatcaatagaaaagaaaaaaaaatcctgtttataccttaggcattctgtgatccttaggatgtagccatgacagtattacgggttttaaaagccacccaagtaatctaaatttcctccaaactaacaattcctgaaagattgaaatattgctaccaatgtctatggatggtttccattgatatttgggaagtttccatttgtatttgggaagctttgcatgagcaaaatgcccctttctcctgatatttgcaacccatcttaaaaataaaagtacttttctgcatgtggtcttgtacatgaaattaagaatatcactaccaaaatatcaaaatttaaggactagattgtgaaatgtttaaggaggcaaagaatatttaaccaagaaaggaaaagtgtatttgagagagacctgatgagttcaccactgcctctggagaatcaaatccaaaacagcatatatatgtatattttttagagacggagtctcaccctgtcgcccaggctcgagtgcagtggcgccatctcaggatctcggctcactgcaagctccgcctcccgggttcatgccattctcctgtctcagcctccggagtagctgggactacaggcacccgccacctcgcctggctaatttttttttttgtattgtttgtatttttcatatttttcgtagagtcagggtttcacagtgttatgcaggatggtctcgatttcctgacatcgtgatccgcccgcctcagcctcccaaagtgctgggattacaggcgtgagctgacgctcccggcctacagcatagatttgaggcatcttgaaggtagatgcagaagagtgggatctactttggatttttagattaatcactgttaagacttaaacagcttcttatttgggtgaaacatgggagtgtcaaaaataagtcactgtcactctttgccaacttcctttaactctttatacggctatatctccatagatatccagtttttgttttgtttttgtttctgttttcagttcctctccaaactgtcaaggacagtgccaagatctgcgaatatagaaagattaagagtttttttctgccttgttgggtcttctttctagcatgccaggaacatttttctcatcttttgaacattagggaataacacccaatgccaccctataatctcgagacagaagtggaggatcctcttaagacaagaaatctttcaaagccaaataatgaattaatccaaagccacttgaggctctagatagatcttagcagtcaaagcaataaatatataatcccataaatctaaactttgtggtatattcattaggctgtctgttttcttttctttcaaatgtttcacttaattccctgatataataaggcttccaaattcttggtgtttttctacaaccaagaccttgaactttttcctctcaggatttctttcatgagaacccattttctggccatttggatatcattgatgagggaattgaagcatttccctattctttagagtttcattaaagtttgactatattccagtaacaattgttgcataacaaaccacccccaaatttagtggcttaaaacaacaacatttattttgttcaggaatctgtagtttcagcagggctctgaggaacagcttgtctctgctccagcatcagctgaagcagcttgaaagccagggtctgagatcatctgaaggttgttcactcatgagtctgaggattgatgctgactggtgggtgggacccttgctggagggtctattggctggaacacctacacattgtctccatgtaccctgagcttcctcacaatatggcggctgggttccaagggtgagcgtcccaagagaaagaaccaagcagatgctgcattgccttttatggccttccatagaagttacatagccctaggttttcctgcattctattttttaggctgtcagacccaccccaaccaggtttgcagtgagaggaaatagaccccacctcttctggaagagaatgtgggactggacatactgccatggccacttttgaaagatgcagtctgccacataagcaaacagttcgtgtcctgcagtgggatattgggaaaagaatggtatttggcaaggggtcaggaaacctgcttttgaatcctacctctgcctcttactagccacatgactgggtcttagcatgctcatctatgaaatgggggacactaatgctgaccccacatttgtgctgaggattatgcaaataaaatctgtaatttgtgcaagcatccaccaagtgcctggtgcagactggatgctcaataagtctttggtgggtccatgtattgaattggaatctgcacattatggccattatttaggtttcttgtgtcctaatctatgtcactgagtacatccttgctgtttttcatgaattttccactgagtcgcaacatgccactggccagtgaaggtcaggcaggaaacagattaacaacatctcataccacaatgtcaaaatacttaaaagtgtttacagatgccagtgacacccagtgaatctaaaacaagaggaccagagcagaagtaaaactattcttgttcttctaagcttgaacacaggccttgatgttttatgattgttttaaggtccattaatcgctgaatcatgaggccatgtaaaaaaatgacagctataacatcaagggcccgggtttattttaaatgtttttgcttctacatggattctaattaacgacagtggctaaaacctgattcaaatgtggcaaatgtggagtgccatgggatgaagccagtcaatttcatctaggagcattttatggcttatggaaagaaatattctcttagattgaagggcgccagcctgtaatgggcatcagctgattctcagaaagaagaaacaacgtactgttacataattggggcttctccaaagtggcctgaccaaactgtagagctgcttgtttgtctgatacggtagccattagccacatgtggctatttaaactgaaatgaattaaagttgtataacatttgtaaaaatcacttcttcggtttcattaactagcctcatttcaagtgctcagtagctacatgtacctaacacattggacagcacggttacagaacgttttcatttcatcggacagtttaactgctttggagactggttctcctttttctttttccatgttcactccagaattaaagtcaaccagttcaaatgtcccatctttccccacagacatttgtgctcaaaggcatccccttccccatttggagactctcctagggcctaggcccaagcaaccaggactccctgtagtcaaccccactcctcaatttttggcacccatgttattccacctcaagatcatgtcctcttttaacccctctgaatatgctcctcctgtgatacccatagggaccctgaacctctagtcctcaagagcagtcattcacccctttggactatggatccgtttgcaacccaggaacaactactgtatggccacttcaaacctgtatatgctgcaagtattttattctaggtagggtaaataataggtcttagatataggtgcaaataattttcaaatatgggtaaatgctattgggatgtgtaaagtagaaatccattttaaagtgttattgaatccatactaacctgatcattacatatttactaattgatgattactaaaaatgtggacctttgtgaatttccgatgtcatagaagggtgttcttaactggaaaagtcagtagccaacattctgggaagtagaggcctcttcctcactgcttcattggtttaaaataaactccaacagaaaaacatgccatcatctttaatttcctgcatcagctaagcatttatttcatgtagtcctcacactagattgagtggttccatattaatatcctacgtcaaagatgagtaaattgagatgcgtaggttctaatttgcccagtgtcgtggtgtgtgatcttgaccactagcctaaactgctattttatgtccacccatcaacctctacggctgcccctcatttgaacacacaaaatatagttgtgtggcttggtggagccatctaaattccgttaggccatttgccaatgctgctattaggggcgaaatgtcatgcgcttgatctaaatgtacttaggagaattctcaggacctgatgaattattattcggaattttatggcctcacaggttgcaggcttcataccaactgcagctaatgagctatgggccccgagaaacactgaggacacacggcgttctgcacacagagtgggctgtttctgtctgttctccccctgcacccttctcagatgcaatctcaagtcataggagaacttgtgcaaatgtttctcctggatggtttcctttagagcatgtgtcctataacttgaaatggttgtctgagcagaatgtttttagaagttagatttttttaggggggaaacaggaaccaaagcaaagccaatagagatcttgaaaaaaaaaaaaaaaaagaaaaaaccaccgtggtattctaggaagaaaaaagcatttttcgaatgaaaactttttattatatttgatatattctgcttcccttccctagtatgtattaatgagatgaaatcacttcttaattttcaggttaatattaaagttgaagcccatccctctaccctgaggactctgccagcctctggcagtattcctttccaacttccacttgccccaaataggtagaagttagcctttatttttggtgtcatgtcttctttccctcctcctatcagtttttcagaaactccagaaatttaacctagtacacaggggccccccacccctgtttccagatgccttctagaaagaggactgggagtgtgaatgaggccatgtgggctttgtttgaccctgtggttgtcatgacaatttctcaaagcttagctgggacaggaagaaggaaggggaggatagcggtgtgttcagtgtgtgagctcctaaaagctcttgggtcactgttcccaggggatgatgaccctctatggcagatcagttgcatgtgcatatgagctttccctcctcccgtgggttagcatgttccacactcaccttctcaaagcaaagtctcccttaggggacccttggtatcctgttcatctggcaaatctcagcaccaatagaaacaccaagaacatggattcatcaaaggaaaaatgttgaagtttccatttttatgcttcctggtaatccttcagcccttgatggaaatttccagacctaaaccagtgaattaagagtatggggaagaggagccctcatacagttctgttaaatggtcctttaatattcttcttcagagtgacgggtaccccttgcctatacattttcaaaactacactgaaaatttcaaaacatttctatcagaacacagtcttattctcagctgatctgcaatttccacctggatctgttaaatggcagcttagctatgaaatatcatgttctgcccaatcacctaccctgcctcatatgatcagccggtatatttatgtggacacatgcagccacacttgtttttaacatttgagaatgacagcgtattggcagttcatataagctatcaaatattacatgtcaactcagaaaacatccctaggaagtattatgggaaccccctgtatcacttgagattcttggatccatatttgctgttaacaaaataaattaatagtcaacaactgattaaagcatttccctgctaccatgattgccttgacaaattctgcagtgctggagtattttacctcccattatttcttccgctgaacaggacgtttggttctaattgttaagcctgcctaatgctgattgaagcgggccatagtatcaagggtggaagaaggtgggaatataaactagatttgctcccttctgtaggaataactctatgaagactttctttttggagacaaatcatcttatgcaggggggaaaaaaaactccctaaaaaagacaaatgacagcgcaagatccaaaaagacaagtgctcagtcattttgtcataatgccagaagagacagtaatgctgtgtggactatgcattcagacatttagaaaatactgcaggcagagctggggattccgtggccagaagcatatttggtgaaccgaggacgcatcaaagagcttctctggtgtttagtaacttgcactgtatttcagaggtttataaagggaagggacaggaaagcagtgtgccagtaagacaactcctcttctcgtctggattttagaggaatgcagtgaacaaatgatgaaaaagtctgaagggactttggtaattcagtatccgaaaaacaatcagtgttttgtgacattcttagttgtgatctaccttatgttgtatacacatggtcactcacatacataggtgtattattctgcaattgctgagtaattgatgatccttcattctctctgtgattcataggctctctgggttggataaatcacttcggggaattatatctactagtatatttatgtcactagaattcctttgagaagctatcactgtgtacatttactgtatctattaactttcttcatctccctcttcctccctttcttcctttcctttccctttcctttctcctctcctgtcctttctctctccctccctctttcttttctttctttttcctttttctctctctctttccccctttttgtatttctaggagaaacggggtttcaccatgttggccaggctggtctcaagctcctgacctcaggtgatccacctgcctcagtctcccaaagtgctgggattacaggcatgagccatcatgcccagcccccttgtcctcttcttataaggctactaatcccctcatgaggggacccatcctcaagacttcatctaaacctaacaacctctccagggtcccacacccagataccatcccactgatggtcagggctttgacatatgaatgaggggtagagggacacaaacattcagtccctaacacttggtcaagttacttaagcttggtaagcctctctcttcttactgagtcatgagcataataagatatacctgttagggttcttttgaggaataaatggaatttttaaagaattgtgccagacatgtaataattacttgataaactatagctattataacaccatcaaagctgtggttcttaccctcatcattgtttaccctctcacacagtaagatctttctgaaaaggatcaagtctcattctcttttgaaccccaaagtccccagccaccacagagaccaaatacagtaggtaccaatgcatggcaatgcataggaactaggtgtcctaacttggcactgtatctgccaattttttaaaagacaagatgacatcccaaagattggggcatatttaggataatgccccattctgtgagggtggacattatagaggacatcagcagccagccacaggccatctcttggtgccattgggttttgagaccctcagggtgacaccgatttaacatgacaggtcttatgttcttgggtaatgtcaaacaacttcttgaaaatatttgttaaaaaaaacccaaaaacagaaacatatctgactgggcatggtggctcctgcctgtaatcctgacactttgggaggccgaggtggacggatcacctgaggtcaggagttcgagaccagcctggccaacatggcgaaactccttctctactaaaaataaaaaaaaaaaattgccaggcctaggcgcaggcacctgtaatcccagctgctcgggaggctgacgcgcgagaatcacttgaacccaggaggcgaaggttgcagtgagccaagatagtgccactgcactgcagcctgggtgacagaatgagactccatcctcccaccccctaaaaaaaaaatctatccaaaggccttgactaatgcagaatcagcactaatttacaagccccataaactaaagaccccatgtttgtgttataagttttcaaactttttaaatattttcccctgtcttattttctatcatttcacatcttcttaaacacatatatttttaaaagaggttttgactcactggtgaatttgtcttaaaatggaaaaataaaatcaaatataagaattttgttatgaatctttggggaaacacaattagggaatctaccttaataggtaaacccatgtaatttcttatttccgtctagttataggaaaatactgagatacttgtgagatgttttctttttttttttttccaacttgtatacacgttgttctataagtggttgattgttttttaggaaaaaaaaattcagcatctcaaatgtacctttaatattgcttctgatttttgttgttttgctatcatagcgttacctacctcacagagatgttttaggtcataagtatttttcatttaattttttttccccttaatttcctttttttccctcctaagctataaatatacagccttaaaaaaaacactcagaaatttaagtccaagaagcctgcttttcttgatacctttcaagtgctagattaataacatttttgtcaggtggttaccagaatggaggatacttgagctgagttttgctagagtccaagatcatctattctaatttctggggacacatattttgtcctggttagagagatatataatgatgcctatctgattctgtggtggtctggctttgatgtatgtatatgtgggcaggaatgtgtgtgcgtgtgtgtgtgcatgtgtgagctcctgtgtgtgtgttcatcacgtatccattgtgtctccaaggtcttatcaacagcaacaaaaggcctcctttgagatcaatcacattcattcgatgtttgttttctactacctgatacttactgctttctctttgtcgccgttaattttgtttgtcatatgtcagaccaggatgagtggggcacatacagattcagctcattttattttttttctcccttccttcgtcaccacctttgctaatttcaggcggtcagcacatttagcaagcatgtagctgcttgcctgagcaagccattaatctatattagaaaatgtagaggccccagtgttaaccttcctgaagcttgtctccccacccccaattctataggttctattatatctccgctggtttaaggcaactgctgtttcttttaggagttttcttttctttccttgctgaatatctgcacttaccaatactgcccaggcacatgggctgtggctcaagttttcagtgcaggacagtgtgtcattgcaggagaagacagaacccggccagatcctcccgctgccggcaagcggagtcagttactgggaagccataataattctgtcttctagagaattttggcaaaaatgtgcctccatcttacatcaacaatttttcatctttctggaatttttatttccccttcccctcttgttcctttttatcctcctggtgaagtatctccttttccctaaaaaactggaaaaaatgcacttttctatattaattcaaatcatattcaaaaaatactatatgttaaaaaatacgatgtttctgtaatccttacatcccctaataaaaccactgtgtgatgaaactaccaagaagcctctcttgaaaaaaaaaaaattaagtgaacctctactttagaatgttggcttttcatatatgtacaaaacaaaagaggttgcagtgatggcgtggataaaggcacctgtgtacttttccaacctatccaatttcaagatgtatcctttgtggattacattggttcttttctatggaatcatgcaccttagacctgggagaaaccagcgtgacatccagggtcaaggttttccaatcaggtattttgggggaaaaagttctgccttcatgtaacaactaatgtgacatggcagtgtataagacattacagccaaggccttctggttgaagttggggaactgtgggcgttgtccccactagtcctgtcatctgcccttgcaaaaccacccttgggctctctcgcgtgcggtctgtgcaccagctacctttgtgctccccacattcttccacctggcctggaagctgaccatagttggctctcttgccctttcttcttctggttggatttagcaatttaattttcaggcttgctccctgcagggtgtcacttcaccaccttcctctgtagaaggtttcgtccaggccgggcacagtggctcacgcctgtaatcccaacacttcgggaggccgaggtgggcagattgtctgaggtcaggagtttgaaaccagcctggccaacatagtgaaaacccatctctactaaaaatacaaaaattaaccaggcatggtggcacacacctgtaatcccagctacttgggaggttgagacaggagatttccttaagcctcggagatggaggttgcagtgagccaagattgtgccactgcactccagcctggctgagagaatgaaactctgtctcgagaaaaaaaaaaaaaaagaaggtttcatacattttagctgacaagggcaggagctgttcctgctgttactaactggagtacattgcatgaaaccttgctgtttccttaaaccctgcaccgacctttacaaacagtgcctttactaaacacttcttacgttacccgttttgagtgtaccatctgcctcttgccaggaccctgaccaagaatttgaaatctcagaccatgatgacctccttgcccaatgcgtaagctgtcctccaaaacacacatttatgggggcagagggagtctctctggaaggaaacttcgtctgagccatggctccttttgcttcccctgggttttaatccttccttcccttcctgttcttttaaggaaatctgaaaaggagcaaaagagctttagaactgcaatgcatctgtctgaggccaaggacagttgtacgcagacctctctgccagtgtttcagtgaccctcctcttgctgcttggctgcctatgagtccatgctgacatctggctctgtctgcccaaatataaacttgagagtgacttccaagatatatacagggctcagaggttctctccccaacccattcactggccctgctctctctcgatgttcccaagtctcctgggtgaccttgtgtgtccttcctgggatattgctcaatcaccctagaactgtaaggccaagtggtcatagccagaacatggcagaaacattcctgcttctattctgcttttctagcatggaatcccctctgccttaatgtgaataaatactccccaaaatgaaggcagaatccagtatctgttgtttaaactaaatccctaactggaccccctctgataaaccctctgataaagaattgatgtaaaatttgggacgctggataggaccaggaagccagagaaagagggcacccttttcttttctagcatttgagttcccaaagaagtaaaactctgtgaatgttcacttcattttttcctgatatatcgaggactccagatgtaacctcattgatagtcttggtgtgttcttcagtatttgtgcttttaatagatattgcaagtgtgtttaatgtgaaaatagaaatggagggcttttaaaagagcttactcaaaatcctgccaattactgaaatctaccagacaagaaggagccactcttttttttttttttttttttttttttttttgatacaatgaggggaaatgtttcttccacaaaagcctggccgtttgtctttaaaaattttcatcttttgggtactgagttgtaatagtaaatacagatgtagctgtgtcacattaaaagcacaaccaaattgtagtacaatgttcaggacacttttatgtcactttaaaatgtagagtatcatctaaaaatgagcaattgctgtgaagaaactggggttggctctgattttgtggctcagttttttttggtttcttgagaagatcatctttaagtcaaaagttatgcaatgccaagtactcatctgtgtaatctatttcagtttccaaaatttttcatcacctggttacaaacatctgaaggcaagaaatagccaagattccattgcaagtcccagagtaagttattattagacagaaacaaacaagtaaataccttgggcctgagctattgcccaaaccagtcctgacttggcttgggttctgaccaactgtttttgatcccacagtctgaagtacgtttgtggaaatacaaaggtcaaaccttcccctaaccctctgtaatccctggtggagctaaggaatgaaaagttgcttaaacattttcctgttgccagtttttcttaaacattagtgctattctttttttttttttttttttttttttttccttcttcaaccctgactctgattcacaaagaatagggaagcttagccaactgcagtttcaaagtattgcttcttaagcctgggccaagtgtgtagacttgatagaattctgattaatgcatcttattacattaattttagaagaaaccagaaggcatttctcctattcctagtgcaggccagcctgccagaagcatttgcctccttaaagagctaatatcttcagctaccaacaatcataaaactgaaagatctatcggaagagttggcttctctggatgtgcataaggcacactgcaaaatagatgtacagcttggctgaactttgcttcaaatttgccaatcaaaattcacgaacccatgccaagttggctacaaaacctctcgcttggagccagcactaattatgtcaacaagtagttcaagtttagcccctgttaagtcctgtactcctgggtattggggatgagtctttgtgtggtggcaaacgggccctgtcttcgcttggcttcctcctaaaattcccaggacctcttcgggtcccagccctttctcttcccctgagattgcgcctcctcaccctctgtcttggatggaaagagttccaaggcagtccagtcaccccagtgaaaagttttctgatgaggtcaagccttcttattgtcataggtcattttctttagaaatgagaaaccatctcattgggctttccaggaaggagactctgagtgcaagtttgttgtgaagaacacgtgccttggaattaacacctatggaagggaagaaaacgaagatggagtgggcagagggagaagctgactgagatggagtccagcaagggtctcagtcaaccttatgaagctaaaagggcccatcagagctaatccctattgggctaatgtggccaggcttttataaacctgccttgactcgtgattgggtgggctgccccaggaaggatgtgcccttgcagaaggtagtctctgtgttcaggtactccctggaaaggctaatggctgaaggctacaggttaccctggaagggagacctgggctgcacatcagagcccatctactttccagtgtggacaagttccagctcctgccccagccctgccacaccatcaccctctccagcacacacagcccttctctgttgattagggttggttgagctgttctaccaccttcattgactcaggccttgaagtgcagtagaaagccctaggacaaggcaggcccagttttgaggctgggtgcagaggctcatgcctgtaatcccagcacttcgggaggccacggcaagaggatcacttgaagccaggagtttgagatcagtctggccaacacagcgagacccaatctctccaaaaagtttaaaaatcggctgggcatggtggtacatgcctgtagtcctagctactcaggagactgaggcaggaggatcacttgagcctcgtaggtcgaggctgcagtgaactaagatgccacaggactatagcctgggcagttttgagtgctgcctctaccatgtaactagcttgccagtcaagtcattaactattcggggccttagtttcgtcttttctgaattggagccagtatacgtaattccaaaggttgcttttaagcgtaagtgagaatattggcagaaattcgttagcactgagagagggaatgtaaagtggaggttaagtgtacggcttaagagcagagtcaggaaacctagacttgcaccctgatttctgagttgaatgttccagggtaagccacttaatctctctaatcctcattgtgcttagctctagaatggaggcttgttgagaaaattaaatggaaacgataacggcgaagcacttagcacatgagcaggcccatagtactcaggtgttcattccacagaaaagcgttcactcttctgcactctttctcagtcagttggccactgctgttcagttcacttcttttggatcttctcagccccatcaggttcccaggtgaaatgagccccggctcagcaggccagttgtcttcagtgacccccagtgaggcagcaggtgggacttgattctggaggcaagactcaactccatagacagggcttacacaccggaccaaattgaggactagctaaaacagggatagggtgggtgcacctttccatgagctgtgtccgccagtgtgtcatgtcagtttacaatttccatggcaacacctagaagttactgcccctttccatgacaatgacccaacaacctggaagttaccaccctttttctagaaatttctgcataatccaccacttaatttgcatataattaaaaatgggtgtaaatgtgatggcagaactgcctcggaattgccactgtgggtactctgcatgtggggtagccctgttttgcaaggagcagcacctctgctcctgttgtacactgtcccttcaataaaagttgctaacaccaccaccttgcccttgaattctttcctgggcaaagccaagaaccctgttggcctaagccgcaattctggggttcgcctgccctgcatcaccagcacagtggaaggccacaagctcacagcattttcatccgtaaacaaagcttggcaatatctctgatggttaagagcttacgtgtttgcgccagtgagacttgcactcagtcttctttgagtgagacttgaactcgattctgagtctcctccttcctagatggactcattatttacttatttatgtattcactcatctattcattaatttatactcttagtttgatatcaacatctgtaaaatggggatggtaatgtggtgatatggaggaaaataaaataactctggcattgttcttactatttacctctgtactgtcatcgttatcattcctttgataaccgtgagcacctgtcatgggcctggcactctagtaggctctcaggatgcacaatgaccctgtccctgcttgctggagacataggagaagcccccagccactgacatctgggtgttgtaagaaagcaagaacagtcatggacactgctaagttttgatgccaaagagccaaatttgcagtaccagaatgtcctttccatgtgtgacccaaagttttggctactgaagacgttgcatgccctccaacagtggaagtggtgccctgaatacgccagaaataatcgtggagtcaacgaagatctgggagtattgtttggagacatctcagtattcctaattcattttcccatccttaaataaaaatctttcttactgatgatctgagaacttcttgtaagccccatttccatgagtagagttggccattgcccactaagaaaatttaggtggtttttattgggattagtggatgaacttaggattagtgtggcccttccttgaaatataatgacaaccttggtgaaagcaagaccacagggcctgtcttcagggaagtgccttgcattttaataccaaccatgccacgtgtatgtgtttcctgggcctgccataacaaattatcgcaaactgggtagattgagaatcattcattgtttcatggttttggtggccggaagtccaaaatcaaggcgtttgtggggttcgttccttctggaagctatgagggagaaaccatgccatgcctgtctcctggtttctggtgactgctggcaattcttgatgtcccttggcttggaaacaccacattctaatctctacttcctcccttacatcaccttctcctctggctttgtgtcctttctgtctcttacaaggacaccagtcattggacttaggacccacctaattgagtatgatctcatctcattccttatcttaattacatttgcaaagaccctgtttccaaataaagtcacattcgttggttctgagtgaacatgtttctagggggacactattgaacccactgcactgcatcaaacgtatgggtgtgctttctcttggcctttctcctatttgccttctctgtgttgggaattgtggcttcacacccatctacttatccctgcatgttgagcatcgtctgttacctgaagagcagaaggatgataaaagtgaggaaactgaggcacaggcttgccccaggttacacagctagttatgatggagggtgggtcggaagccaagcgccccccagcccccaccccacaacaggtgtatgtggcctctggtttatccttctttccccctgctcaccacatggcttctcattttgaaaacccggtggctaataaagtagatgagtttcaggattgcaaaatattgtgatcctggcctttgtccattgtgtaatcttcacagtgaccagagtgtttgcagttcctaggaagttcacccattcccaacagtgtcccagggtcaagctcagatgacctgtggtatttttatacccatatatgtgtcaatgtttataacttttaaagttgttttcaggaagcactgaggcatgtggtcgttcacaggtgacaaagacagaggctcagggaactcagttggttgctgagctttaaacccaagtctatttctgaggctggactgagtctttgagaaaatgcaaagtaacctagcatagtgtcagacacaaaatagtcagcaaataccatcgtagattcaggcttctgagtccaaagctaacaattctcatctccaattcccatcttcaaatattaaaataaactttttttttaagagacagaatctcactgtgttgctcaggctagagtgctgtggcatcttagctcacagcagcctcgacctaccaggctcaagcgatccttctgcctcagtctcctgagtaggtaggactataggcatgcaccaccatgcccagctatttttaaaatttcctgtagagatggggtctcagtgcattggccagactgacctaaactcctggctacaagtgatcctcttgccttggcctcccaaagtgctgggattacaggtgtgagccaccatgcccagccttaaataaactctttagtgtcaaaaaatctacgtgaggccaggtgtggtggcttacccctgtaatcacagcactttaggaggccaaggtgggtgggtcatctgaggtcaggagttcaagcccagcctggctgacatgacgaaacgccatctctactaaaaacacaaaaattagccaggtgtggtggcatgtgcctgtaatcttagctactcaagaggctgaggcaggagaatggcttgaacccaggaggcaggggttgcagtcagctgagactgcgccagtgtactccagcctgagagacagagccgagactctgtctcaaagaaaaacaaaaacaaaaacaaacaaaaatctacttgaaccaataaaaattcccatccccacctagaattctaaatattttataaataaagtcttcagagcctagatattcactagaacccagtggtcacgtgttcctaatgggtggaatattattttgaatctttccatgatgagagttacattgctgggtgaaagctttttatgcaacatcatcattgttgaataaacagacgcttagcatatttaggttggaatgcaagggaactaaaggtaggggagattcttaaggaagtctactttctcttcaagaatgctatcaaattgaaaggtaattcctaaagaagagtcatttgtaaattagggaggaagagctaaaaaagattcctagcaagaaacatcataaaggggcttgataaagccaaaaaactaaaagaaaaaaaaaaaggaattagaaacagagaaaagaggcttcgtgttgtttgtaaatttgtgaataaatctgttaaagaaatattggattcatattcaacttggaaaacagggaaaggccttttattgcatgctttgaagtttgaatacactttcagtagctcttcgttatctcaaattaaatcttaaattgagcttgtggttctgtgaattaatactccggcctttcagccctgctgctgaggtcattcaaatctaatggtggaaacggtcacagggtcaggccttggatggtgctgtatagaaatgccttaatgatgctggcagatgtttgcattctgcagctggggcggctggcgggttgggggctgcaggaagagaggagttgatgatcacattattgtgtcagccgcctgtgtgaataaggaaggacagactcccaccccatcccatcattccaggttcaataagaggcaggtgcttcctaaagcagaaaaatgtaagggaagtcatcatcgcttatcatcacctgaatgttcaccatggtgacccacatctcaggatgctgcaaaacgagagaggtcacctgtctgtgtaatcgcatatagcattctaaagatgttccattcattcagcaaatgtttaataaaggcttcatctgaagtttaatggacattgtttgataaaacagacccagtcactggtgtcagggagtttatataaaagtatacacgtatctgtgcaaatgtgtgcatttaaggcccgccgagcctgagctgatatgcatgtcttaactttgctgtttctctaaggggatggaaggattggctaccctgagctttctagacttgttatttttttttttttaagacagaatcttgttctgtctccgagctagagtacaatggtatgatcatagctcactacaacctccaatgcctgggtttaagtgatcctgccacctcagcctcccaagtagctaggactacaggcgagagccaccatactgggctaatttttgttttttattgagatggggtcttcctatgttgcccagcctggtctcaaacttctggcctcaaagcaatcctcctgccttgatagacgtgttcattgtaggtttctagcctctgaatccaaattttatttttctagtactttattttattttactttttattgattgaaaccttgaaataaagtttttaaaaatctatttgattttaaacgatctttagaaatatatgaaggttaaaaataactctcattttgctttttataaacagtccactcctacatgtagacacatttagatgcttcattttgcctgtagaaagtttttctaacaataaactgaccaatgatgatgaaatttttattgactcaaatgtgtgattggttgatttactgtattcagtccaagctcctcccaaaggttagctcattgactctacaactctgttttcctcattcattcattcctctaatcaatatgtattgctcacttggtacatgtcagatactttcctaggtgctggggagaaacaagcaaagtacttcagggcctgtattagtttgtttttcacgctgctgataaagacacacccgagactgggaagaaaaagaggtttaattggacttacagttccgcacggctggggaggcctcagaatcatggcaggaggtgaaaggcacttcttacacggcagcggcaagagaaaatgaggaagaagcgcacgtgagaacccctggtaaacccatcagatcttgtgacacttattcactatcacgaggatagcgcaggaaagaccggcccacatgattgagttacctcgccctgggtccctcccacaacatgtgggaattctgggagatacaattcaagttgagatttgggtggagacacacccaaagcatatcagggtcctaggcaactttgtgtgagaacagaacagagaggaagcgacacacctttcctttgggagcaatttttgggttgcttttgtttttatttgttgttttcattcctggtagtaatagtaacagtagaaaatggcagcgttatagccataaacaaagtgctctgtggtttctctctcaccatcccctaaaccctacaaggctaggggaaaatggtaatactcatgaacaactccacttcataaatgaggatgccggcactcggggaggtcaagtgagtttcataaggtcatagagcaaccaagtggcagggctgactcccacccaggtgtgttccatgggcagcgtcttcttactgcactgtcctgacttgctctagtgagatctaagagaggcacaatctgctttccttttgatggtgtgcagcagcatgatggccgcgcgaatttccaagaagaggatgttggtcgctgatggcatcttcaaagctgaacggaatcagtttcttactccggagctggctaaagacgcttctctgaagctcaggttcaagttacacccatcacgacagtaacaaatatcttagccaacagaacaaaaaatgttcctggtgagaacagccagggattctggaattgactgctgtagttcagaagagatttggcttcccacagggcattgtagagctttatgctgaaaaggtggccccagaggtctgtgtgccattgcccaggtcgagtctgcagtacaaactcctaggagggcttactgtgcggagggcctgcgatggtgggctgtggttcatcatgaataggggggccataggctgccaagctgtggtttctgggagactctgaggacagagggtcaaatccatgagtttgtggatggcctgatgatccccagcggagaccatgttaactagtacattgatgctgttgtgtgccatgtgctgctcagatagggttttctgggcatcaaggtgaaggtcatgctgccctgggaccccgctggtaagactggccctaagaagcctctgcctgaccacgtgagcatcatggaacccaaagatgaggtagtgcccaccactcccatctcagaacagaagggtgggaagccagagccgcctgctatgccccagccagtccccatagcataacgggctgtccttggcagttgtattcggagtctggatgttgctttgtaaagacatttaataaaatattgtacaaagacaaccgggaatgcctgtaatcccagcactgtgggagtcaagacaggccgatcacttgaggtcaagagttcaagaccagtctggccaacatggtgaaaccctgtctctactaaaaatacaaagattagcctggcgtgccctgtaatcacagctacttgggaggctgaggcaggagaatcgcttgaacccgggaggtggaggttgcagtgagccaagatcgtgccattgcactccagcctgggcaaaaagagtaaaactcagtctcaaaacaacagcaacagaaatgtattctctcacagttctggaggccagacattcagaatcaaggcagggctatacttactttggaggctctagctaagaatctgttccttgcatctttcgtttctggtggctgctcgtgattgtgggctgtgaccatatcactccaatccctgcctctgcagccacatggccttctcctcttctcctgtgttcctttcctgtctgcctcaaatctccctctacctttctgctatgaagacacttgtttttggatttagggtcttcctggctgatctcatgtcaagatccgtaacttaattacatctgcaaagacctgattcccaataagcttgccttcacaagttgcagggatttggatatggaactgcctttttggaggccaccattcaacccacaataagagcacagtggtgaggtttgaggggtggtatgaggtcacagtcacagccacccctctcaccagctgtgtgacaattctggatttacttagctgtcctctgcctccatctccctttccctgtaagtggaagtggtattcattgatcacacactacatgccggacaccaagctattacattttttgaatatgtttcttccttgcctcttgaggactaaccagccgggtttagattatttcctccccgtgtcgctttcctgcccccacatgttatagatggtgcaagggaaccagagagctttgatccctggtttctctggtcacaaacctgctctcctctccagaactccaggatgcctttctgtgggggctaaatcaaatttagctgttcccccaactgcaaagtacataggcatcaagtgaaagggtaaatgcatgaaaacctgaatggctgatcctctaagacagtgagagcagatgttaattgctcactgtccaagtgctgggctctgtgataagagcttcacgcagatgacatcaaagcaccatgtgtgggggaagcacgatgatcttgaccattttacagatgaggaaggtaaggctcggtgtcatcaactcacagaggaagtggagctggagtctctgtggctccagggtcaggtgtgtagtctcgaaggctgttttctgttctgcaagtttctccttaacacatttccagccccattttctggcagggagaccccaggactgaaaggagctggaagagtgaggtctaagagaaaaaggggctgggtgtggtagctcatgcctgtaatcccagcactttgggaggccaaggtgggtgggtcacctgaggtcaggacttcgagaccagcctggccaacatggtgaaaccccatctctactaaaaataaaaaaaaaaaaaaattagccaggcatggtggtgcatgtctgttatcccagctacttgggaggctaaggcaggagaatcacttgaatctgggaggcagcggttgcagtgagccgagatggcgccactgcactctagcctgggcggcaagcaagacaccatttcagagaaaaacaacaacaacaaaacatatggccagcagccagtgttgttatctcaggatgggaaccaggcactgcacctcctcattaggagtcagagtaagggggctaagctggttgacatgactggggacagagttgctgttgaaattgtcaggttatgaagggaaattagctgctgggtgtcaagaggtgcacattgctgcaggcattggcaactgggagccctggtgtgtctattagctcctcaggctgtgaggccttaatgacacccctgccaacattacaggaggcagcaagtgacagtaggaatgagagaggccagctaatctaatctgtacgccccacaggagttgggggctgaggacttcaagacctggcttctgctccctgtcacagtggcaaagacaatgacaataaaagcacagcctccagagagaagagccttcgatggacctgggtgttaatccaggggccaggcaaaaactgggggatgcagaataggaggttgggctggaggtgagtgagaagaacggatacggttaggaccaacatttaggcaatatgaccgtgtacaggattctaccaccatcgtcaccatcagtgttactgttccctgccatctgcctgtggggtgtctaccatctaaagtccagcactgcactgggcatttttaaattatcattagtatataattatatataataataatttaatttataactatatcatttattaaggtcctactatataccaaattctatcggacacatgtcctaataataaacgtgatataatctatcattatttacaaaacttcacactctgacctttattaattatgtgtgtgccaattatgtgcagggaactgtattaatcgtagttagcaatatcgtctctagtcctccaaccctataaagtgggcacaattattatttctctattgcaattgccatttagcctcagctggattggaaactatgtaatggagactctcaggccactgtcttttgagcagcattttctgcattgcattcttgtatgtaatcctaaaatgtagatgtagttttcccccttttagagataaggtaatcaaaacttatagaggttaaagggacttgccaaagcgacacagccatgaatggcaaagctaggatttaaacccttggacttcttctccttgccattccaccccatcataaattctaaacatcataagcagaaccatcataagtcagggtccatctggaagatggatggatggatggatggatggatggatggatggatggatggagagagagagagacagataggcagacagatagctagacagatggacagatagagatttttaggaactggcgaattggctcacacaattatggaagcccagaagtcccaagaagtgtagccagcaatctggagatccagaagggcccatggtagaaacctcatccaaaggcagaagacaagcatcccaggttgaagacagtcaggcaaagagagaaaattatttcttactcagacttttgttttattcgggccttcaacagattagatgagatccacccctacagggcagggcaatcagttttactcagtctactgattcaaaggttagtctcatgtagaatcaccctcacagacacacactcagaaataatggttagtcagatatctgggcactgtgtggcccagtcaagttgacacctacaattttttttttgccttctttttatttttggtgttgtcatcctgtgtccaaggcacatatagtcaatcatcacacctttcccttagcctgtactaggttctgtgccaaggattttagaaagtcatgtctcattcagttcccctaacaggtctaggagtcattatcttccccaacctaaggaaactgagacccagagattcagagtatcccaagatcctacaggaattgcagattgtagccaaaattggaactcctaattccagagctcctccctcctgctagcatttttctttgagtagttttattaatgagaaaagctgttgagcaccagagcaaccccgcctcttctaaataccatctgacatatacattcagcagaggaaaaatgatgtgaggtctggggcttgctttaaaatactttggggccagacacagtggctcacacctgtaagcccagtgctttgggagtctgaagtggtaggatcactagaggtcaggagttcaagaccagcctgggtaacatagtaacatagggagaccctcatctctataaaaaatttacatgaaaaaaaataaacaaaatacttctgcaacagcagcagcaagagctgccgcaatgaaagaagaaagaaaaggagggagaggatgaaggaaagaagcagtgttaacattctagtaatatttgcatctgaatgatatttatatggggttattgtcctccctttgtgtatgtttaaaattttcataataagcatatttatatatatacacataaaacatatatgtacatattatcataatgcctacctgctcttgagaaagtagtgccgtatggctgggggtttttctcactggtttctatggctctcccctcccccactttttctaagaagtggtagtacctatctgactattttcttggctgcctgaagaggcctcaaaattagagtaaacaaattacccattaccagggaagcctccttcctcccagcagattcccagcatcttctttcacctctaggagatattttccaaggtcactaaattaagccttcagacaatcgaaaaattgaatctcagtacctctattttcctaacaaaatttctgcagcaccgattggggctgacaggtacggccgtgcagctttctgggctgttcaggtcgatttggccaagcaggacggcatcagcttgtattggagggaacatctgagcagctcagggccccctgggagtcagagcgttccctccctccttgccactgtaaatgactatttctgtcgtttgcagagtgtccttttctttctcctacagccccatccttaccctctatagccatcaggtcaggtgcgtcttcttcatttatttatcaaaagggccatagcaatcattgcaaacatgtttaggaggatttggaaaccatgttcttttaaagggcactaatgatgcagcagtaatcacagtgctagtggaaggggagggcagaatgtgatgttttgggagtgaattctgtaagagaagaagggactgcgttcctagccctccagagcttgcagctatcacagcctggctggtggaggggcttgcagagctgagaaccactcagaatttgggggctgaagaccctggctgtctgagcaccatctctgtgactttcgaggtcatgttttccctccagccctcatttccccctttataagctgtgtcttagctagtgctttcagcaaagaatatctttaggctcctggaggattgatatcccctgaagtagcccctgaccagcctccaagatgtatcctaaaagctcctatggaagtttacatttcactcaaaatatctgtgttcatgtaaatgtaaaaatgatgtcttaagatgcttagcagtgaataaaatgggtgctctagggagatgcagtgagtttatcctgtggctttgagtatacactggtaccctacgtgggagaccccggtgcccatgcccgggtgcacaaagccagcatcagtgacctgcacaccaggaggcaggctgcatgatgattgggtgcaagtccttaggtgggtcactcagtctttcttttcttgagttttttcatctgtgaaagagtgatcataatactatttccattgagaagaagaaataatttatgtaaagcacaaagcataatccctggtattcaataagtactcagtaaatactagtgaaaataatgattataactatgacctccagaagcttttactgagcatctatctgtagcactgcatgtcaagccaagctagagtacagtctcttaggagacacaggggaggaaaacatccttggcaggttcgcatattggtgatctcgtcgtaattttctcaaatacccttcctctttcctcacttttggtgataactacctgtgttgctcttgtcacttttgcctggatccactaactcactacctaggtatctgcaacagttatccattgctgcctaacaaattaccccaaaatgtaagcacttagaatctcattgtctttgtgggtcaggaattagggagtggcttagctgggtgattctagctcagggtcttttctgaagttgccagcaagctgttggctggggctgcagtctcagaatccttgactgaaggggaggtttcgtgtccaaggggctcactgatgtggcttttagcaggaggcctcagttcttcaccatgggggcctctctgtacagcttcaggagcagcctcacaatatgtcatctggtctcccacagagtgatgatctcagagagagtgtgaggaagatgtggcatggccttttaagccccattcttagacatcatgcactgtcaagcaccgtaactttagctacattctattgattagaagaatactagtaaagaccatagttaggagaggggaacctggctccaccattggaagggaggtctatcaaagaacttgtgggcatattctaagaccaccacactctgccactccacacaccctgactctcctaacacctgctcgcttcactggttcggctattggcagtggcatggagtgtgggaaaatgcgtccctctctccttcctggattagaaaagtcatcatcctgctagtgtgaatccatgtcctgtggtggccctctcaggagggattgtgattaaagaatggacaacccaagggaatcatgtgtcatggtggagcatacaggccagcaggtgagttggggaggcgcctttacagaggaaaccttgagcttcttctgtgatattcattacagaacttcccccaaagacagatgacatccatttataattatttcaccagtgacttttgagctcatgcagttctatttatttttctctctgaaagtaagaaactttctttaaaggatttctgccatttggacaatgtgctatgtccccattggtgttaatcagttggtgggatatagaaaagcaaagtggccaggctcagccttttctctcgatctttttttttttttttttcctttcttaagaaagggtcttgctcttttgcccaggctgcagtgcagtggtacaatcagagatcactgcagcctccaactcctaggctcaagcgatcctccagcctctgcctgccaagtatctgggactacaagcatgcactcctgtgcttggttaattttgactatttttttgtagagatggggcttgcttgcttttttctccagtctggtcttgaactcctggcttcaagcagtcctctcacctcattctctcaaagcactgggatgacaagctctttctttataccagtcctcaacttgcactctttcctgcatacagcttgtttctctaatgtggctgttctcatgtttacttaatggcccagccatctcctcctcctcctcctcctcctcctcctgctttctattctccttcctcatcattgtcctcttctgcgagttcagaaaattgggttacaatacctacaacgtgcagtgaggacactcttttatcataaccccagtaggcttatggtgcttgtatctgatttttcatagtctttcgcttgttaatttactgcacatatgttcctttctcttgtgcattactgatgtgtttaagaatcttgaatatctatatggtgcttagagatttcacagcagttgattgaatgctgttacctcagcatcctctgtgaaactgggtatgactacacccattttgctgatgaggaaactgaggcataagaggatccgataaattacccagagtcacacagctcacaagcaagtgcaggcttccagccaaggtttgctggctcatgcgtttcatgccttctctatggtaccatacaggcactttgtctcccagtggaatataagttctttgaggccaaggactgtgtcttattctgtgttgcatccctttggcttcagcctcattgtcttgagtttattaagcatttggaacatttcagctgaatgagtgaatgagtgaatgagtgaagccatcagtcaaatcagaacactgctcacacatgcatcccaagtccagctgtcgaacgtctggaactgagcagtatggagcctgttaagaccagtgatgctgtggcctgaataacaacaggataggaacattcccttcttctcataaatcttgtaaatttgcattgtttgtgccgaacagggcccgtgtgttctgatagcaaacatggagaggcccaaaaggctgatctgggaccatgtccccattgaacactgctctgtgctgagtctgcagaatatttaaataaggggttaatttataaagtgagctacgggaaagtttccaggattgtcgtgcgtgtgtctcataaatcggcacaaattgaatctaggtttctaggtttctgtgcccctcagctcctaagtaaaccaaaatttattgagaggtgtataggttgccatccaaagaaacatagtaagtgagaaaagtgtatcctcaggaggtctgtaaacaaggtctgaaggctggcagaaaggaccagggtctgcaatgtagaatccccattgccgatgatcagaaagtacagcgtagtttgttgcagatgaagacagggttccaggaattcttgatctttcttgaacattccactgacttcttaacagaataaagattttgtatattgcagagataatttatagatacaggtacaaaggggatacagacaaagagaaaggctaacttcaggatgttgcgtatgtcaaatcattacattagtttacccagaaccaaaaaaattatgcaatatataaatatgaagctttagtttttcatgattgttcgtaatgacattattatgataatgactgtttgtaataatcatgcgtaccaccttagtctgagcaatcatattagcagttcgtaattattgaagggctgtcaggaaccagacactgtgctgagtgttctacaaactgtatttccagtcttcttttttgttcaatttccactcaaatttttaaaggggtttggagggcgttagtgtgcccattttacagaggtggaggaggaagctccaaaaatgaagcccaaggatcttaaggtaatatatgggcttgaatccagtgtatcttgctccgacagccttgcttttgtcattatccaacattagctgtctttattatagtggccttcttaccacctagaaaacaagtgccagcattctagtaaaatttattcaccttccgagattatttactattttagtctgtagcttttatccctttaactacaccattcaaagcgttgtgcaaaatattctagtagtaaatagaggctttaaatccacacgttgataatggtcaaatcctcttaaaggggccagcaacaaaaatgactttaaaggggaaatattccttcaatgttacaagcgcccatgagcatgttagtagagcagttgtgtgttgaagaaagagaaggtggagtgatactgaataccccgtaaaatcacacaatcagcacttaagaatgttcacacagttgttcacacacatattgatatcagaccttatagcagtcctattggctagatcagttattatgaatgtgttttatagagtaggaaacagagatgcgacgtgacttgcctaagaacacacagcagttctgaaactcaccctgtgctaatctgacctcgtgaagaaattgagcaaactaggctccagggagaaacgaaaacaataacaacaaaaaatgtattgccaaaaaattgctagcagacatctagaaaaatgtcttcaacttcttttggtaggaaaagaggaaaaattcaaatctgaattcaacatatttatttttttgtttctgactttttacgtaaacagagctctgagttgtatcctcagatatatttgagactaacaacaaggaaatataaaattatgttactacctaagctgccacttcttcaaagcctcgttattcttgttcccttcaatgtatttcaactccaaaatacatagtgacatgaaaattgtgtattcacattgttctattgatttcgttgagaaagtgaccttgtatgcacacatgagaatttagagatctatatataccgcctggcctcttctttgtaagggtataacagcagtggttaacatgcattttttttttttaacagttagatttactcttcctttgcacagactaatagcacactgaggtaggatccagggacggctccttggcaagttgtactgctgtggcctagggagggacaactggcagggccacacaaggaggtaaaaccttatgctccatttgcaaagccagtggccccagcagagataggaggccctctctgtgatttcggcagtggtttccctgggattgaggtctcctgaaacttattcccgcaaggacatactactgtggacccacctgaagggtggcatccactcttctagtaggatctcacattggtattttcagacacttctgccccttgccatgtttagtaagtcatctatgttgtttgggaggaaagagaatgagcattcctcagttcctgcactgcaccaggccttgccaatacagtacctcatttaattcttgctaccatccttgaggtggctggcattaggccatttgcggggtgtagaaaatgacatgcagaaatactgtagcagctcacttaatatcaggcagatggtaagtggcagagatgaggctggaccccaggatttctgacctaatttctgatctctttaattattctatacaccaaaagcccctgtggtttggattcctaatcacgggactgagatgaaacagaatctcttagcatagggggccaagcagtagatgggcttttgcgaagaagttttttcttttttcagagtcagaggttggcagcaaaatatgagagatggaaggtcaagtgcagcagaagagagaaacagggagagtggaggttgttctctagaacatagaagccgcttcttcatcccacacaatggaaaccagagcccagattatattaacaagaagttccagaattgcagatggccctttgctgcttagggaggggggagaagaagaaggagaaaaagaagaaaaagaaaaagagcaggtggaaacttaaaaaaatgtttagctgcatgtagatggcttttattataactgctaggctgaaccagaagacttgagctatgtaaaaatgtcacttgctcttatcacggttcatagagattacctttcaacgcgagtttcattttcatttcttccaacacttagagaagtgaacgaggcagtgactcctttattccctaaccctcacccagcaacttgctttttcctctgtgttttgtgtcattctgtgtgatattgcatcaaggcaattcacggcagtggttgaaccaaaagcaatttaagtcaaaaatggacaaatatggatgtcacttataaggcttgttcaaaggcctttgacatcactcaaagcctgaacacttctcaggagtgggatacttttttttattattattttttattttctagcagtgcaagattgaagatttaatacagacctcttaggcgtctgcgtggttcttacctagaaactgtttattggtgaaccaaatattttgtatcttataccaagaaagaggggctgacaaagattgagtgattagaaatccaagtgaatttctatttattattttgacttggtaatttgtaataacaatagccaccatctatctatacttcctagatttgggcatggtgttaggagtcttatatttattattttacttaattttcatagtcatcctgtgtagaaatatcaataaatataaaggtaagtattattgtccccattttacagatgagaaaatggagtcccagggacctacctgctcaagggcacagaaagcttgaatgagtaaatttactttgtgttgttccaaaggtttctccaaaggtctttgcacctcccaaggctattctcattttgagaaagactggcacagttagaggccaggaacccatcttggctgtgtgccttctgctttgtctctggggttgtggggaaggctggtagcttgagagcctcctccttcaactctgtcaggctgcatgcacattggaaggtagcttttcaggttgtggtgggtggtggtgaagcagagggatgcaaagcagggtacgtggagggctgtgccttggtcattcccaggaagcaaagcgagcgtcaaaaaaagacagggtagttgggccatggcgttgcagagtgacagtgaaccaggaaccagaagagctgacttcagaggaggctttaggcgctcctgcatgttgattcttagagaactaaagacacagttgcatcttaaaatgttgagacttacacgtatacacaataagaatattttctttggctgcaaatgtactataaaagagtgaaaaagccaatcccaaaagattacattggtaggattccatttacataatgttcttgaaattagaaaattataaaaatagaaaacagatggctgggcacggtggctcactcctgtaatcccagcactttgggaggccaaggcagatgggtcacctgaggtccggagttccagaccagcctgaccaatatagtgaaaccccatctctactaaaaatacaaaaagttagccgggcgtggtagcacacacctgtaatcccagcaactcgggaggctgagacaggagaattgcttgaacccgggagtcagaggttgcagtgagcccagatcgtgcccctgtactccagcctgggcaacagagtggtactccatctcaaaagagaagaaaagagaagaaaaggaaagacaacagataagtgattgccagggactggagaggagtggggggtgagtgggaaccagagtggatttaaaacagcaactggaggatcctggtatagatggaaatgttctgcatcttgactgtctcaatgtcaatttcctggttgtgaaatcgtactagagttttgtgagatatcacctatgggggaaactggatcaagggtgcatgagattgctgtattatttcttgactgcatgtgaatctacacttatctcaaaaataaaaactttcattaaaatcaaataactgcttaatattttgggggaaaaattcaacaagtaaattcaaatcacccacgagcccaccacccagagagagtcacctgctctattttgatatattttctcttcctcccttccagtctctctcttctgttcctagatataaaatggagaggttttaaaatgtaattacatctaactatcccctggcttggtaatatccaaccttttcatgtcctcagagaggtccaaaggctttgctgaaacttgttggtttggcattgattttgacaaaagacagcaacaagatcccctttctaggaacccatgtggattactatggattcagaatggatgcattttatgtacagggctgtgactttttctttccccttcctcatgctaataggtgttaatactttgcaataaatattacttatgtctatgaaatgaactgcatcccagcctgtcagcacatatttattttctcattttagtttctccaggttctcactgttatggagggtggggagggggtagaataaggttaggctggagggcatatctgatttggaaaatacatccctggtgatgttcctaccaagtcacaggcttggttggtgatgctaaattgggactgaggaatgggttaggagaaggcttgaagaacccacctcctaaaaccgtctcatcatcgtctagagatatttctccaagtgcttttgtttccagtgacctcccaaccccaggaactagcgaagccttcaggcaggtaagcgcacaaatcctgcattttctagttaaccatatattattagctagtgacttgagcaagttgcttcattttcctgatcctccattcccttttctgagccacagtttcttcgtctttgagtagagttaacaaattactgggtgtttgaaagatcaaatgagttagcacatgagaacatgctttgcacaaacaaagttgtatgcaaaataagttatcattatggcatgggagaaactgtttgtggacattgcctcccagttgaccctcagtgtgtacttgtggaataattttttaatataaaataattaccatcactaatcctaactgtgcacattcttgactctgtgacactgagcaaaatcctgaacctctctgtgccttgatttctttcacgtcttgttctagttttgaagagcgattcttgtgtgaattcagggagaggaggcatgaggcatggtaaggccactgtacgtctgtggttgacaaattcagtaggcccacagtcaatgcaaaagtcctcttgcctctgcagcacagttacaatgaagaggagcgatggcatggcatgatcccactacttagggaggctaattatgtagtgtctacagagccagtggtttattttgcattgtttatgtcagcattaagcagtattgttacacagtttgtaagtcttaaaactcagtatctactctagtagttgctccaaatgtgatgtcctcataaatcaccgagggatcttgttaaatttggattctgattcagtaggtctaggtggggcccgagcttctttgtttccttttcttatttaatttttgtgggtacctagtaggtgtgtatgtacatatatatgtatatatatatgtggttttttcaaaaaaattgtgggcacttagtaggtatatatatttgtggtctgtgtttcttataaattggtaatcccccaggggatgcctgccttgttggtccaggtaacacacttggagtagcaaacatctagacgtagttctcaatagtaggactattgccagtggagggggcattttggaaatttggaaaggcattttggtggcctttggcacttagcaggtggggtccacgggtccatcctgtgatgccataggcagtccaatataacaaagaactgccctcgtcccggtaacatacacctgtgcccccagacattcatttcggtaaaaaacttgtttccattgatctgaccccagaattccctgtgcttatacagatacacaacgtgcactgggtcttccagaaatgcaggggccttctaaatcaagggaagattgtgtggtgttttgttccagtcttttaccaaggtctcaataccatcttgaaacatcatgcagcactgctcataatatttgagtcaccataatgtgatctgtctacatatgtagctgtttgtattcatggtgattaaatagttgggtgctagacatgcccttagcgagcagctcatgagagcagattttgcctgtttcttccaaaatctggattcagtgacatcgtgttggtagcttgaaactgaccgtggtgagaatatttacaccatggaaagtggcaaatgctactaataaggatgattgttttagttttcattttgtaattttcagagttggtttaccaatatgatgtctgtattaaaatatatgtaatgctgctttcaaaatgttaagtattatgagaatacattaacaaaactctggcgaattttttgtcttatgtttcttgaatccaaacctataagtaggtgcaaacattagacgatttcattttgggcttctgatacactcctgtccgagaagttacctttgaaaatgtgtactattttattgtcaattatgttttctttaaaaaaaatttatgacatattacttttgctaattatgtgtgtgggtagattatgttattcatgaattttatttcaggaccttggtaaggggttatacaatatttcttttgaaacgagggtctcgattattgggcttgagtatcctgatctaattaatgcactggacagagctggcagacgtgtgggacacccagctattctctggaagggaagggggatataagagacacactataaaggtgaatggtaattggcatctccccttcaaggggaccaggaggatctgagctgactgggtgcctttgtggaagtgtgttttgaactgagattagagagatcagcaatgtatctcttaaagtaatccaggaggagttcattttcaaccgattcagcagtggaacacttgaagaggaggaagtcaaaattcaaaatgggttgggtgcagtggctctctcctgtaatctcagcccttttagaagctgaggcaggaggattgcttgaggccaagaatttgagaccagtctgggcaacataggcagaccccatctctaaaaaaaaaaaaaaaaaaaattaaattagctgggcttggtggtgcacacctgtaggctgagctgctcgggaggccaagatgggagaattgcttgaggctggatgtgtgtggctatggtgagctaggatcacgctactttacttcaacctgggtgaaaaagtgacaccctgtttcgaaaaagaaaacaaaaagttggaaatgagtgggaaaggatctaagatgattggaaacagtgtacatagaatacaagaggagttgggcatgctggctcatgcctgtaatcccagcactttgggaggtcaaggcggatggattgctggagctcaggagtttgagaacatccagggaaacatagtgtgaccccatttctacaagaagtaaaaaaaatcaactcacacctgtagccgcagctactcaggaggctgaggcagtagattcatttgagcccaggaggcggaggttgcagtcaaccaagatcacgccactgcacaccagccgggggtgacagagtgagaccctatctcaaataaaaataaaaatagaatacaaggggggataaagatagacttaaaatacgctctctagaaaaaagaaagaaatatggaaagaaatctaatttagaaaaatgcacgcacccacaggcacgcttcacaggactggcaggtggagaggatgtttgttaacagggctggctattttactttaagtgctgcaaacattgcactaatgtttgggtctttgcttttggcaatcacttctcttgttaatttttttttggcaccatagaaatgtttccataaatagtgcattcaatggagtgtgttactttattactgtcagccactgtcctaggagaggaaaattcaataaacacaaaagcaaagattagaacgttgaaagcttccaattccagatccttcatgagcttgtacctctaaagaatgcgatttttctatttctccacctgcaaaattcttactttttgggctggtaaagccacctaggtcagtgccatgtccaacccaatctggaaaacgattattgtggtgcctgttttgttgacttaacaaagccaatcgcccattcctatgctgctaagatgcgaatgcccagctcaggggatgagattactgtcagctttgcctaagctttgggcattagcaccctccatatgcaacaaacccacaaatgacatgttttgactctttgacacagaatggttggaaatcacttccttggccagagcaggggtccggtgtaaaggaggaaataaaaataaaaaagcataaatgaatgaggaagtgagcaaatcacactcatcgaggagcaaaataattcattccctctccgtggctcagcatggatgcaaataatgtatcattaagtaagtccacaaaacaaagacagccagcataactgttgcatcaaatatttagccagagccaaaagcaatttattatgttttttaaaataagtttgatttactaaccttcagcacaatccctatttttagaggttggctcatatttttaatttgttttctctgaagcgctgcatccttggtagcgtttcagctgtccactcggttcctaatggcagagcaacaccgaaaagcgtaattacatttcctaattatgtgtaattaggcaaaacccagatgatgtattcaacatgctctgagaatagccaggggttaaagactgctggaatttggtaacatttttataaataagctggtgcgttatttaacgtggaggtctaaggtgacgctgggtgccttgtagaccgatactgtggttgaaatctatcgtatttgtttatttagccaagtaaaactgtaagtgattccccacctccataccttcccctcttttggaaaccagagtttagttgtgctattcttagcccaagagaggccctctaaacccagaaccataaagttctgcttactgacagcctaagtgatatttattttttcaaagcttaatccttttgaaacatggagaaataaatacatcctcttatctaccatatgcctgggatgggaaataaattcttattttcctgccgtgtggtaccagtgggttacgatgaataatttgggcagtctcactgaagataatagggaagccttctctattaccagtgataattatgaatctcataatggaaaacatcccgagcccgaacatcaatcagggaagataaacaatgggaaatgataggtgtacaaaagggaaaatggcaacagcacatgtggagggaaagaccgcagaattctggcagggttataaatcatacagtcaaataatttccgtgcaattaatatcctcaaattaaaacatacctttttaaagaaagattttgcagacttttaagctgggcaactgtctgccttacaagatgcgtctggaaaccccagtgccatcctccttttttagtcttgtatatttatgtatccccggccagagttggctggggcacagtctaacagtgtcaccgtgtaagctgacccagtgaccttgctctagctcaccagggactgagcatacaccaaagtggccagagctagtggttgctgactctcaggatctttggccctgagagaacaacaaagactggcctattgaggcaggaagtcttaacttccttggccagcctgaaaggctgtctccaaccatgcggacacagcgcagtgaagcggttggaaaagctacagacaaatggaaaaccttcattccaaagggtcgttgtctcctcctatttaatagccctgcattcatgcactttttttatcttgctgtctttttttttttttttaatcaaataccaaagtacttctatggactggtcttaaaaaaaaaaaagaatccattcataactgtgaaaaaatactgcctattagtctgctattgtggctcaaaatgaaacttaagactacatggctaatttatttactgcatcatgggtgaagaccaacaaggtttccagcctttcctcctatctgtctgcatgtagaaattcacagaccacggccattctgacatgaatatcaaatgagaagttttccattccaaaccctttttaggagcggcctggaaactggagtcaactgtcaaatatgtccttatggccacaaagtatgctcatggattctcttttacaggcttagcataatattttataaaacatatttttaaagaaagtgtaattttcccccaaaagcaagggttttccaatgccatataatttactaagtgtggctttgctgcgtaatagtccataatttatagtcagcctccacaaggcaaaaaataactccaagctatgattaagtaagtaatggacaaggtaactaatatttccggaagaatggccttccagacactcattttaagtgacaaaatggttgaaggttgagatatgtactaatcctgtactaatttaatggaatcaagaaatgacattataagctggcttatgtgggcacttaagacatggagctgagagtgaatatgagagtgaatattctgcacgtccattttaatgaccttgtgcctcattttccccatttaaggtagatgggtttatgcctaattgtgccaccagtttttcccataaaataattcatttggaaggggtggcctaatccagtctgaaccaattctaagatggtagcgtggatgcgggaggcactgcacaggatggaaagcatggagtttggaatctggcacaagtggatttgaattcagacttagtcatcaggagctgtgggaccttgggaaaggttggttggttggtttgttccagtttttaaattttgaaataaatgttggcttacagaaaagccataaaaaatactgcaaagatttcccatgtactcttcactcagcttcccctaatactaacatgatacatttttcagcactgagaagttaaccttgttatgatgctattaactacactcagactataactgaccaacagactttatttggatttgacggtgtgtcctcttccttcttttacaaccagataccacctggcatttattatcatatctctccagtcccctctggtctgggacagtttctcatgcattattttttttaatggccttgaaatttttgaagagttccggtcagttattttgtagaatgcccgtaatttgggtttgtctgatgtgttctcttgattagaatgacgtggtgcatttttgggaggaatatacataagtgatgtgccattcttcggccatcaagtcagaggatgtgtaatgtgaaaatatcttattactagtgatgttagccttgacctctcggttaacgtggtatctgccagatttctccactgtaaaggatcatttttttcctttgtaattaataaatatattgggggaggtactttgggactacttctcaaattttcatccattaattttagcatccctctggggatcttgcctgcaatgattaatactgtggtattctcatgactgatattgtctttctgtcatgccttctattttttggtgggaattcttctacatggaaggctgtttcttcttctccatttatattggtatggatacgtgaatatttagtttattctgtaggtcataatacgacagtattgtgatatattttggtgctcaaattgttccggctttggcccataggaggtctttcgggcaggttcctgcacccttttgacatgccccgttcttttttgagcactttcttattttttggcactgtaagaggctttacactgtcatcttggacttccctgcctcagtcttggaattaactcattctccatggaggcttggttcgttttattatagaatcatatttagaactaagatctaggtgctagttgcgctcattactgctggagtgtcattgcttctagaacttctcaacagagtttagaaatatgtgtattatacaaacccatgcacatacacctatctccatttattcctgtatctctgtgtatattataattttagtatatttatatttctttctggacacattccattatttgttcatatatttataacatatcagtatctattataaattatatatatgtacactttaatgtgtgtttgtacctaattccaatccaacacaacaactgggttttttcaaacttgtttctttgtttttttctttttgtggagagcagggtcttgctatgttgcccagctcagtctcaaagtcctgggctcaagcgattctcccgcctcagcttccctaagtgttgggattacagacttgagccactgcatctagccacaactgagttcattattctgagctttctttgggatgttatttaactctcagtttcttcttctataagatggaaataataacaactaaaggctaggatttggggaaggtatggtaaattgtaaaaatggtagcttgtttaaaaaaaaaaagaagaagaaaaaggaaaacagtatttccctcaccgcatcaacacctgtcctgtatgactggcattgcccagtggaatcttagcagcagaggcatgacaagcggtcagatactgggactttctgtttcgttgcttacaaccctgtgaccactgcacgaacaaccctgagctgacctgctggagcatggtggccacataaagggagagtggttgccccagctgatagcctgtcggtgcctggcatatgagtgaggtccctctagagtcatctagctactagccaagctaccacctgaccccagacacaccagagaaagagcacagcccattcgcggactcagaaactaaatataagaaaaatggtcactgttgttactcactgggttttgcaggggtttaatatccagcaaatgccaatgaattagagttgacatacggaaaacaagtaagagtaactttgtacaccgtgggctcccaatcagtgctgcttttcgttgttgatgttgttgttaatgttgaaaaaatcttcaagtcatatttgcccccacagaccttcccagacagtctaactaaatgcactgtatttgctaactgttggaacttggcttttggactagaccagcacctcgagaaagaaccactgttaaaatgtaaggctctgagtgtttatcagctcacaccaaggaagagagagctcaggagcgactgggcatgaggtggagtgagcactgtgaatgctggggaatggaaagtcctttatgtggtgttgcctaagggtacggggaacctggcctggtgttgggaggaaacagggtgcagagtgggaagggcaggagtatctaagtggccaaatttagcctaattaacagatttgcctagggctgaccctgaagcagaaagcaaagcctagatcagtctgctctcctcctaccaacagggtaatgatgaggttgaaccaccagttctcaatgccatacatgagattcccaaaatagacgggagttacacagagaccttttttttttttaacctcctctgagattttttttaacctcctctgagattctgtatttccttaatgacccgaaaaatctatttagcccagtttttatccttgcagataagttagtacgcttctttttctgctggttgtgatcatatttctatttaggggtaaaggtgctgaaaatcatttgctgcgatgactcgcaaagacatagttaccatgagcagcagtaggatgggtggccaccagactgccatgggcatgatcactgttgacaatcttgccacagctccccagggtctacttggtgtcccacggaggacagtctatacagtaactcaacattaactgtgtacccctcctagtttggccactgttctgcccaaacatacaagagtcaatgtaagtctctgggagcactcacctttgggcatgttgctacagagtcactcattcctagaaattgcgaagtcacgaagttgtcaaaaaacacaacgacaggccgggcgcggtggctcatgcctgtaatcccagcactttgggaggccgaggcgggggggatcacgaggtcgggagatcgagactatcctggctaacacggtgaaaccccatctctattaaaaatacaaaaaaaaattagccaggcctggtggcgggcgcctgtagtcccagctactggggaggctgaggcaggagaatggcgtgaacccgggaggcggagcttgcagtgagcggagatcgtgacactgcactccggcctgggtgacagagcctgaatccctctcaaaaaaaaaaaaaaaaaaagaaaacaactacaaccacattttgagataggccttccttggcaaactttgatttcgtttctgtatttgaggacaaaacacagtatggttgtttccctccctagactagatttctaatcttgatgcagtgagcaaagggcgaggtttatattgttcttacctgagccaaaggacccataaaaaatagagtgataggctgggctgggcgtggtggctcatgcctgtaatcccagcactttgggaggccgaggtggtcagatcacctaaggttgggagttcgcgaccagcctgaccaacatgcagaaaccctgtctctacttaaaatacaaaattagccgggtgtgatggcacaggcctgtaatcccagctacttgggaggctgaggcaggagaatagcttgaacctgggagatggaggttgtggtgagccgagacaatgccattgcactccagcctgggcaacaagagcgaaattccttcttaaaaaaaaaaaatagagtgatagagtgagaatttggcttttagtctacagaagttttcactaccagtttctgtgtgtgtgagtgtgtgtgagtgtgtgtgtgtaaaataccaaagagaaaacaataaaaaaatagagaaaataataataactagccaatgtgtcatcactccagacaacagccatggtcagtatttggttaacccattcagattttcccctatgaatgagttttttcgcctccataatattagttataatacattgatactacatcccgagtgtttcacttaacattatagcacaagtgtcttcccctgttgtaacatagtgattattaatgtcaaatatcagctagataaaagctgtcaagtgatagaaagtccttatagctcatgaactcttcaataactgggaatttataccgtttatagtttttttactgctaagaataatgttgcaatgaaacgtttgtatataatgctgtttagtcccctctcccccattgtttacgattccttggagttccactgctacttcatatttaccatcaccatccttgttcaccattgttgaagctttatgtaatgacgagcctcatccaggacctacttgtgtctctgtgccagtcactgcctgtgaaccaggggtgtgtggactcagggctcaattcaaaaaagaacccaatcttattgggacaaacagatattgatacccctggtctttgagccccactgtcttttcacactaatgagttcttagtgtctatttttggtgattgagtagaacttggtgccatattggctcaacatggaagatttctgtgatcacttattgatcagtcatgaataaggaatcgggatggcagtcgggagtgtgccaacacctctctcagtattctgggtctctctgcatgtagtgtttcttttgcagctcctagagataaattttttaatgtattacatgtgagttatttgaaagagggtaggtgtggacagtgaggccaggtgacttaatttccagaagcttgcctgtggtatttaccttgatgagttcattaacaatatggctttcaccctcaaacttgctcattcagaaattagactttgtgagcccactaagagtaggtctttctgttaggtacagactctacaataaccaaattcacagaaactgatgtgtaaacccagggtcataaacaataattttcaacaggagctataattatcacatagtttgaaatgctcttgttaatctgagtaggaagagaggatgagaattttcttataggtggaactacagaaaaagagtttacttataggcagaagtacgggtactgagccaagtgacattgtaagttatttaattggcaaatgattaaagcaaaggtcattgcctatatgactcaaatgcttggttgcctcagaagataatgagcctgatactttcacagtgaagctgtattgcacgtttgtgtttgtttattttccatctttcccactagacggtgagggactttatctgtctcattcaccactttgtccaacctaggacagtgtcagacacatagagatgctcaataaatcttggctgaggcaatacgtttcaaaatacaaggtgactccaaatataaaacaattttttattttcaaatgaagtggacctcccctaaattttgtgcccagtttataaactttaggggctgtagatgaactgttcaaaagttttattgtaggatttcacttgctaatgcattttcacaagtaatgtatttattttaaaagactggagtttttatatatccttacatttatgaaataatttcatttaaacccttcatgcccatcttcagcatcattgctaaagcctcttggtttctgtacctgtaatcttcattcattcctcagctgtttgaaacacagcacttttgggatccttgtataatactggccccacaatcaagagtgacttgaactgggacatgtttgtatttcttcaagatgacttttcattctctcatctcattcattttgaggtcattttgttgttgaaatgttagagttcaaccttaaatacttaagagcatggcactgtctagagaaagggagatgagcttctgtggtagccagaggtcaagatggcctctagtgaccctcacttcctgggttttacattgcagtatatttctcttctactctgaacaggattgtcctgtgtaacctacagggggaagtgatagcgcatgacctctgaagctaggtgacaaaatacatttggacttctgctttgcttctcttggatcactccttgtggcagaagctagacaccatgttgcgaggatactcaaacagcaccatggggagatccgcatagcaaggaatcaggcttccaacagtcagaccagattgccagccaacatgagcgagccttgttggaagcagttcctccaaccccctttaaacttttggatgaccacagatgaaatgaccatcttgacttaggagacacccaagtcaaatcagctagctaagctgctcctgaattcttgacccagaaaatctatgtgagggagtaaatatttattaatttttaagatgcttcattttggagtaatttgctacacaccaatattaatacagagcccatatgcgctgcctacaggataaataatgtaatagcttaataacaattaaaatggaagaaaatgtaggagttcctcaatggttccacctgtttcttgaggttaaaaatgtacacatttgtgggcagaaacttttatacagtaataaattctttgttccctctgcatatagcactttctcaaaaagtagtttggtgacaggcttctttcttctcatcattaaatgacatactggagatcagtcagatgaactgcaatttatatcttgcccccacccagtgttgatttgcccggggtcatacagataattagtaatgtcttatctcagttttcttatctgcaaaatgagaatacctgatggggttagtgtgggagtttaatgtctgtaaggtgtttaatttgttgcataacaatatgttgtactatacgttataacaatatgttaatatgttgccatgtatagccatggcaaatgcatagtaaatagcaggtataattattattatttttttcttttttgttttttctgagacagtcttgatctgtcatccaggctggagtgcagtggcgtgatctcggctcactgcaacctctgtctcctgggttcaagcaattcttctgcctcagcctgctgggattacaggcgcatgccacgaagcccgactgatttttgtatttttagtagagacagggttttgccacgttaaccaggctggtattgttttcattattgtggttatcattatttatttagttattgatcatcaaaatccagaaatccagtttcagcaaacattccataacccggtgtgctaaaaccccctcactgctctccattactcatgaatcttcttgaccatgaggcagaatctttgtattttcttctcatcaaggattttatctgaaaaacctgtagtacttcgcctttccctgggtggagaagaggggcggataaatacttctaaagtaatgtagtatgcactctcctgcgtggtgggggtgtagtgggcttcctgttatgaaacccagcttgtaagcatgtatctacatcccagggaggttttcactgaaccaagagatgccataagcagtccttgttgtaataatttaatagcgaagccctcagcaatagatcttcaggtaaaatggatgctgactgtctgtctgtcatatgaagattcagacattgatgtaatttaaaatacttgtagtatcatggatacaaacatatgcctttttatttctgaaggaatttccagaatgttcgattaaaaaatgaacagaggaaatgaaaaataaaattgtctgttgtaccaccacctgaagataaccactactatcattttgctatatttctttctatatttttctcagcatttacacgattgtttttacatagtagtgactttgccgaacagttatttcatttcgcatcttgatattttttctcaattaaaataataattgtgaacattgttctttctactctaactactcaggttgcttataatgagcttgtattataataaaacttcattttattttagataaaatgaaaagatgttactatgcaggtaactttatttattatttgcatgcagtttatcaaatagaattccttggttcagcaaaatgaaacctttaagtcttttagcaccaaatgtttgaaattatcatgaaacacattctaatttggcagtgagttcaggagatgaagactgtcctttagttaacatcaatagctttctaaaatatgtagccagttaatattttacttctgcctatgcatccctcaaattgtaacacccctggaacataaaaattcctctattgagattaacacctaacgatacctgtatttgctaatttgtttcttttttttctttgaagcagcatgttgctttgtcacccagactggagtgcagtggcgcgatctcagctgactgcaacctccgcctcccgggttcaagtgattctcctgcctcagcctcccaagtagttgggattacaggcacatgccaccactcccagctactttttgtatttttagtaaagatggggtttcaccacttttggccaggctggtgttgaacccccgacctcaggtgatctgccctcctcggcctcccaaagtgctgggattagaggcctgagccaccgcgccagctctatttgctgatttttgaacagcagctttttttttttttttttaacaaaactttaaaatgggttatgtgttttattttcttagtgaagtaatggcttctcaaatttacactccattattttatttaaaaaaatcagtatgattcatcataaataagtcaggactatgattgacagtctacctagaaagattaggaaagtggggaccaccccccaattattacctttgtttttacaagtgtgtttaaatctctttctgttaatttacaatttgaaaggtgggtgaggagaagagtttgaaaaatagattactgtcttcattaatacaggtttgacctacaaagtcttcacgtacttaatgattaaaaaccaaagtactaaataataaattataagaatttataggagtcatcttcttgaaattagcttactgaatgttcttatcataataaatctgagtgggtgtctaatttagtgttagctgactaaaattgtatgttgcggggaggaaaaaaaaacacttttgtttgaagacaaatgcagtgagtttaatcacaggtgatctgaaaggcaccacctatcttttgctatgttcactttgcagaaactttggcgaaactggctgaatgaagatcgattccaatttgtaaatgtggcagacaataaaatttccccaagcactttgatgatgtttgtgttaatacttcctgctcagagctgtagcccatcagattctagagctaaccgaagagggaagacaacctgtcttctcccagtttccagcctgtatagacttaatcattttcaaggtttaaggttgtttttgtttattggttggggtggagagagacgcaccacctctcctaacttctgtgtttgcttccctcatgctgtgtggatcagaaaagatagcctgttcattcatcacttatttcctgacttccaccttgggtctgtcagattctgtgtgaagcccaggggatccagggaaaattgaggcccagtccttactctcatgtaactcgaagtcttttacagaagacagacttgggaacaaatcaatcaaaatgagttttgtacggaaaaagtcggtgcacgcacaaggtacccaagaaggaggtgactaactttatctaactttacttgcagggcaaggcaaataattagggaaagtttccttcagacaggggaagacaaatatgagtatccagggaggatgtttctggcagagggatcagcataggaaaggagttcagggttgaaaagagtcagtctggtccctagaaataatttttttggtgcataaagggccagaacagaatgacagaggaaaatgataaggatttaggcagggactgcgttggaaagggccttgcaacaggcctggacgttgtttgtaggcaagtaggggcaccgaaagctttaaagcagggagtaacaggcttgtagtgacttttatcgaagtagaagttgaatagatctagcctggcacagtggctcacgcctgtaatcgcagcactttggttggctgaggcgggtggatagcttgaggtcaagagttcgagaccagcctggccaacatcacaaaacctcatttctgctaaaaatacaaaaatcagctggttgtggtggtacacccctgtaatagcagctactcaggagtctgaggcaggagaatcccttgaacccaggaggcagagattgcagtgagcccagatcatgccactgcactccagcgtgggtgacagagcaagactctgtctcagaaagaggaaagaaatggaatagatctctttcagtacaatgggaaggggcatataattcagtactttaaaaaaatgtactatcttatgaaatagaaatatacatgtacatagatttaacacacatattcacgaacatacacatttacatatacagtcatcattgcttagagaggaggttgtgttctgagaaatgcttcgttaggccattttgtcattgtgccaccatcatagagtatacctatacaatcctagatggtataacctgccatactcctaggctaggtagagcatattgctccctggcagcaaacatgtacagcatgtttctgtcctgaatactgtaggcaattttaatacaatgctaagtatttgcatatacaaacatagaaaaggtacagttaaaatatggtattacaatcttctgggatcaccattgcatatgtggttcattgttgatcaaaatgtcattatgcagtgtgtgatagtgcttaaataatttatctcacatatgcaaagagttttggctaagggaaaagaaaaatgtgaacctcctaatagaaaaatgggcaaagataatgaacaagaaattcattgaaaagaattggcaaacatgaaaaaattctcaactttatttttaatcataaaaatggaaattgaacaatgagatactgtttttcaccatgacattggcaaaagttaagaaggcagataacttccatgttggtgagcatgtaagtataaaaaggtataaaaaagaagagttgtcctgaatctggtctggaatagaacctttttttccatgatgcatgatgtaattcacagcctcattcctgataaattgcttaagcaattttctgataaactttaatgcgattaagacttgttctgagaaatcagtcacccatctacccaagctgactgtcggtcaagagtctagtgaccttaaaccaaatgttattttccttttgtatctagcctaacattgactatcttgtcatttcattttcctataaaatgcctccaccaaggctgaatctttgaattgatcactagaggccttttccctagtagtaacattataataaaactttgactcatgctcataactcgattttccaaaaagttttcctttacaggagaaaagaacatctgctgtttataggagcataaattgtttttggttattttgaagaacaagttggcatttttgaccgaaattaaacacatgccttttgatcaagcaattccattctgtaccagaaaatacagaaatatttgaatgaatgtgccaggacacccaattagaagaatgaatgcttttttagcgttattttgtgtgcatacatatttatttagttatttgacctattacattctaaattgatattaataaagaggtatttgagttacagtttttccaaagttttaaatactctatagcaaaaaaaggaaaaatgaaagaaattaaaaagatacctctatatacatacattgtgtgtttgtgtgtgtgtgtgtgtgtgtgtgtgtataaattggctgtgcatgatataagtttttatttcaatcgttttaggggtaaagtggtttttgattacatggagaagttctttagtggcgatttatcagatttcagtgtacccatctgagcagcatatgctgtacccaatatgtagtcatatatatatatgtgtgtgtgtgtgtgtatgtatatatatgtgtgtgtatgtatatatatgtatgtatctgtatatgtataatggctgtccatgatataattttgagttggaaaaagcaaattgaagaataatacatgtattatcatgtctttaaaaaaaaactatacacatagctgaatgtttttgtgtgtattttcataaaatgatttggggttgaggtgataaacagtaattataaatagtggtagataacttctatcaccagcacggagtgtggcttaggagctgagaaggctttgaggagggaattttctttcttttttctttacctgtcatgtttgaattgtgttccatcaacatgtcctttttatttttttgagatagtgtcttacttcatcacccattctgtagtgcagggcacaatcacagctcactgcagcctcaaacttctaggcttaagtgattctcccatctcagcctcctcagttgctgggaccactggcatgtgtcaccacatctggctaattttttgaacttttttgtagttggggtctcaccatgttgcccaggctggtcttgaactcctgggctcaagttaccctcccacctcagcctcccaaagtgctgggattacaggtgtgagccaccacggctggccaatatctactagttttgaaatttaaaaaaaaaaaaaaaaaaaaaaaaaaatatatatatatatatatatatgtatatatatatatatatatatatgaaaaaaaggacaaacgatttcagttgcacaactataatcgatgaagtggctccttgatgttctcggggtaatctgagacactggggagaaccctccacctttgcagagaagcaggatgaaggggcctaaaatgagttcaactgatttcaactttgtttcccagcataaagcttgggctgagctgcctgaaagggaagtggagaaggcaggaatggaattgatttttcccccctgctgaattccccttctccctactcccttcctgcaatttctaataaattagaagagctctgccttccagaaaagagcagaggtaccttgcagtacttttgggaatcttaccaggaagaactgggtctactattgcaaaggaaaagctttttttacagtgttaaaaattaattaaaaatggaatgtgttatagctcgatttttatcattagcacccattccagagggcatgttgctgttagtaaaacttcagatttttcctgtcattatggatttggttttagggaaaataccttcatgttcagcattttatgtgtcagtccctaaaactcatgatcttctgtgattctcttggtttaagagcagggcgagtaatgtactcaaaaatttctccatagccttctgggttagaggatataacagctggcaaacagaacactaatagctattgatggttattttcaaaggatggacatcgatagttaagttttaaggaagaaaatgaagaggaaatttaatgtgatttaacagtgattttttttttaaagacattatttgcatctcctattttcacttacttataaacaggtggtttccaagtagacatattttttgcttgcttgaatgagaaagcataatgaactttgtgatttggtgacatatccagatagctatagcaaatagctataatgccttagataaatagcattttcacgagtaaactttttagttctcaaaagaaaaattgtaacaattttctagccgcatattagcattatgcacaaacacataaacttttggctggaattgtggaatatgaagtagctcccatccttattccatcgcccatatcctaaaatgtagattgtattagttgagaaattttaccaaatatttacttatactgtgctattatttatactatttgtcaattccactatagtagatgcttaataaatatttgtgaatcagtaaatggatggatgaatgaatagtggcctacttctgtgaaggtaattgaagaattcccacacttggccccctttggatataacgtctgttctgagcacctcccattcactatcttgatgcctcacataagacctagtatatagtaggcagtcaatgaagatcacaatgaattggctagactttgatttattcatttatgcaaattgcctgacattcaaagaaaaaagaaggaaaaaatggacctcttatcatgtgccagacattgttctaagagggaaagatactgtgaaaaagaaaagtccctatcctggtggatcttagattatcgtggagaaggtaaggcaacaaacacaaaataaatacttcatataagttcaggtaatgataatgcgtgaaaaagaagtgttcttcctgttagcagtgccaacatccgctttagtgctctgctgcactgcaaaatgtgtggatgttcttgagtatgtctgggaactagctaaaattagggagttaaaatgatccagcttagctcaggctatagggaggatttctctcccaggtgtttgttttgttttgtttttgagatagggtctcactctgtcacccaggctagagtgcagtggcctcaacctcccaggcccaggtgatcctcccacttcagccccctgagtagctgggactacaggcgcatgccgtaactcgcaactaattttttgtatttttttttgtagagatggggttttgccatgtttcctaggcttgtctcgaactcctgggctcaagcaatgtgcttgccttggcctcccaaagtgttgggattataggtgtgagccactgtgcacagcctcagaggtcctgtctgcctgcctgcctttcctccctctctctctttcttcctctctttgcttctttccttttttccttctctgttgaaggcctgaataaaataaaagactgagtaagaaagaattgactccctctgcctgacttcaagctgggacgtaagtcttctcccagtccatgcatccatccatccacctatccacctattaacttattcacactggctttaaaattatttttggctccagcttattattttaaaatgtaaaatgatttacagaagttgacagagagtataattaaatcccatgagtctaccatccagattcagtaattattacatgtggccattgttgttttatctctctccacccacttcccccatgcctgaaaatttaccaaagtaaatgcaagacattatatattgttattcatagacattttgagtaactaaaagtaaggtctctttaaaaaatgataattacagtatcatcatcacacccaaaaacatcacaaattatttaatatcatgaagtgaaggcccatttttccaatcattctctaaatattataaatgtcatctttcattagtttgtttgaattccaggtaaaaacctttaactcatttccttcttttgatttttcaaaagttggttgaatagtttctgtcttaaaaagtccagaaattgttgaaataggtaaagcacaaaagaaattaaatacaccatgtttccaggcctctaatgttttctattcaaggttgtaatatccagtgcaaggctaaaattgctttctggtgataaacatttgagaaagatttggttgttggtgatactgatggttgtagtaggagtctctggagaaattgaactaatactatatgtgtgtgtgtatctatgtatagatatagatacacacatgtatctattatatatatagagagagatatatgcatatctatacacacctacgggtgtgtctgtatctatacacacacctatgggtgtgtctatctatatctatacacacctatgggtgtgtctgtctgtatctatacacaccgatgggtgtgtctgtctgtatctttacacacctatgggtgtgtctgtctgtatctatacacacctatgggtgtgtctgtctgtacctatacacacctatgggtgtgtctttctgtatctatacacacctatgggtgtgtctttctatatctatacattatatgtactaaataatatatataaacactatagtatatagagtatacatatacacactatagtgtatgtactatacactgtgtactaatacagtgtataatgtatatatatagtattcaatatagatctataaacacacaagtgcatacacacacacatttttctgtatatatgtataaagatatatataaagatttttaaataaggaattgactcatgaaattacagagactgagacatcgaaacccaggacaaccaatggtacagttcatgtctgagtctgagcagctgagaagcaggagataaaaaggcatcagttccattccatatccaagtctgagtccaagggcaggagaagctgatgtctcagcttgaagtcaggcatagagaggcaattctttctcactcagccttttattttattcaggccttcaacagattgtatgaagccacccacactgggaagggcagtctgctttactcatagtactaatcgaaacgttaatgtcctccagaaacgccttcatggacacactagagataatgtttaacataatatctgggtatcctgtggcccagtcaagtggacacatacaattagacatcatggtggttatgccaagttttttttttttttttttgagatggagtcttgctctgttgccagggtggagtgcagtggtgcaaccttggctcaccacaacctctgcctcccaggttcaagcgattctcctgcctcagcctcccaagtaggtgggattacaggcgccaccaccaagcctggctaatttttgtatttttaatagagatggggtttcaccatgttggccagactggtctcaaactcctgacctcaggtgatccacccgccttggcctcccaaagtgctaggattacaggcgtgagccaccactcccagccagccaagtaagttttaacttggaaacaatgagcagacactcgcagtacattctctacttagtatatttctttttcagagtcatctcaaaaatctctaggccaagtgttcttaactatggaccttgatgaatggaccctgagtatcttagaatcttctgaaataatatgcagcattatattccatttgtacctgggaagagggtacttgtctttcatcagagagtcaccaatggaccactggtccctgctgatttagtgtcacagctcaaaaccatcagtagtcctcgtgatctttcggcattgtggctccctttgtgagaagggcctaagagtgaatctcccaaccataagctgtattcaggcaggcacgaagtctcttatttactcagtgtttctggagcccagcatagtgcctcgcacacagcaagtgctcagtgggtatctgttgaaccggcaaaacaaacaaatgaataaattaatgggtggtcactgtactagttttctattgcttcataaacaaactatcacaggcatagtgagttggaatgatggctctcaaaaaactatgtccacatcctataaatgctattgtacaatatatggtcttttgtgattggcctcctccacttagcatcgtgtttttgaggttcagccacagttgtagcatgtccatctctctttgtgtggctgaatatcattgcattgtatggatataccaaatatttttctcctttcatctgttgatgggcatttgtgttgtttttaccctttgactattgcaaataaagctgctctgaacatttctgtgtaagtttttgttggaacacctatttccagttcttagggatatgtatttatatcaagccaaactacctacctaaccacctacctgggagtggaattacggggtcatacagtaaatctatggttaattcatcaggaattattttataaatttttgatgttggatatctgaagataatacagaatggagcccttttttactttacagattttttttttttttgagagagaatcttgctctgttgcccaggctggagtgcagtggtgcagtcatggttcactgcagcctcgatctcctggggctcaagccatcctcccacctcagcctcctgagtagatgggaccacaggcgcatgccaccacacccagctaagttttgtatttttttgtagaggcaaggtttctccatgttgccaaggctgatcttacactcctgggatcaggagatccgcctgccttggcctcccaaaatgctgggattataggcatgagccactgcacccagccctggatttggctttttgaaacagggctgcacataacctccatgatgtgattctggctgtgtctgttgaggtcccattgggcccagctctgagattccctgttagcacagggtctgacacatcacagatgaacaatggatctttggtaattaaaaacagagctgtgtggctatttttctccaactccttttttttttttttttttttttttttttgagacagtctcactctattgcccaggctggagtgcagtggtgtgaactcggctcactgcaacatccacctcccgggttcaagcgattctcctgcttcagccccccgagtagctgggaccacaggcgtgcaccaccacacctggctaatttttgtatttttagtagagttggggttttaccatgttggccaggctggtcttgaactcctgacctcaagtgatccacccatcttggcctcccaaagtgctgtgattacaggcgtgagccaccgcgcctggctttcaaattccattttttaaagttagtgctttaatatgttaaacacccttattaacatattacatatgttaatatgtaaaataaattccgtacattttaaagtgctaaaggttgtatgtttgtgcgatggatatgtttaagagaatgatttaggatgcgatcagttttttttccttgacttactctcttcctttatttttttcccttcttcactttctctgttattccttgccaatctcataaataatgtaagacaacttgcaagacttattaaatgactgatttccttaaaagaagtacgtcaggtgaagggcagatagaggtcaacaccatagataaatctttacactccagtggactttgattcacatcatggctccttctcttccttgctgaggcttttgacaatttcaaatgctccctgaacctcagtttcctttgccacaaaatagcaatacaaatttataattccttagattgctgtgagaatgaattgaggcaaggtaggtaaagtgcaaggaattgtgtgtggccggccaggtgcagtgtggctcaagcctgtaatcccagcactttgggaggctgaggtgggtggatcacctgaggtcaggagttcgacaccagcctggccaacatggtgaaaccccatctctactaaaaatacaaaaattagccatgcttggtggcaagtgcctgtaatcccagctactcaggagacggaggcaggagaatcacttgaactcggaaggcagagtttgcagtgagccagattgcaccaccgcactccagcctgggcgatgagtgaaactccgtctcaaaaaataaacaagaattgtgtctggcctttgtgatagttactcaacaaatcatatctgtgattgttttggttttaacaataatggtttttaaaaaccgtaggtgatcacatactacgcagaaagggaagcagttacagcattcacagcatccgtgagtcatagactcactgcattgctccaaggtgcagattctagttggaaatgttaagttttttagagcaatgaaaaaattgatctctttctcttccataacatagatttcccatctagctcctgggctaacttttgtttagtagttgtattatgaaaacaccgaagaatccttctgccagtctccatagcagtgatataaatcagagcccgcagtttcatgaatgcctcgctgtgccaccaggattttcttggagggagccacggtcagatttcaagtggtcatttcactctttctccctctgggggactgagacatgattaacttgcaataattgtgactccctcattaaaggagagctgtagcaagggaagaaatcattgagactgatcaagacatcccgtgctattttttttttcttgcatatcagctgtgtgggtacctcttgttcctctgtccttcaggttagtaaaacgaagaacagttgctgaagctatgagctatcgataaaagctaatgtaccacacgaaattggaaggggaacaaaatcacttaagtgttcagggccaccaaggcactggtgcatcccctgtgagcctatttggctcctggcggtgtttttgttgccctggcttgcaacgtagcctgattgttctaagtaaatggcagagcacgcaaatcaaggacattggcaataaaccaggaatgcactgtttccagccacgggctatccagggaattggggacagtctgtaatgtatcttgagctaggaccatatccaaattactggcctttccagtttttcttaaaatagtagggtcagtaggtgaccacactcagaagccaagcctgcagcatcagggctgaggagcaaactctttctttggtctgaagcttcaaatatgaacccttgccaccagctgcataaatatgatagccaaagggtttcaaatttgtgatttgtcataaacgctcctattgcaggctgggtctagtccttcttgactttgtggaaggagaaggcttgaggaagtattcacaattggagaagggcgccttctgttatgttcttagctcactaaaagtggttaatgatgagaaggggtgggtcaatgacaagaaaagtggagaagatgagacagacaaaactgcaactcatcttcatggcacactggtgagtgggggagtgcaagaagtttaggtgcaaaggacaatggagtgaacatcttggcttggttaacagaagaaaagaataccaacgccgtctattttcatatccctttctattttatgtacatatttatcaatatactttttgttccagaaataaatgggaacttaggcacaatcttttacacatcttacctcaactggtgactcttcataatctagagctattatagtttccaattgacagatggggaatctgagactcagagaagttaaatgattttgtgtgtgtgtgtgtgtgtgtgtgtgtatgtgtgtgtgttttgtttttttgtgtgtgtgtttttgtttttttttaagacggagctttgctctttcacccaggctggagtgccttggtgcaatctcagttcactgcaactacaacatcccaggttcaagagagtctcccacctcagcctcacgagtagctgggatttcaggtgcctgccaccatgcctggctaattaagtgagtttcttaaagtcctacaactggtgagctgtgagctgtaaattgtggaactaatttttatactgccaatctgaggccttttctgacctcatcgctgccactgtaaaatgaattctagccccagaccatgacatgcctactagcttagctctaaccagaaagatttattatcccaagagttgtgaaaatgtggaagaactagaactgtcattcactgctggtgggaatgtaaaatggtacaatgaatttggaaacagttgtccagtgccttaaaaagttaaacacacacatatgtggctcagcagttcccttcctaagaacctactggaaagaaaataaatgcttatacaaagtcttgttcatgaatgttcatagcagcatcatccatgatagccaaacgccggaaatacccaaatgtccattagctggggaatggagaaacaaatgtagtctatcgacacaatggaatactactcagcaatgaaaaggaactaactctggatacctttaataacatagatgaacttcaaaaacattacgctaagtgaaggaagccggtcataaaagaccacatagtatatgatgacatttatatgaaatttctagaaaagatgaaactctatagacagcaaacagaatgatggttgcctggggctgggagtgagtggaggggattacctggaaagggtggggcaattttggggggtcaagaaaatgttctaggacaagactgtggtgatggctgcacaactggataaatatactaacatcaaactgtatatttacaatggttaaatcatatggtatgtgaatttcacattaataaagtcataaaaaatgaattccaggaccattaaatcaggtgactgagccaatagttacaggaacatagaaagattttcacccattctgtataattagacaaattctgttactatctgtccaacagtttagcaagagtcactctgagattgaagagaggaagggaacgttggaaccaatgctgatgagccattcataggctctggctcactatatatgtctaaaattcacatgcccctaaccctcagataatgaccattaataatctggcaggagaggaaagacctgcagctcttctagtccttatgctatctcattgtctcatggatttttaatatgtctttgcatcccttagaaatttgcacttttcccccctttttccattaaaacacacctgcgtgcaaacgtccatacacacccatgtacacacagacacacacacacatgcatgcgatctgtaaaaagtcacaaaggccaaagttttaaaggaagaaaataaaaatcacctgtagtcctatcattcagagataaccactgtatgtttatttacattagttttgattacattagtttagaatgaaattttaaatacactagtatatgtaattaaaattgtatatacgttttagtcaaccatcagctgacttattcatgttctgtggactctgtggtgggtggggtccaagcctccctgaagcagatctctatcctgtcaccctgctggaaatgaaacacttaggggttagaaggggatcaaggaaagtccgagagttggttgtgattatcttcagtcagaaagtgcctacttttccaagcatccagactgcaacctgtttttcctactcaaaatggtttttatggattctattcttatttggcaattgcctggactacagtcaccaacacaagtttatacgcaagaagtgcacacagccctccctcccagctcatccggtaacaatttagatgaaggatgtaaaataggattcatttcatgacccaagtctggtcaattgaaacagccgattgaagtgctgtgttgaaaaggattttgacactgcgcatgggctcgttgggaaagggtgtcatgatgggttactgattctgcggtatttttgtggacgtggggagtggtggcctacttacagtgcatcgcccactctgatttagatgagcaagagctgctgagttgtagatttctagtttctaaacaacaataagtcttgctcgcagatagcctcttagcagagccaaaagccagcagagagaagactcagcatttgctttggagtaagtttgtgtgtgtatgtttatctcccttttactcatgggctcttttttcccaaataactgaggggccagcacatttggagaacatgggatttatcattgacgtcagtgccttgggagtctatgtttatgtgagcttaaaggttttggaagctgaatgacacagatcaaagtctctccactgatctgtcttccagtcctccaggggacttcttccatcaactacaaatcattgatcaaagtattggtctgtcacctgtccatgtgtaaggccaggcctaagtgctctgacagggcatgactcaatcctcaaacaggaagggggaaattgctttccgtctcctaaccctaagatcctggatggcaggtaatctgcttcctcaagattctgttgatacacattcaggactctggtttctgttttgcttgatgacaatgacccagtttctttgactaaataaatgtatagacacacattacttcttttcattctaagaatcataagtttttcaaactttagaatcacaaggtccattaaaggacatctcccctgaccttcccattttgtagatgggaagactaaggtccaagcttgaatgacctgccatcatggggataaccggaattgatacaatgtcttgattcaagattcagagctcattttttctgtgtcagattaaaaaaaaaacaaaaaacccttactgatcttttaaatatgtaattcttcctcctcttctccccttgtctctcttctcacccctaccaatgtaatcagttctttttttcttttttggagacggaatctcactctgttgcccaggctggagtgcggtggtgcgatcttgcctcacggcaacctctgcctcctgggttcaagcaattctcctgcctcagtctcccaagtagctgggattacaggtgcatgccaccatgcccagctaaatttttgtattttagtagagacgggttttcaccgtgttgcccagggttgtctcgaactcctgagcttaggcagtctgcccacctcagcttcccaaagtgctaggattataggcatgagccaccatgcccggcctaatctaatcagttcctttaaatctgaaactgtctgcctgattctggtttaccacaaccaccagagtcttaagtgtcccaatagccagggtctcatagactctgcttatggttaattcttctggggaaattaatttctcgaggtaaaacaagtttttaaattatcccctatagctcatagaagcaattcagtaaatacttgttgaatatcaaatgaatgaacaaatggcattctacattgaatatagtaattcccaactttcgtgaaggttgttttttttttttttttaatgaggcaatcaggggtaaaaacccccgctgctgtcctaagacagaaagaggggggatttttccccccatggcttcgtccttattcttataacctgtatgcactgctgaacctgctgaataaccatgtcacagtggcaggagagggactgggtgaacttgagcctcgatgcctggattaaagccttgtaatgatgtttgcaaagcaccagggtgataactgaatggttggcacaggcttcgatgaagcttgtgtccaccacagtttccagtgcttctgcacctgggtggtcagaaatgagtcctgtgagacacaggtgacaagatctccaaggaagcagttcacgcttggatgactctggagctgtggtgacaatctaaatcctaaattgaggcttactaggaaatgcactaggtaacaggctctagagaaatggctattaccaggttgctcaggctggagtgcagtagtgcaatttcagctcactgcaacctctgccttctgggttcaagcaattctcctgcctcagccttccaagcagctgggactacaggcaggcaccaccatacccacctaattttttgtatcttttttagtagagaggggtttcaccatattggccaggctggtctcaaactcctggcctcaagtgatccgcccaccttggcctcccaaagcgctgggattacaggtgtgagcccccaggccctaccctgggcccctcctttctggcccctcaacctgttttcttccagccatgccctagggagagcttggctgtggccttgcagaccctctcagatgccactcaacaagggccaactggagagaaatctctagtctagggcacaaaatttctgtcaacccttctaaccagtgtttgaagtacgtaagacgttcatttccacttctaatgaggaattagaggaacggatttataaaggaattctggttataattgcaggtacttttagagacgatgtctaacagtgcaacccatagaaccaggctgcctggattcaaatcccagctctgctattactgagatctctatgagagctcagaaaagtttacttaatttctccaagtctcagttttctcataagaaagatgggcataaggaaataatgtagggaaaacacttgttgcagactgaggactcaacaaagttataattaaagctattactaacgtcattattatgaaaatagccatctttttttaaagaagggagttaaaggaaagaaatgccaggctgagagatgagacagtgaattacagtgggggataaaggggctgtggtgtcacacaggcctggcatctgtggccttgaacaagtgcattaatcactctaagcctcaatttctttgttttaaaaataattaactaaaataccttagggcacatggtaggaattcagtaaatgctcactgtctttctcatccttttgcttacctcacatttgcttgcagccagtgctcaaaaccatagacaggcagtgtccccaaccactccctgcgtttctctttctttgccttccgaagctgccatcttggtggtttttgaagcatcaacacttacttcacatgcagaggccccttttatttatttatttttaatttttttgagacagggtctcgctctcttgctcaggctggagtgtagtggtgtgatctcagctcagtgcaggcttggcctccagggctcaagcagtcctcccatgttgacctcctttgtatctgggaccacaggtatatttcaccatgcctggctaatctttgtgtttctgtaaagatgaggtcttgctatgctgcccaggctggtctggagctcctggcctcaagcagtcctcctgctttggcctcctgaagtactgagattacgggtgtaagtcaccacacccagcccagaggccttctttaaatgctagtcctttttctcttcctccatctgggtcttggttccatgcgtattcagtttgtgaaaaatttgagtcgtgcacttattatgtatgtgcttttctgcatgtaattatgcttgataaaaaaagtttaaaaatttgttttagatagaggtttgaatgtcactaattaccaacgtgtagctcctaattggaattaagaagggactagctcctattatcagagatctggtcatcacccttcaagttgactatctccttatgctgattttttttttcttttaaatagcagcacaaatatttaccatctagcagatgtggtaagaatgtaagttgttcagccatttacagcttagtctttgggagatatccattcattttaaatacttggagggccaggcacagtggcttataccttgtaatcccagcacttttggaggctgaggtgggaggattaattggggctaggagttggaggctagcctggggaacatactgacacctcatctctataaaatattttttaaaactcagctgggcatgatgttgcatgcctgtcatcccagctacttgggagactgaggaggacgattgcttgaggccggaagttcaaggctgcagagagctgttattgtaccactgtactccagcctgggcaacagagagaccctgcctcaaaaagtaaataaaatagtaaaataaaacgagatatttggaaggctatgtttttttgccaggccatgtgcttagtccctgggagtatagcgaggggcaatcacaggtcaggtcctagtgtctctgaagacttcattctagtggccattgaaaatgtgtaactacccacagtaatcaagttaaagaaaggttctggctgagcacggtggctcatgcctgtaatcccagcactttgggaggccggggtgggcggatcacaaggtcaggagtttgaaaccagcctgaccaaccctgtctctactaaaattatttaaaaaaaaaatagctgggcatggtggcacacgtctgtaatcccagctactcgagtggctgaggcaggagaatcgcttgaacccaggaggtgaaggttgcagtgagctgagatggcgccgctgcactctagcatgggcgacagagcgagactctgtctcaaaaaaaaaaaaaaaagcttccatttgagccgccaggaaaggaggccctgagttggggagttgaatagagagctgcatcctgaacagacatgatcttgggtgagtgagaggctaggagcggagggaaagcagacgcagttgctaaagctgtcaagtcccgctcccttggaatgcagtcctggttctgctacctccaactgggtcgatttcaaaaaattatggacttgtctgagcctgatgtggtgcctggccagggctcactgcagcgcctggtatacaggaagaacttgatgttattcatggcaaaagatgtctggatggtctccactacagattctgatggcaagtgacttaaagacatgttggcaatgggtagtggacaaaaattgaaacaccttcaactgtgtctgtgaccagaagatttttttctttttttttttttttttttttttggctgactgtcatgacttagtaaggccatcacaggttgccagaacatctactcaactgttccaagcataacctcctacacaggccttctacataggagtatatttggccaagactcaccactagaagtgatttccactggactttcctacagcaagtggtaaatgatccctcagataggcccaagagctccccttcaagcatagagacacaaccctgtgaaaacatgcattggaaccaggaaggcctgcccccatgacttcacgttgcatacatgcctttgaggacttggcctcttaaaggaatctttcaatatcctatgcttctgagaaagttactatttcatttgcagcaggacaactcaacaagctagctcttcctgcccagcagactcggtggattctgaagagggtctcgggctgactctctacttcatgggtttgaattcaggaatgttgcaagattgcatgagattaagccgctgaaacctttctgaggaagagccagctcaaatttcagtgttggatgttcaccgcttctttagggttctaccactcccagtaaatcaagtaataggtttctgttaaaaaccccagtgtgctgatctcagtggcagccatcttgctttgtaagccttctctagctttatgatgctcccagtatataagacatttccagtgtctagtccaaattagtatttctctaattctcgagtgtctgatctgcctggctagaatgattaaaacaaaaaaatagcaaatcagtttgacagtccacttcattaagtggaggacagtgttttgattgctatttaatctgtttttccttctgtctgttcttggctatatggaattcactttgcctctcttcccgactcttcatatcccttatctcaaggtgagtatcgtcagaatcccggtacatttcaccagccaccttttatagaagcttagaaagatggaggcaaacccataaacaagacttggtttttctaagccacagtggcaatttcctagtcgattacaactgtgtctaccctttcaactggcctgtcagtgtaggctctgcatgtcctggataatcctacaattggtgacacggttattgacttacaggtttctagggcatctcattcgttttttaaaagaatgtttcttccacacttttattgcttagtagaaacttgttctaattctttctcctgataccatttagcctattagtacctgggaataatcaccctcccttatctagtcctacagatttgttttgttttgagttatacccactttaggtctcccaccctctcttatttttataaacaggctccatggtactatatacactgcagatggacagctgccaacctgctctttttgtgctgaggaactctagatatttcaactagtttacatgactttcttacctacgctaccttataatccttttataaattttgctttacgttttaacaacggaaaacacttaaggtttttttcctttctttttttttttaattcttccgccagctatctttaaaagcagttctaaaacttcttattttaatattgtacccattgtactttagtctaagtgatggctgcttatggccatgccctttcttctgcactttgggtgttttgtctggaattttctctcctttccttttgtgaaaaaggatgaattttccaagactctgttatgacagaaactcaccagttctctgttgttaatcaacaaatagattgtgaatgcttgactcttctttttttttttttttaaaggagtttcaagggtaagatctgctgtcttgtgaatgtcaaagaagtttctcattcgcccctttcttctctctcccagtgtctttaatttgttaatgctttcgacttattttgctttggataattttcaaagtactgctttctctagagatctctaaaaggcagaagttctggctattaaagatttgccattctcagaacagcccagttagggtaccctcaggttatttataactggattttatctcagaaaattaactaaaagaagattaaccaaaaatctaaaggaaaatgccttaaacacctcatctattatgctgtgctcaaacagatattttcatcttaacagcttggcaaacccagtggaacgctctttctagtttggggcataaaataagataacactctgaattcctacaggaaatcttgtaactctacttaaaattaaggcataaagtaggaaaatgtgtttcctctgtatagtcttattactttgcctgttaagttaactggttcctatttctgctggttcgaagaggtccaggacatttaaatagctcttctagaaacaaattcttttccttacaagccctgccaggtcagtgggttcagtaaggaagaaggttttgtattttgacaattccttcatctgttaatttagtcagacgaggaaggaaacgagaaaagttattcctatttcatccatctaagactttatatcccatttcaggctgattaaaaggcaaaatcgtcacagtaggacaccaaaccctctgtatgccctgcctgcctccccccctctgacccgcctgcctcccccctgtgagctttttccacctactggcctcttgttcttcttcagctgttcctcagacatgccaggtgtgttcctgtctcagacgctttgcctttgctgctccttctgcctggagtattcttccacgtagcaccatgagctgttcttctccaaaaggctttgctcaactgacactttctcagtgaagctgtttctcaccactcactataaaatggcagcctgcctctctgagccttgcaccctctcttccttttcctgctttgtattccttgtggcacttattatatcacatagatacagacatagatgtggacatagatagagacatagacatacatgagttttgtgtttattctcctattctctagaagaatgtaagtttgtaagtactgagatttttgtctcttttgctcactattgtacttcagggcctagaggaaggcttagcacgtggaagacaatatttattggaggaatgaatctagaaatatccttggatgtataatgtccaactcactctaccacacagcaacataggtagttttatatacattttatagctaagcccagcagcccaaaaagctaaatgacttcagcgcccacagatactcctggatgagaggggattggaaaccaggtctgttcaattgcaaatcccctcttgtgccttttacaggtcagatgattttgtttttataggctctagcaggtcccttctctttgcgtcaccagagaggaagatcccctaagacaaagcattccctgtagtttttagcataactagtactggctcagtaagtatccactggggttcggaatacaactgccctgcctcttgagcagccatgcctgcttccgaggtggtgctgcatgctattcaggaggacagaccatggatggaaatcctgagccacaactccttagcctcatgacattgggcagatgactgagcttgtctgagttacaataaataaaaataccatgctgaatgatggcctagcatgacattgggaagtacagactttgcaggcaggcccctgggttcaattcctgcccctgtcattgagtaaagtaattatcataactttggaacaaattgacctctctaagcctcagtttattcttcagctaaatgaggatgattgataatcaaaactattttatagggcttgggggagcatcaaatgaaataacacatataaaaggcttggtttaatctctgaagcacattggcacttaataaatgttaactataattatattaacacctattttacagggttgctatgaggatatcatgagataatatgtatgaagaacctagcacactgtttggtgcatgtgagggttctgtaaatgttacccattttattccttaatttcctttatagacccctttccctgcaacacccagtagtctggcttctatcctgacaatgttagtgaagttgcttgcttgaaatttaccaggccaggcttatggctgtaatcccagaaactcaagaagctgaggcaggagaatccctatggtctcttgagtccaggagtttgagaccagcctgggcaagatagcaaaatactatctctacaaaaaaatgaaaaaaaaaaaaaaaaaaagcctgtcatagtggtacatgcctatagtcttagctattcaggaggctgaggtgggaggatcgcttgagcccaggaatttgaggttgcagtgagctatcattgtgtcactacacttcaccctggatctggaaggaagggaggaaaggaggaagggagggaaggaggaatttactagaaacaaattaacttctgtaatcctaagtacttgttaaggcagaaaaacgcagataagaaaatcgaagttgagggcaaggagctcatctttcacggtcatagacctcagttgcaacatctggaaaaagagctggttgggcatgccgggcaggcttttgtgacaatgtaagagcaagtgaagattgcatctcagtatgagacaccgtaagagcttgataaatggtggaccctctgatgttgacaacatgatgtcaaagatggtgtttgctgttgtttcaaatgtcttatttcaaattcccaattagtttcttcatgccataagggcaaaatccacatctcatactttttcaggatctgctctcacttccccaaacatgtaataccaccctggtcttcaagtccactctcaaaaaaaaaaaaaaatttggcctttggcctcgtgaccaccaaatctgatttccatccaagaggcaacattgtttgtgcttagaaggaattcctggctgggcatgatggttcacgcctgtaatcccagcgctttgggaggccgaggcaggcggatcacctaaggtcgggagttcgagaccagtctgatcaacatggagaaaccctgtcgttactaaaaatacaaaattagccaggcatggtggcacatgcctgtaatcccagctacttgggaggctgaggcaggagagtcgcttgaacttgggaggcagaggttgccgtgagctgagatcatgtcattgtactccagcctgggcaacaacagcaaaactctgtctcaaaaaaaaaaaagaagaagaagaagtaattcctaacagtctggaatctctagggtctctggtattatcctttagtttaagcctcacatttttctaaacattttgaaatctggtgtaatggcgttagatgaccaagaatttatagtcaaaagtagataaagtaaaagagtgaaaacagagacatgatacgagttgatgataccgtatgcaacttgtcaaacacttacatttgtgaataagaaaactggggtctatttggtggtttatttcagagatgttggatcaaatcagacatcagaaaagacaacagtaccaaacgaagatatctttgctgtatttgcagttttctctcttattaacatgaaaacaccttacatagatggaaacatctaaaggctattttttattttattttccattacttcactctaatgctttcacccgtacctgtggaaattagactgtcacctgcttttagcatcctgttttctttcgtgtttgtaatgaagccctccgggaattatgcgattacaaaaatgagttacaaatcctcattcggtatacgaaagtatatagctgctttccttctctgtttaaatagtctacaaaacaagaaataattagtcaagcactatcggtaattaagcacataagatgaacattaaacaaactgcaatcttgcatcattttgaaggtagataggcaggtttttgcatttggaatccagccaaaatgcccatcttcattccctttgctccttatttattattggtgagggaattcacttgccgaacttgctgatgtactcttgctggcggtccatctgagagttcacataagtgtgagtgactattttttgacaacactacctttgggagaagatggtttcaaagaactaactgtatcaaatggaaagacaatgtgttttcccaacatgggagtatgtttctaagttgggatcagttcacgattcagagaaatgctctgccttcttgtctatgatatcagatcaggtcagacgtaggtataagaccctgactcctgttttccaagcacttttttttttcattatgagtctatctttcggtcccctaaagcttctggtaattttttttcttttttttttttttttttgagacaaagtctcgccctgttgccaggctggagtgtggtggcaggatcacggctcactgcaacctttgcctcctgggcgcaagtgatcctcctacctcagcctcccaagggagctgggaccacaggggcacaccaccatgcctgcccaatttttgttgttgttgtattttttggtacagatgggattttgccatgttgcccaggctggtctcaaaactcctgggctcaagcgattcacgtgcctcagcctcccaaagtgctagggttacaggcatgagccactgtgcctggccctggtaaaattttgtctacatagttactgctgcccaggcaaaatctgaaaaatgttagtctaatttagttaagtttttcttgcagaccagaacttctaggaaactaatatacaggttttctccaaaatatattttcaaggaaaatcagagaataaaagtttccaatgcatttagactagaaaattaaatattcaacaaacaatttcggagggccaactatttgccaggatccttgctggaatagtctctaacctcaaggcaattgctgtctagctttaagatcaagagtaattgtgacttgatgtaaggtatctgtgttgctttgtattacattcttcttagctccattgtgttaaatacagatagacaatatttgtacatgataggttggctcaccattaatcacttaagaagtaatagaatgatcaatgattttctttctggcttgtctacgccaaaatggttcttctgctcagttggtttctatagtgattttatggatataggcattttcttctcgaattagaagaactgacagtccaggcacggtggctcatgcctgtaatcccagcactttggtaggccgaggtaggtggatcacttgaggtcaggagtttgagataatcctggccaacatggtgaaacctcatctttactactaaaaatacaaaaattaggtgggtgtggtggcgcatgcctgtaatcccagctactctgaaggctgaggcaggataattgcttgagcccgggagacggaggttgcagcgagccgagatcacaccactacattccagcctgggtgacagagcaagagtccatttacaaaacaaaaacaaagaactgacaataaatagttttctccgttttgtgacttatttttaattattaagaataagtgtcataaagccaatactttctaacatgtgtatagtatgttatagttttcaaagtctttgacaattatacctagggagccaggacagtatttgtatcatcatttcattgttcctggaaaacaggttcagagaagttaagcgacttgcccaaaatagcacagcaatctgacagagccaggattatcttccatcctctattttattacctgtgcctcccattaaatcatcctaagctccactacagctggagaaggttctgttaacacaccatacatctttttttttttttttaattgagatggggtctcactctgtcacccaggctggcgtgcattggtgggatctcagctcactgcaccctccttctcccaggttcaagtgatcctctctcctcgcctcccgagtagcctcccgagtagctgggattacaggtatgtgctaccgtgcccagctaacttttgtatttttagtagagacaggggtttcaccttgctggccaggctggccttgtatttctgacctcaagtgatccacccgcttcagcctcttaaaattctgggattacaggcatgagccaccgcacccggttatacatcttaaatataaagtttttacaatgccaccatttaaaaaaaaaaaaaagggcattaatgcatttagcaaagacttcctgagtgtctgcttggtcgagtgacacaaactggaacagagcatagcctgtcttccaggaaccggcaccagcgatgtcgtaggctgagggagaagccacagaactgtgagtgacatgtttctttggctgctcccgacacaaggaactgcaactaaattgaaggcttgaggacaggaagcaccttagcggttcgcctttcatttgagtgggcccagggtccagaaaagggtagatattcaggaagaattgatcaccttttggatgccaccacacatgcctaggcacaaaataactcagaaaacagtgataaaagttgtgattgtggttgttgtggaaattaaagtagcctcccctcttaagctttgtgaacttcagcaagctcctgaacccatctggaccctctctctcatcagtaacgcagtaacgtagagatgaaaccctaaatgccatccggtgacatcctggattagaccctgaatcagaaaaaggactgtagtgggaaactcgtgaaatcctaaatacagtctgtcatttacttaatagtaacataccattttcataagcataccatgggctgggcatggtggcttatgcccgaaatcccagcattgcgggaggctgaggcaagctgatcacttgaggtcaggagttcgagaccagcctggcgaacatggcaaaaccccatctctactaaaaatacaaaaattacctgagtgtggtggtgcccacctgtaatcccagctactcaggaggctgaagcaggagaattgcttgaatccaggagatggaggttgcagtgagttgagatcatgctactgtactccagcctgggcaacagagcaagactctgtctcaaaaaaaaaaaagaaaaaaaaagtaatgcaataagcgtaccatggtcatgtgagatgttgacattaggggaaagacaataaacagcgtggaggaactctgtgtactctgtttgtaagtttcctgtaatactaatattctaaactaaaaagataatttaaagggaaagaaaacctctttatgatagtaacatcagttggtataaccattttggaagacttgatttacataggatcaaatataagtatatctgatcccctagaaatttcacttctggccaggcgtggtggctcatgcctgtaattccagcactttgggaggccgaggcaggcagattgcttgagcccgggagttcaagaccagctgggccaacatggtgaaaccctgtctctacaaaaatattagtcaggcatagtggcgtatgcctgtagtcctagttactcgggaggctgaagcaggaggatcacctgagcccagggaggtcaaggctacagtgagctgtgattaggtccctgcactccagcttgggtgacagagtgagaccctgtctccaaaaaaaaaaaaaaaaaaaacaaaagaccatttttaagactatgactggtcaaaatgtgctcatacatttgccaaaagacaagtacaagagtgtgtttagcagcattattcattataacacactgaatcattattcatgattactcaagacatctggtaaaccacccagatatctatcagtggtggaatggataaataagttgtaataaatccacacaagaggagactactcaccaacaagaatgaatgacttagaactaaattcaacaatgtggatttatcttacagagatgatgttgagagaaaggaggaagatacagaggaatgtatcctatgtgattatagttacaatgagttgactaaaaagcaaactattcctattagaagtcagggtagaggatggatgggagcatgaagtgtcctccgtcatgttgctaatgttctgttgcttgttcaagctactgggtgtgttcagtttatgaaaattcatttaatgacacatgtatgttttgtgaatttttttgcatgtatattttactctaacaaaaagttcatggacaaatacaaaatcatatctgacagttgttgagagaattaaaggaaataataataatataaagcacaatcaatgcattccatttattcttctgcttttcccatcaattcatgttacccagtcattaatgcataccctctgagaccccaccaagccatctagccctcagctgtgtcactgggcagttgtttcttccactgtgcagtgtttcgttcttaaccaacatggcaccccaggttcagtggtgagagtgtcactggcaacttctgaaataacatctctgttagtttgtggagtgggctaaatggccagcccttctacgagctccctcatggttgcgggggactaccaatcactctctactttttttttttttttttaataggtcttgtcatttgtaaatgcagaaggaacactgaaaaaaaaaatactcttgccttcttccatctgtattttctttactaaattatccagtcttataaatatttgaataacatttggtcagtataaaatctttcctgtcagctcagtacaagaacactttttggctcctgagaccacaacagtcagataaattaatattgatttgttagaaaatagttttcactctgtctaaacatcttattctgggctcttgaaccaaaattatgaatttaaaagcagcaaaatagttcttcacagttttcccagtgaaactaattatgggcagattgtgagaaatgtgttggatgtgatttccaacatagagttctgctaaccaaaattcagagaaactagagcctcagtctctgatttatttgagcaagttgcaatttggtagactggagaatttatgtaaatagtttttgcagtttccatagggataactcaatacattaatatctcacgaatggcagaagatgaagggggaaagttttttttttaactgatagtttgatttacctaatagaaggatcggattcttcccccttcttacttaagtctatatattaaagaacagctggcttacctgctgtataaatatgcagtgtgtagaatttgactcagtttagagttgagttttaatcacatccacgtacagggatggggatggaattttttttttttttttttgagacagagttttgctctgttgcccaggctggagtgcagtagcaccatcttggcttgctgcaacctctgcctcccaagttcaagcaattctcccacctcagcatcctgagtagctgggattacaggtgctcgccaccacaccaggctaatttttgtatatttagtagagacggggtgtcaccatgttggccaggcaggtcttgaagtcctgaccttaagtgatccaccctcctcggcctcccaaagtgctcggattacaggcatgaaccactgcgcctgactgtacttttttttttttaaagtatacccatacccattgtacacatttggtattttttctttaaaaaaaaaaagcatttactttttgcctcatgaatctctgagtacattttgtgcattctgtattctactttatttactcaatattaattatatgagaaataaatcctaaatgtaattttgaatggtggcttcacaaaagaacatttcctcttcttttggacatttgctcccaattttaaataacacatcattgaacatctctgtacaaaattccgtatctgatcttcagagaagttttaagatagatgtctagaatttcatctcacatctaaactgttttaagacacttggtacacattgatatgtattgtccaattgctttccagaaactatataaaatattacaaagaaaaacatatatatatatatatatgtaaaatatatatatgaagggagaaataaatgtaaatgaaaagaaaaacatatagagaaagaatatgtctaaaagaaactgcagaggcagctataattaaagcacaaggaaaggctatgaaattctggttccacctgcaacagctgtatggtaaaaagcttattcagagtccttccttcttggaaagctttgttagagtcttatgggattgtgatgcacagatacaggggcaaggctactttttcctcgaactagttcaccaaagcttctatcctatgaaagtgaatataaaattcttaaagtttatagggtctgctgggtttaaggaggagaaatttgagttttcatattgtcagtctcaaaccttttctgaaattggaagtgatgaagtgacagtctggctatatgtgtgtgtgtgtggtgtgtgtgtgtgtgtgtgtgtgtgtgtgtgtgtgtgtgtgtgtgtgtgtgtgtgtgtatacctagtctagggctaggtttgggaactattttctcccgtaagttaaactgaactagactgtatgtcaaaaaagagtctcaatgtcaacttaatccattgtcatgactgtaaaatgctatttcattataccagcaattcccctgtggatttctcctgactctctatgcagcccaactctattttaatctgttgtagcttttctttcccctctctcccaactccccacgttttggaattattcagtgcattcgcttccaaggcacctgtttgatatttacacaaattatgaaagtaaggtgggaaggcaatgaaggcaacaaagtatataaaacacacacacacacacacacacacacacacacacacacacacacacacacaagaaatgactacagacacctcaacacccttccaaaacacttgaatcattttcttcgggagttgaacaagtggctgaaaatgccaaaatccatcagccaatgtgtaagtacaaaagggtcagataagatatatgtggattccataaaatagtgcatttgaattcccccaggtcttttaaagatagtggttttccagatgtgacaaaacaaaagaagatttccaaatcaaaattcccatttgcctttcgggatgttgaattttctccacatttgtgcaattaagagttttgctgagtgagcttaggactctgtctctttaagtgtttaacagtaattggttcatgtcctggtgttcattgaaaatcctagacatttcatgtaaaatcttcttaatgaggggatgaatttttcattcacattagaaagctcactctgacaaacaatttctaaataaaactttggcgacatgacatcccacattggacttgtcagagaggacaggtgcattagaatataactgtatggcgatccttcaagctgtcagccatgaatattttatttcttaatgaatcatctttgtgaaatcaactttcttgttgtagtgtcagtgccatttacaacaaaaagctggctccttttaaaaggtgagctccttaaagatgctgattcctgcataaaatgtttaaccctacccaaggtgttgggcaactgggggctttgtgctttgcttctcccttctgaaagtgacttgagaacccactttgggctagtgtgattacagtgaggagaaagctttccttgatttgttgtttccttctcagaactgaaatcccaggtacctgcccagaggcagctcccttggcccttgggtccctgttgttccaggtgttactcctattctttttgtagttgtctagggatttagtttctcacatcctgaggtccactaggtgctattagctggtgctaactgacagctctaggcagaaagcctttctcaggatcccagcttccctgtcttccagaactcaaagacggcttttgtttgttagttttgaggatggagacagctgtcattctaatgaggacttaaatgtgtccctgctgaccgagccagaacttatttttatgttgccactaggagtcttctgagatgctcttgtggctggatgtagaatccctttgctcatctctagacacagactagacaacgaaatacattcccctaaaatagcccagggttagttctatgacctttgtcactgttggtacagttctaagaggatattgattttttttttctttttaattcatagtctcaactatgtctcaagactgcccagcagtatttctgtttactcgatctaatttctcttccattcctcacagtggcaatttcaagcttctcctttttccccaagccccataatctccccctgatgcccttagaaagcttccctggtcagtcctcctcaccacctccagctccccctagaaactgaccatttatcccatcccggctgacttcttcccttttacaagaagatgtctctctttgaattcaactcagaggtcagcttcactgcctgccctgtggagtcgactctgtgtcccacccttcaggaatacggcttaataataagatgataaggattcgtaccagggattggcaaatgacagtcattttctgtttccttaagtaaaattttattaaaatacagctccactcattcatttatatattgttcatatctaattattttcacactgcaatggtgcatagtcaaatgctttctatctggctttttaagaagatctttgtccctcccccaccccccgccccgatttatactatggatcagcagcctaaaccctgcaaactgggtcccccatctaagagtctgcaatgaaacgcgagccgacttgatgtgtctcagagtgatcattcttgcccttggcggttgatgctagactgttgcagcttcaaatataatgtattttagtgctatacgacagccataagtattggcctgtgtccactggtctccactaggagaaaaccgagccaagcttgaaagtactaagcgtgcccaggggaaatggaataagctagaaatttgttgtttccttttcactaggtttaagtgagaatatttgtgagcaaactctcagtgtgggcaggtgacaatttctgcaggtattttccccccattttaacttgtgcgatatagttccctattttgttttgttccgcctcgatcacaacagctgccacccgaggtttaaagatactgttgtcctcatcttcagaacaagggttacgtttgctgtatctggagaaagtccatagtttatgatgaattttctattaatgtaaactcccactgtttataagtcacccaaattgttggtattaaattagatgtgtaccatcttatgtctcttctttcagaaaatgaatctctgtttttttttctctttctcctaaatgttaggaattttctgaagtttgaaaccaagtggcacaaaaacattgcatttattacataattgctcctagggaaatacacatacacacacatgtacacacatacacatacacacattttttcctaaacaacatcaatgtcataacagttttgaagcacatatacacactgacacatagattttgtaaatgaggcacatctattcttgaaatgcaattgcttaaaaatggaagttctgaaaataaataaaaagaaacatcaataaataaaagccccattttcatattcttatttgacctcttgcctctccatcattcttaaatttgacctccatcattcttaaatttgacctccatcattcttaaatttgacctccatcattcttaatcctcatgttcttaatggacatccctcccaccctatctgggccttctgagactgttcccccagccccagtcaggagggcttgtccacaagttgctgtctgaactgggcaagcctcctggcttccctgaaatggtgctgatgtcttcacttcctgccaccttggcaacctttgtagttgctctctttttgccaggggaacaaattaagagagagaagagtgatagtgtctacatgtggtctgctcactcagccagtattttccacagccagtctttccctagaccagcatctgagcgtgccttgtctatgggccacctatactattatttactgatgacttcctcattcactttctgttttttatctaaatgccagccttagccttgttcaaggtaacagtatacaggaaatcatgggtttcgagcatgttttgtcaatatttagtaaaatgcgttcatagctattattataaagactttaggtacattcctgcaccacttaataactgaatcaatctcctttcatcagggggaacaaacctgtctttggctcacactgtttgaggatataaaaggaagcatacagtgggcctcattctgacaaatttttagtaaatcacaggttgcctttcctaaatccctcaatatgatggctagtctgtttcatagtgaataaaaagtgatcctggatgaatgaataaagtgaaattcagataatttttctcaaaactgaaattgtttaaatcttcctttagttctcttttttctgcctgccccttctttcatataccctgtttttcacctcttttgtctcagtcccatctgatatttgaataacaatatgtaatttcaggtttaggattgttgatctgtaaatctcagcctagtgctttcaactcctggctttctcctaagttcaccctcctcccttccctcctttctgtaaggactctaaacgattgcgcttcattaagttatttttataatgagttcctgttaccagggaatacagagttaaaaaggtgatctcactaaaagtaattagcataagacctgctggacctgtagaagtgactggatggtaatcaatagcaatatgattacacccatgcagcaattataaattatttaaaacactacccctaggttactgactagttgcctttaaattaaattctctgtcgataattgatgcaaagaattaatgtgagaacaccttcagttactgcaactttttcaaggtggcataaaatattgaactattgcccgtcattagcagctaagctgtctgtttgctctaacatccttcttttctaaattggtcaagaaagagtctcagatcttgaaagatgacaaatgatttcgaatccactgctgggtattcttctaagagcactgaaatgtcccagtgagaaatttcatatatgaaggcaaaggaaaaaaaaattaaactttaaataatgaccagttatacttcatcaactctaacaaatgaaggagcagagttggttttccggagtttgcttcagttctttgatatggtcagtgtaggtcggggaggtcttccctagcttgagaaatcataacctaggatatttaagctgtcagtaatagtgttttaaaactccaggcctataataaagtaaaaagtgtgtctgataaaatgggtttttttccttgcttagtgaatgtcttctgtttctcgctaaacattgtcacttgccaaaccatgttttctgtttcatactaattttctactggcagtgagaccagcggaatctaagaaattgcatacgaaattcaaggattggaaagaagaagaggaagtcaaccattagcaaccctagctcctctttaatctcaagaggcaagaggtactcgatgaaccacatgctaaaataaaaaaaaatgaaccacatgctaaaatcaaatggcttctgcacctgtgtgcgttcctggactctggggtcacaggatggctgatgagatgccttcgagaaattaatactctaatgagggaaacatcctttcatgttggtgcaagagacgttctaggcctggttctacctctagttggaacggtggtcatggacaggtcacccccgctgtccagaacacatgtcaagaagtgggagctggacgacaacattcttgttcagagcgttcttcctccacattttatccaaagcagctccacttttacctgtgttatctactgagattctgcgtgtgtgaaacacaaggtcacctgccaaaagcaaaacaattaggccagcattgggctaggtgaggatccattgtcttttgggcaggtgattgtgatactataggagccggtgtcctgttgatggcatcccacaactttctaacctctgttgtagagttttgttagccacgatttggaccaacctgcagttaggccaagggctgctgatccaattggattaaggaactctgctgtttgagcatgttggcttcattcattggtatctcctacgccaagtcctaggcttggttacaaagggcaatgaagggtcttttctgtccttaagcactcacaggtagcttaacagtaatgccttggattccttccttcaagagcgacagcaggaagcccagcttctctggtagcagagcaggggtcctcaaagcagaccgtgaggtcagaggagcactggagtcaggagtttccatctccaccctgctgagtaaactgtagttacccacacagaaaaggaggctctccaggctgacagggtcacaaagacacacgactatgagatggaatgactatagctagaaaaaaaaaaaagtggggatgcccctcttgaccatcttatgcctgaaataagggaagacattcttcttttttatctgccaacctcccagtgccacagtaagcacagagtcaggcctcgaaaaataccagtcctttcgcctgtcccctctcacatggtttgaatccaagaggctgtcataccaggctcccccattcagtatattttctttatgtttaaatagtttggattgacttctcttttcttttatttttctgttgctacttaggaaaccatctccaggctagaacaagtgcctgaaatagagaagggtgaggtcactgcctaagacacttcctcctccacccactcctctctcagactcagctccttccacttctgcccacatggctgccattttaatttttgcttaaatgttgcagccaatatttcatgtattgttgttttcttccttgcctgggagactcttttgtctgaggttccctggtattttccaggggcccttctagcacttctgtgaactcattagcttccccttgttccagaaaatgtctgtcatacattacgtgcctttctctgtctttccctgcccctctcaccttcatcgatcacacttttgcttcacagaggtaagaggaaatcacactcacacagtatcttttgttttctagcaagctagaacacaagattttctagatgcatcttttgagttgatatgcaatattttccttgacagatttgttaccagctgagcagatattgtgtctgtgatgtatttgagtaccaggtatccctgattaccatagagtaatgtcttttattgaggcttttattattattattattattattattattatattttgagacagggtcttgctttcttgcccaggaaggagtgcaatagtgtagtcatggctcactgcagccttgacctcctgggctcaagcaatcctcccacctcagcctcctgaatagctggagctacaggcaagtgtactgtggcaattgttaatgttcacttttatttccatagttagccttgatcgtttagttttaaagagttatacaacacatacacacacatctaattgttgtgttattgggttaatgggaatattttagactcaagcctggttctttgcttctctccagcacagcaaaggatacacctccaagtataatattgaacttcaaagttagtaatgttcagtgatgcttaagcatgtagatcataaagtcctagactattttttgtctaaattattgtttgtagtcagcctctctactggttggaaacacaggcttgagtttggctttctgctctacctagttcattgctgcagctgtaatccagcctgattctaattttcaactggagatggttgtcttcttttttattccatgaaacaaattgattaatgtgtcgagggagcaaggtggtacttatacctacccagcctgcttgtgtgtgtctcaaggtggagagaggctgtggaaacaatagagagaatagcatggaaggccacgttgcaattaaacaagattgggaaagaagacgggactaaaatcatgccttgaagatgtttatcatatgaagttgaccttgagaccccaagaccggcttcagttttccacaatgcggctattatgagaaaaacagtgactaactgagcactgtgcataactcagttctcggaattttcaatcagaaattatctgatgacgggactaattcttattacgatagttccaatggatccacccaggatccacctccacaactaggtgtacagaagctggagatcccatcatgccgccgggcaccggtttacgagaactctatgtcttatcttggtagtacgattaggaaaacaaacacaatggtttctgccttcaatgtttccatggtgagggcagttattaggcatatgctaaagtgtaatatccgctttttcaaaccacatttcaaagttgatagcatcaacggctttaaaatcacttttaaagaatctgggcttacccagttaacagaaatagaacctgcctgtttatcagtgggtttgcctcacttttctgtgggtttcttttcttttcttaattatgcattaagaaaataacttaagtttctgtgcatacaacatcttcctttctcattcccagtaccctagaaacacagccgttcactgaagaggatttgagtgttgtctcctctgtggggtcaaaacatcatgcttctttctgttctgccccatggcagtggtgacgatggcctagcttccatcccgtagcttcttgtgtttttctattccaccagtctatcaaccctgtatttgttgtcaaatttacactgtccacaggcaaagatctattctcctttagaatttaataggagggtttggaaatgatgccatggaaaccctgagcagcttggcaatgctgaccccaaatgagaaataactatcattggtgttttccttctactactattatcttgcccattgatcttcaaaaagttcattggtcaaattgattgaggaacgcaagacttaaatgtaatatggctctggcaaattctgagatgctaacaaaaacaagttttcttaagaacaatgtcaactgactcacagtatccgactatataaagtcgagtgctctcatgccaggaagctgatacagttcatgaaacctcagtcattctttcgtattactcctgtcttctctttggaaaacaatctcatgaatttggtcttgacgctgacttaacatcccaggaaacagatactcaattccactgtcttttttgagaaatgaacagttctcaaactttgtttaaatttccttttcacagatgagtaataaccaaagatatttctgaaagggctctgaaaacatgcaggcaattgatctttaaaaataagatagaaatagtaggttttataaaagaaggaaatagaaatacttcagaagaaataaagtgtgctgaatcatgttttaaacataattatatccggaatgcacttacccatttgaaaaaaaaaaaaagtcaccaagttgtttccaattgtttttgtaaatttgcttagtcattttcagagacaaaaatttgggaaaaggattgtagaatgactggcttcccaaaaccacttggtgtttacaaagttatcaaaaacgggctgggaccactgatggtaataacaaaacctggggccctgaatcgtgtattctacatccgttagcacactgaagccacaccgcaaacttgtgaggccagcgttgcttcccctaccccttccgtcaaaaaccgtctgaggctgatcattaacttgcataaggtcacatagctaatgagaagcaaacgcatcataatgacctgggacatatgacactgaagcctactctctttccacaaagcttgatgtactcagatagtaattagtaaacattttcataaataatcttaaccttttcaagcatttttgtcgattggattgtagcactcaaaagtaaggtctgttttactaatataaaattgggcctgtggaataattctcttcacagaagtgtgtgtgtgtgtgagagagagagaaaatgtatatgcatacatatacatatattattgagacataatttacataatttatgttctataaaattagcatattttaaatatacagttctctggattttgaaaaatgtatacgtgtacataatcatggatccaccaccccagttaagatatagaacattccagggccaggttcagtggatcatgcttgtaatcgcagcatgttgggaggctgaggagggtggaccacttgaggccaggagtttgagatcagtctgggcaacagggtgaaaccccgcctccactaaaaatacaaaaaaaagaaaaaaaaaaagaaaaaaatagctggccattgtgacatatgcctgtaaccgtagctactctggtggctgaggcttgagtatcgcctgggaggcagaggttgcagtgagccaagatggcactgctgcactctagcctgggtgacagtgagactgtctttaaaaaaaaaaaaaaaaaaaaaaaaaaccaaaaaaacaaaaacaagaacattcccatcacgtcggtaagtatctcattctcctttccaataaatccttttattcccagaaacaagcattcttgtttcaatcattgtaactttgttttacctgttctagaacttcatttaatagaaatcatacctactgctttgtatgtgtcgtcttctgcttaatgattcacataatgtttttgtgattcatccatgttgatgggtgtattaggggttctctttttcaatgctggatagtatcctgtggtgaaaatacaccacaattcgcttatctgtgcacctgttgatgagcattgggttgtttatatttgttggctattatgaataaagctaccacgaatattcataaatcctgtatacatgtttttatgcccttatgtttttatgtatttttgataaatacctaggtgtgaaattattgactcttagtgtttaacttgtaagaatgctgccaaacagttgtctaaagtaattgtatcattttaaccccccgctagaagtgtgtaagagtttatgttgcttcacatcctcatcagcactttgtaatttcagtctttttaattatagcctttttgtgggtgagaaacgctatctcttgctagttttattttgcattttcctagtgactaatgcctctttttatgaactcattggccgttcatatattttctttctgtgaactgcttgtttatgtattggccattttctaaaaattagatagtctttttaatattgaattataggaattctatatatattttggatacattctttttttttcatatgtactgtgaattttctcctttgtcttgtctatttattccttaatggtgtcttttgaaaagcagaagttataaatactgatagtgtccaatttatctttttcatttgtgtagtgctttcttgttctaagaacctttaccaatcaccaggtcacaaaaatattttcctatgttttcttctagacactccataacttcaatctttacattcagatctatgttccatctcaaattaatttttgtatatggtgtgaggtaatggtagaggtttatttttctctccataagactctccaattgttctagcactatttgttcaaagactaatcctcgcgctattcaatttccttggcatctttgtcaaaaatcagttgactatatatgtgtgggtgtatttctagactgttgtactccattgatctaattttttttcttatacttactgctcgattgcctggaagctaggtaataataaggattcaaactttgttctttatttcaagattgtttgggttagtttagatactttccttttacatatatatttcctgatcagcttctccatttcttttaaaaagccttgctgggagtttatttgctttggtattgaatctcttgatcaatttgaggaggatcaaaatcctgaaagtgttaagcgttaccatccatgagcatgcatctctccatttatttaaggcttctttatttataaacatttcagtgatatttgatgattttgaatgtggaggtcttatacttttttgttaaattaactcttacacatttgatttttttatgctattgtaaatggcattataaaatttcttttttccaactgtttgtttctaatatatagaaatacagttgattctagcaaactgctctcatatcctgtgatcttaaaatttatttattcaccttttcctttttgttaaatagattctgtagaattctctacatctctgaatatagttttacttcttctccaatttttatggcttttgtttctttttcttgttttaatgcactggctatagcctgtaggacagtgttgaacagaggttttgagacagacatcattgctttattcaggacttctctattatatgtgatgctagttgtatgttttctgtacctatacttcattagattaaggagtttgaatttatttctagtttgctgagagttcttttataaatgtgttcatatatatatgttttatatttttcttattcttactatctgcatattagagggagtttagctcattggttaaaaggatttgttccggaaacctaactccaaatctttgaacttcctagaaacctggcctgtttatttaccccgtatgtcactttcctttatctgtaactggaaaatgtgtacgaagagcttaatacaatgactgatacacagtgagttctccataaatgttagttattattttaatattacagcatctgtggaaacagtgggtttatatttcagcgtcctgagaaacactcatcctgaacaacgggaacattggccacatccgccattgtcaattttaaataaaagatatgatgactagttggtgagttgatcttgtaagacttttacagatacccagaacggctctacttcttcatattccactttttagttttaaaagtttaaggagatctctgtgatccctgaagaattgtgtgcaaagcagcattaagacgaaaatcttttatatttgtgttgtagcttggaaaactagcgcgtggtctgttttgttccactggctcctaaggttcaggtattaacataaatacagcccattaacacttgttcctctctgtcaggacataaattaagtctgcaggtgttccatgaagctgtacccttggtactaattaagccttgataattaggtttgttaaattcaggactttaagcttatattccctccttgggctaccaaaacggagatgtgcaatatacaagccctcctgacttttttttttttttttttttttcctgcagagagcgttgctgctccttctctattttatttctttattactgtttttttaaatgaaggagtcagtaacaaaccgttcatcattttgccagagtagggtgtaaaccttcatgcagacctgtacatttgtttatgacgagattaaagtcttttctcctcctgttttgtgtcagctcagacactgaaggggaaagtttccagcctggtttctccatacactgaacatgttgaaatctatgccttaagcccaaatgagctgtcactcaagtatgcacgctcatattattaaaaactgtgcatgtaatttgctgggcacccaaataatttgttttttatttttccttaaaaatgagactttctgttaggaaagtgattcatgaaacagtgaagatcctgcctcacaactttcaagaaacccacagaggtccctattcacataagaattttctaagcagaggttccaatttggatatttcgtggccttcaggttatttgtaaccagtacacaaaccacaaagtcataatcagatagattttctttccagcctgtctttcctctttggttgctttgtaaatctattactcatcagatcatatgtttggcaaatgccacttttcattttgaatcaatggaatcataaaaaacaattctactagtaccactttcaagaatattcatagtggtcatgctaacgtaataacctctcttttttatttgaaggatattaaataaaattgtacttttaatcagagcctttttttgaaaaaaaaaaaaaagaaaaagatagttgatattgtgggagatggctacaatacagattcatcccatattctctttaatgttctattcccaagaagagcactaattaatctctctagaagggtaccacagtttccatgagcgttcatattttgaagtttccaagaacatgttctacagaatggaccactgctctcttttcagacccaacccttgtatcagagtttgcacacatctagaagttccggttctcccagtcattacctttctccttcaagctgggattcagagtccattttcatagggcaaaatgcagagttcgggttccttcctatccatgagagtaggtgctgaaggagataaaggaatgaagacatagactttgaaagcaatagtctggcaatcatccaaaggtttgtgggaggacaaaagatcacaaagtatgtgtttgtgaaaataagactatgtcatgaaagctttagaatatccaacacattatagaatattttcacggaaatatttcggatggaattttggctttaattctttctctttttttcctgttcttttccctctccccacaaccacttctgtttcattttctgttttgctccttcttttcataagtagctggtagtcagtgttctctttttcttcctgtgagacaggatctccctctgttgcccaggctcgagtacattggtaggatcttggttcactgcagcctgtgcttcccagactcaagtcatcctcccacctcagcctcctgagtaactaggaccacaggcatgggccaccacgctgggttagtttttgtatttttttgtagtaacacggttttttcatgttgcccaggctggtcttgaactcctgtgcttaagcgatccacctgccatggtctcccaaagtgctgggattacaggcgtgagccactgcgcctagcgaggtagtcagtgttctaaacactggtgtacaatccaagtctgtcgctgcccaggatagaggagggatgacgtgaattcacacgggcctctcctacaaatctgagtgtacatcaagtgaggggcgtccctccgcacctcactgttgggctgatcaatcccattcccactccattatgtgtgtatttctaagtggcagatttgccttaggaaatggaagaaggggatgaaatagtgaccaacacaaattactgggttggcgggagttgagagctggcaaaatcgtcttggagaaggaaatggtgcagatttcagagctggcagacagcatctacatccacctctgcaggaagcaagggaaacatttttcttctggagaatcgggcagcctgcagctgatccggtggtgtctgaaaccatcctgtgtgctgtagtgtcaacaacttagcctggttactttgccaccaaaccccaccaaatgcctttgtatctttttcagaactgcatctctgcagcataattgatattacaggaatgaaaagtgttctgaggcatattattcccagggtaaagagtcaccgctgattaattacctcaaggacaaggggacggtgactttttctcttgtatccagcagcgccacgcggggcgggcgggagaggcaaggctaagaggtggatgaaaggctagggttaaggcatttcacaatgtcaggcatcttgttagactgcggctttccaggccttcccccgtgactgctgcgggggcctaggccaaagatatgcccgagtagaaaatctgacaccagcttcccagttttctcttctgctctctttggctgcaacgcttttaccatgggtaaaccattaggccggctctgcagggagggcaagaccacagcagctcagtatttcctgctcagggaaaaaggccaggtcttttgttggtggaaatccacttttccatccactgtcttctaagaatgaaagtaaatctgttgtgctttcctctgccctgtcctcaggcttagccttagtgggcctggtttttgcccccctccagttttagcttcccatctaaaatacaagggaaaagacagcaaggacaggacacttcctcctagtgtcttgtaaagctgcaagggagtcgcggctgagtcgaggatccacattcctggatgagtccttttgttaccagcggagggtgtccgggttcttggcattttgaagaaatagttggacaaaatgcacaaacaaagcaagagaagaatgaagcaacaaaagctgaggtttattgaaagcaaaactacactccatagagtgggaacggcccaagcagccactcaggggccctggatagagaatcttctggagtctaaatactccctagatgtttcccattggccacttggggtacaccccttataaatgaagtggtggcctgcaatcagtcttattggttgcagaaagcaaccaatcagaggctgaagtgaagttacaaatatcacactcctatgcaaacatctgattggttttggaaagcaaccaatcagaggctaaagtgaaattacagagttgctcttttatgcaaacgaagactccgcctccagtcagtatgattggttgtgggcagcaacccatcagaggctgaagtgaagttacaaagttacactcctatgcaaacgtctgattggttgcaaaaagcaaaaccactcagaggtactttcaatttcccatctgccctgcagaaaaggtaaggggttgcaaaagagtagcccctcctccttttgttacttaggcgtggaaagttaagggtttcctttcagtttggttctaagaagtcagagtgaaatggctttagattccctgcctgcagattctattccccagcctcactttgagaagcacctggacacttcgctctaggcacgtgtcttcttcaagctgccatccattatgcatagtacaggagctcagaaaagtcacccgtgggttcctttctagctcaatcatgctgagagtccagtccatttataacataattcataaaggaacattctatttagttctcagaactctgtggcaggggactgttgttattcctcctttacagaggtgggtctgaaggtacagagtggataagtcattttctccgggccagccacacagcgaatgaatggagactccttgtgtgtagtaaatggctgcagccctataagctataatcatatatcatcaacacctttaccctgttattaacgtgtctgaaattagggaacaccacgtacaaaagggatcagggtccacctttctgaagaaaactgcagagcttttgcagttattaaactagcaacagatgtaaagtccaactgttagagtttttctttaaagcagaagttagcagttacaggtgcttgtgatgtcatcacttagatgatcttataaatgccttttttttttttttttttttttttagtcggagtctcactctgtcgccaggctggagtgcactggcatgatctcggctcactgcaacctctgcctcccgggttcaagcaattctcctgcctcagcgtcctgagtagctgggacaagaggagcacaccactgcgcccagctaatttttgtatttttagtagagatggggtttcagcatgttggccaggatggtcttcttctcttgaccttgtgatctgcctgccccagcctcccaaagtgctgggattacaggcatgagccaccggcctggccataaatgtcttttctgggtggggcatggtcactggaaatgtaaaccctcccttccccaggtcagcctgcctcccaggtgttggtgctatgattacagtgaccacataatttatcatccacactggcacctttttgagagaggttggggagcaggtaattatgctgggacaataggcgtatgtcaagatatctggtcaccctatctatgatctgtcacacttagtactttctaaaattctcgggcctttgcaccttctttttatcaacacttagttctatgttactgaatatttcttaattaagtgcaggaaagaaaataaccattttttctccttttaaagaagcacacacacctttcttttattggtattacattccttttcccagttggtgcccctgttggttttccaaattgtcttcccatccttatcctacctcccaatagagtacctcatcctatagtgttattataactacagaaaatatattttcattccttccacttcatgctttcagctagaaatgtgagtctctgagacttgtattcttggggtcacttaaaacatattgcataatgaggccttcaatgactctgatttggaactgaccctctatgaggggttatacccctggacaccaagctgctggcctgagcatgaggttgatggccaatctcaggagaggaggaggaagaggaggaggcggagaagaaaattgcgtgctaatttcagttgtatattgagcccacacatatttacttccaatatgaagcaaatctaagaaaaattctgctttaaagaaagaaatgtaaatcaagtgactgttgatggacgcttggaagaattcttatttatttatttttttggacaggctttcactctgtcagccaggctggagtgcaagtggcccaatcatggcttactgcagactcaacctcctgggtgcaagtaatcctcccacctcagcctcctgtgtagtggagaccataggcatgttccaccacacctagttaattttttattttttgtagaaatggggtctcaccatattgaccaggccggactcaaactccgagatgcacgtgaatctccagctgtggccccttccaaagtgctgggattagatgcatgagccacctggcccagccagaatccttccattaataaaaggatggaccatgaactcccttttatgatatgagccgatcaaatgtgagcagaatagtatcctatttatacaatgtagtttaaaaccaacttcttagaaccatgagctaagggggaatctggatttcaaatgctagttgcatcaaacacgtttccaccccctcaaaacgtggcccaaagtcattagtgtcggagcacccagccatccttggctccttcccacctatgttgattaattaaaggacccaagagctaaaagggagaagtagctgcatgcttgccacttagtaatattttgataagtatttttgggatgaatgcaatgatggatgaatgaatgaatgaatgaataacataggctacagtattttgtcttcttggttagggaccttgagtaaactgaggagtctgaggggaatgccatggaagtctgtaaacccaaaatcctcagcgaaacctcagccatctagggacatctggggcagcagagagccactggtgtggtgagttatctccctgggccttgagatagccatgctgttttgtctccacaaggaagaagtaggaggcatagcccaaggcagcttgagaggaaagcctcttggccttgaataagatgactttgttactgggcaaagaaagcccggctggaagtgctctttgatatgcaaatatagcctgataaggatttcctctccttcctactttccctccccaaccctcccccaagctaaaattctcttcccaggagccctgtcatcagcagggagttttctgtctttgtccccatctcttcacttgtgctgtgcaaaatcaggccacgattgcagggtagtccacggcttccaaagagaactgcataaatatacatctttcaggggaagagggagaacctggagaagtcaggagagcaaaaccatgccagtcagcttcagtgatgataaaggttactgttggatgaaagtttgcattttgttgtggtgtgggaaggaccttatcctgtcagctctatggatgtgcccagtttaagctctgaaagttcctttaacttgaaattgtttttgatcatgtgacaaggtcttctgaccctttatcacccacagtgttttattcatttgctctaaaccagcagtaggtgaagttaggaataatatgtcaagcttcctaactccatggtgctctcattgttgtgtgtgtgtgtctgtgaataaacacggaaataattacgcaaataagctattggcaggtggtgataacgtaaccgcccaatgggttcattctgcctgatgcccagataaagccgatttatctagacaggggaattgcaatagggaaagagtttaatgttggtagagccagctaaacgggagactggagctttattgttactcaaatcagctttcctgaaaattcagagactggggtttttttaaggatagttttgtggacaagagaatgggtactgctgatgggctgtggatgcaatcataggggtgtgtaaaacccttgtgccctgaatccgcttctgggtggggggcagggcacaggaccagttgaatggggatggggctaccagtcctcaaaaatgcaaaagccggaaaagacatttcagaaggccaaccttaggttctacaaagtgatgttatctgcaggaataattggggaaattgcaaatcttgtaacctctggaataatggctgctaatcgtttatgtccactctttagcagaattcaggctcctgtcctcctcctaacttggtggtcttttgctagctttacaaaggcagtttagtttgggggtagggccattatcatttaaattaagtactaaatatccccccaaagttagcttggcccaagcccaggaatgactaagggcggtctgaaggttaaaggcaagatggggctaggttagatcagatctctttcacggtcataattttcttactcttacaatttttgcaaaggcagttttaataactgctatttagcaaagacagttgggtaagttactagagggagtattaccttagatggggccaggagggtttctctgaggagatcccatttcaacagatctagaaatgtaatggagccagtcctagggaaacaggactaccaggaatcctcaccagccccgcaaagacgagggagcagcaagttccaaagcccgtggcatgtcaagggtcgatgaattcaccaactgcaaggggctttggtgaccccagtgaacagatgagaaaggggaggaggctgggatcagtgcacagctttgcaggctttgggaaggaatttcgagtttatctcatttgtccaggtatttggatgaagccctggcatactaaccgtatgaaagtttatagttcccaaattgcaggataacaaggctctgtaatcttcatttcctcaaagttttacaccaggattctatggccaagtgtgtggcagtgtcacaacttaagagccagtgtaattgcccaacgggttctccttgcccgctgcctaagcaaagccgatttatcaagacagggggattgccataaagaaagagtttaggtccaggcacggtggctcatgcctgtaatcccagcattttgggaggccaaggagggtggttcaactgaggtcaggagtttgagaccatcctggccaaggtggtgaaaccccatccctactaaagatactaatattagccaggcgtagtggtaggcgcctgtaatcctagctagtcgggaggcagaggcaggagaactgcttgaacctgggaggcagaggctgcagtgagtcgagatcacaccactgcactccagcctgggcgacagactgaaactctgtctcggaaaaaaaaaaaagagtttaattcatgcagagctggctgtgtgggagaccagagttttattattactcaaataagtctcccccaaaactcagggatagagatttttaaggagaatttagtgagaagagggtcagggaatggggagtattgattggtcaggtttgagatggaatcagggagttgaagctggcctcttgcactgagtcagttcctgggtgggagccacaagaccatatgagtcaatttattgacctgggtggtgccagctgatccatcaattgcagggtctgcaaagtatctaaagtactgatgttcggttttaccatagtgacattatcccctggagcaatttggggaggttcagaatcttgcagcctccggcagcatgactcctaaaccctaatttctaatcttgtggctaatttgttagtcctgcaaaggcagtctagtccccaggcaggaaggttgtttattttgggaaagggctgttatcatcttttgtttcaaagttaaaccgtaaactaagttcctctcaaagttagttagtcctacaaccaaatcaactttgaacaagacagcctggaggttagaagcaagatagagtcagttacatcagatctccatcaccttcataattttctccgttataatttttgcaaaggctgttttaataacagccagtcgttcatgtttccttgtgccacgtgattattttgtacagtcaacattaagagacaggcacttgtaaatgttgagatgccaagggggaaagaattttagaatccagatccgctttggtaagagtggccttcgagcctcatgtattctctgttcagctgttaagattgttattaaactttatggaccataaaccccacagaaacaaggaggttgaacaaccatgctattacacaagtgtcaaaacaggagctgtatttcatgtcctgaaaagtgtgcacggttggcctcctctaggtcccacgtgccttctggatggttttaaccctcagcctctctttggcctgtgagtgaaacccatcatttgacacagaggctttctggaaatgatgctcctcttagatgaaagttccctttcagaaatctttcattccctgacctctgtgtccatcccactaatatatttcttaccaggagtacatagtttgttctttaagcaaaaccatatgcatcgtattttaaatggaacagggaggttgttccatgcgtcaacttagtccaaatgtagagggtcaggaaaacagtgatatgagaaaagggccagttactgtctgggaatccataaatactgcttggcaaatggcacattgcatgcttattccttaggcatccgtttagcaaaataagatgtcaagctaattgtaatgatatttctggggtttcatcttctctccctggtacataaaagaatgcaattccacctatattttgatttaagatcaaatttttgcaaagtataattacatttgatgtaattgcccatgcaacccagatgtcatatatttatgttattattatcatttttcatgtgtagatgtggtgatcgtttgtgctttgttaaatattcctcgtctgtccttctggggatgatgctttttctccctttttggtcaggcatagataggtgacttgctttagccaaagaagcatgaactgtcacttcaagggggagatttacaagccagtgcaggtggattccctgctttctcctgacatcatgatcatggactcacatgacaaaatggatcctccatcttccagcatctctgattgagactaacaagggccctgacagccttttctggacttgtagtatgtgcaagaattaagctttttctgtatcaagtcaccgtgttatgggggttgttcctcactgcaggagaaccttgttcatccgtattagaacagtgtggtgtttcatgttagcagagtgtatcaggatcttttgtttttttttttttttaaattaaggatgctgtatgagtcttttctcatactactgagaaagacatacccaagactgagtaatttataaaggaaagaggtttaatggactcacaattccacatggcggtggaggtgtcaccattatggcagaaggcaaacaaggagcaaagtcacatcttacatggtggcaggcaagagaacttgtgcaggggaactcccctttataaaaccatcagatctcgtgggacttactcactatcacagaaacaacatggcaaagacccatccccatgattcagttacctctcaccgggtccctcccatgacgtgggaattatgggagctataattcaagatgagatttgggtggggacacagccaaaccatatcagatgcaaagttatgcatatgttgatcagctcaatttagcctttccatcatgtttacatatttcaaaataatgtgttgtgcacaatatatatgtgcaatttttgtcaattaaaaataaattaaaaaaattaaaaaatggctttcccacagcctgtcgacttccatccccatgtgtggctctccccagggcctcccttcttgttctccccagttgcagacctcagacaggagtctgcttgtcttcctaggcccttgtcagagtggaaggtggccctccaccacaccagcccactttccagttatcaaaaaggatctttgatttaatatttccagagcaattttggtgatttccattcaaatctgttttttgtcataactaccttgcttgcctatgggacatgttcccatttcagtgcatacttgacctttaccataaatcacatatttgtaaactgtaccctcctgctgttttattaggcatggagaagcagtcttttctttttcttgatggcctgggttgaccagatcctgacttttgtggagacattaaagtgctagaaatgataatggtgaaagattcagaagttgaaggagatataaggagagaaatggacaattcttttggtaattgaatgaaataagactcttaggaaaattctccccagtggcaatgttgtaagaaacaccaggccgggcacagtggctcacacctgtaatcccaacactttgggaagctgagacaggcagatcacttgaagtcaggagtttgagaccagcctggccaacatggttaaaccccatctctactaaaagtacaaaaattagccagacgtgatggtgcgtacctgtaatctcagctactcaggaggctgaggcaggagaatcacttgaacccgggaagcggaggttgcagggagctgagatcacgctgatgcattccagcctgggtgacagagcaggactccatctcaaaaagaaaaactcaacgaaacaccccagcttctatcattctcaagcttagtgtgtgcaagactcatggatgctgcttgttataaaggaagataaattatgaacaggcagactggtctgtgaaccttacccagaaaaatacacagtagtccagtatattggcctccagggcaaagctacctaggttctgagtccaattatggccttcatgagtcttgtttctttggacaggttttccagtgtctctgagcctcaacttcctcatgtataaagtggagatgatgccattacaggttgctgctttatggcacataattaatactagctcttatttataggaactgaacaaagccccagttgttttgaagcatgtcctatcattaacacaggtaatcaggatatattcattgaagtctcactgtgtgccaggcactatgctatgcaccttatgtgtgttattttatttcatccttccagctctgggaggtgatgactgtcatctgcattttgcacatgacaaatctgagggtcagagaacttgcccagggtcacacaattagtagatggcagctcaaggggtttttgcctgcgtcttcacccaaagccactaacacgggatctgtcaattgcattgctggtgatcaagaaatgccagctcctccgctcttccctgagtgccttgttggagacaaaaccagcagggttatatccccagcactgtaatttagtgtggcagtcaggggaaaacaccttgtagaatttcatttcttatcatttaatgtcccctttaattctcatttaagttcccctctgtaaaaggcagtcccttcagctctcataaaactttatggtctttacttgtgattaggcaatggtaaaattgattctctaaaaccaacttctagtcaagttatgtaattagccaataagggaggctgagagaggaagatatacaaggttctccctcaagaggtcagacgtattatcattggttagatgccgtatctttaaaacaccatcagcttggaaaacactatccattagcaagagatcagagcaagagaaacctcgaagggtcgaacggtccattctgagggctccacaaagaactcggcatcccagaaggatgattagccttccatctctcgagttgtctcagagcacaacaggtctgagtgtttttttctttaatgaattaaccctttggatttcagccctagcttttgcttcccacatctgacatcctgccctacctcctgccagaaaagattttgatttcgatcatggcagttgctgtcgctgaggtaatatgaggagatccgagacctcatccttgcagggagtgggcttgagataattctcgttacaagtttgcctagtgcttcacataagcagaggccccaagacatcagcaagcccgttttttgcctcttcctggttcatggttagactgcatttttgagcctctgcctgttaggtgcagccatgtgcctgagtcttggccaatggactgttggaagacgagacgttggccccttctcaacctgacctgtaaaaacctgtcttgcaaaaccctcacggctctttcccctgcagtcttgatgtgaacaagcatgatgatgttggaagccatacacaagctggatagagccagggtccctgagttcaccacccagagcaaagtcacttgtcgatcagaaatacagaactagttttggacttgatgtgagaaatcttttactgtatcatagtagcaagcattaccccaaccaatacctgtgctcatactgctacagttttttttttttctttttagtgactgggtcttgctatgttgcccagacttgggtgcaatggtgccatcatagctcactgcagcctccaactcctaggctgaagccatcctcccaccgtagcctcctgaatagctgggactaaagtgtgcaccacaatgcccagctaacttttgtattttttgtagatacggggtcttgctatgttgtccaggctggtctcaaagtcctggcctcaagtgatcctcctgccttggcctcccaaagtgcttggattatagacatgatccactgcacgtggcccatactgctattccagacaagaaattgtaccaggaaattcactgatattattggtccatctgaggatcatcagagatgaaaatgagatttgacaactgcatttggaaatggagtatgacagtatcattctgatgtagggaggatatcacctcacaggagtctttcctggctatcctgtccaaagtcactactcacaatttctctatcccataactctattttatttctctgtctagcacttatcactatctgatattttctgtctatccatccgtctattcattcattcattgctaatttattagtattgccttcccatgaactattagctgccagagagcagggacctcatctgtcctgtccactcatgtcttcagcacttagaacagtacctggcatataggatgagcttcagaaatatttgcaggtgagtgaatgagggagtgaatgaatgagggatttgcagcttgaacgctgtactttgaaacagttccagattcatgaaatttctttttaatgcagaagatttcttatgtgattaactgaatgggaattgatgctttgtggaatgaaatggattgagtacagagtgtgggatcaagaacttttaggcactgtgagtataagagggaaaccaggccgggagcagcggctcacacctgtaatcccagcactttgggaggcggaggcgggcagatcacgaggtcaggagatccagactatcctggctaacacggtgaaaccccgtctctactaaaaatacaaaaaattaactgggcatgctggcaggcgcctgtagtcccagctactctggaggctgaggcaggagaatggcgtgaacccaggaggcggagcttgcagtgagccaggatcgcgccactgcactcccgcccgggtgacagagcgagactccgcctcagaaaaaaaaaaaaaaaaaaaaaaaggaaccagatggccctgcccttgagcaggctgtggtctggcctggtggagagacagagaatcagttaattccagggtcatgtattaggtggtaagatagtggttcacaccaaaaacatagaaaatgatcacttagcctgatccacaagttcaggaaagggctctgagcaggagatggaagacctcttggctggttaaatggagatcaagtggcagcttggactcctgctgcaattaaaaaattactctccagttttcttcatgtgcctccccattcactccaccaccactcaccccaaatcagatcatgattcatttgggttgtaccgattaagagggttccctttacatgaccattccagtcatgaaacagagaatctggtcacctgtcctttatcttggctggtccaattccataagaagtaaatgctgtgtgtctgcgattcaaaagacccctttcacgggaggctgggagatttttccatctaaatagcttaattgttactctacagggcaatcataaatgtaaatcgacttaatatgacttgattgttagtaatgactgtccctctaatgacgctggccaatgagcctacacagaatgtcgcatgcagatcaatgagccaaatgttagcaggggactgggcatttgaagatttaaaaaaatgaaaaattgcactgtgacattgctggttcctattagcaaaataacagacagtgttatcagtcattgactcagaagatagtttcttaccgtttggggaaagtgcttgtctattcctctccaaagccatttaaaaaaaaaattgcaccagttctcatcccgtcatctgccttgatcaaacatttgcttattggaatcacttcgaaaaggaacttggtatcgttcacatgtgtttataactctcaaatcttcttcttccaatttttaatcttgatcaccacagctttataacaggaagaacgctcaaagaagaaaaatagaagaagcctgaattttaatttgctatttcttcacacacaaaacaccccaagctcaatcaatgcccagaaatgaaggccaatagatgatagtggggcctcagatttcccacctattgttttgaactctaattagggaaagggaatttggaaccattgtcttctctgagtgtgcagacacgatgctatcattgtgtttacagaggtggtcagattcccagcacagtgtactcccgcacagataaccgtcccatcttgataaaacaatgctctcagccgaatcctaaacacgctgcacaaggaagaccttatgctgacagtagggaggaagcgacatgttaacaaacaagtttgccggccaggaagttttaatcagcgctttctactgcagggggtatgatggatggagaccctgtttcagaggggtttcctttagataaaacaataataccatgctttcaagaagctcgttcgacagctgtaaagctatgattaatcccccaaaagtcaaacatgggaagactggcaagatgagattattcactgggtataattagccacaattatcgctaaagagaatttggggagattctgctctaaagggaaaagctttgtaaaggagaattaccagtagagtgaccttataatttaccatccaatggattttgaatacttctgagagagaaatgagatactgataataattataccaagacaacagacataaattgggattggcctagacgagcaaagatgaatggtcattctgtctgttagtaaaattccatcccaggcacaatatctcagacttgaaacaaaataaaagtgattctttctaggataaactctaaactaagtgtctgataaattctgggaaagtttatccaattgttacaacccagggtcaggaaaactgttttcaattttctgctgtatgaagttgccagtgttaaaccctttcgatagcaagtagaagaaatgttcattcaaacaggcttaattaactgaaagatataggtgtggtaaggggatcaggtaaagcttgacccaggggctaaactttaaggacctggttcccctcttttcatcccttggttttatttttctcagcattggcaccattttgtgacaagctcactccttgggtcttatgacaaatgttgactcttctaaaccacatctttccagattcaatatagtaggagaagaccagacttgctcttttcctggaatttagtctgacgtggctgggacaacatgcccactctcaaccaatttttgtagccatggagatttggaagtctggcaagtcttgggtcacatgatctaccttacagctgttactgcagacctcccaaagctcacgaactgagagtcaggaggcgtggttcccctaactcaaatcagaatttcgttatcaaaagaagagagggatggttctgtggtgtcccacactcaaataaacatcctttaaatacctctagatgcttataattcctgttgcagccttagtcagtgggagccactgacctgcattcgtgtaggaactgagcaaggttcatctagtctcggtagctacctaccccgagagctggctgatttttttttccttaaatttaattcaagacttcatgaagtcaacaaaatggtctgttggaaattattcctaacccccaaccactgtcactgccacaatcaaacatattttcattcttttgcagctgcagcccttctacttgaactttcccactcattgcccttataacttgccatttaatatctcttgctttcctacatggctgtgactactcgtgggcagggactgtatctcctgtttttggtagtgcctccagaaccaaacaccatatgtcataaggtctattaataaatatctgctagtttttaaagtttgagaaaaacccgtattgtggaatgaaaatgatactgacaaggaatacatctagatcagaaatactgatatcctaagtgagatcttgttttttaaaacaaaaaaaagtttaagaaattgtcatataggctgggcgtggtggctcacacacataatcttagcactttgggaagttgaggcaggagggccacttgaggccaggagtttgaaaccagactgggcaacacagtgagaccccacctctacaaaatattttaaaattagccaggcgtggtggtgcatgcttgtagtcccagctactcaggaggctgaggtgggaggataggaggctgaggtgggaggatcacttgagcccaggaggttgaggctgcagtgagctgtgattgcaccagcctgggtgacaaagtgagaccttgtctcaaagataaaagaaagaaagaaagccctatcaaaattttaaaaaataaaacataagaaaaaaataaatggatacatgatatttgtacttctaagaggcatcttctatacatttcctgtttctctcttccttttcctaaggagtccttgttgatttgtggccatgaaacctctctcctttccaggctggcttcttacctaggtcgtgtcctatccctttattttctggcagggctggactgtcacttggttgttctcggtttcaggacccacgtcttttgtctctgtaatgaatgtgttcagaggtctctgcacagagaagctggctgttaagaaaactttttcttctttccgagacaggctgcaaaatgcttgttactattttgtgtattcctggcaggatttgtattcttagttttattactaatgataataacagttaatgttgaaatcagctccatcctgaaagcactgcatccattatcttattctagtctcaggccctggaggaattttctctcactatacccatttcagaaattccagaattaatgctcggaggagtcaagttacttgtctaagctctatattacagaacttaaattggcttctctctttcctttgcggggtctcacatgatccgtcgttccaaatatgagcactttctcttgtcttttctgagctacctattccaagaacacagaggagttgttattgtggttacttgtggtaagaagagtacctttctgattggacccagggcagaaaaaagaactttcaggtggaaatacagtcgtggtgtcaggtagtgtgtaacttcgttaagttcagtcatagcagccgctgccaaggggggctgttcctgttcctcatttccaattgaaattaataactcacttgagatcctactaaacaacacacggaacaatgaccgcaataaccaacatactttgagtaactattacatgcatgggctctgtgctattctcttatgtgtattcatttatttaattcccttaacagttctttctggcagagacacccccccactcttagcccacttttatagatggctaagcagaggctcagagaagtcagacaactcacccaggatcaagcagagggcaagtggtagattctagaatttgcatccaggcagttgagtctagaattgtctttgtgtattttgctccatggtctagcacaggatcaccattggtagatcatcacttagaatgccatcactaccttctaacagcaatcagtccccttaagtggctttcttctcttttttttcttttatctttttgttttgttttttttttttttgagggagtcttgctctgtctgccagatggagcacaatggcgcgatctcagctcactacaacctccgcctcccgggatcaagcgattctcctgcctcatgctcccgaatagctgggattacaggcacacaccaccacacctggctaatttttgtatttttaggagagaggggttttaccatattggcccagctggtctcgaactcgtgacctcatgatccactcgccttggcctcccagagtgctgggattacaggcatgagccactgcacctgactaagtggctttattttcttatgtggggatcctggagacacagtgtgtgccaaagcgtctgcagaccagtctgtacagttgattatagatatattaatgaccacttctgagctaaaaaatgatctagaataatagactaccaaacacgtaagcttatttacggtttgcctccttctcatgcttttggaagggaagcactgagggtcattgtatcagtcagcgtagactaggtttgccgcagtaacaaacgaccccaccatgccatagcttgcaaaaacaaagactgagttcttgtctacactgtagggccgtcaagagctggctctgcttgctcttggtcttctccatgccaggatccagagtaaaagcacagcttctctctaggactccaggggaaagagaaaagacaagttcttaaagtttcttccaggacgtgacacctgacatttcactggccaaacacagtgacctggtcactctggggcagggatgtgtaatctccccatagctggagaagtaaataataatgcacaataacattgtctcccatgggtgcagatgtgatgctttcctccttgtgactgttttctgtcttgctgtcccaagtcctaaggtcccagccacctatggttctttggacctgtgattttcgctgaccccgaatgactggaggaactgctgcctgcatccccaacccagccctccttgtcagtcacgtagaaagcagttattgtttccaagttccctgcccttgttaaatgtcagctttgagtgaaaatgttcctaattttactcagagtgcaaagaacatccaggtcaggtacctgacctgcttgattcatgtcttggaaacactcctttgtctttcagagaaagtaaagagtgatggagacagagagagaaagtgtgacctactttttattatcagcaccatttcatctgcaaaacacgacttttctcttcttattacgctgagcatgaaaataaaatgttttccaaaagacctggctttggctgttgtgaggaaggccagggacttgttcaaaactctgatgagctcgatgagcaaatgattccaatttttaaaaactgtaattgactttcaaactgctctcactgtccacacataatatgtggtacttttctgcaaataccagcagcaaggtaggacaaaaccagctcccacactggctgtttgcttgatattaagctttgccagtccaatataggtcacatttccaaccagattttgtgcttatctctacattacaccttgtagcaagggggaaaaaaagagcttcttgacatctttttgaagaatggcgctctttaaaaaaacataagggaactttttttttcaaacactgtaatgagggtattcaagtctgcaggcaaaacagagctgtttgaaaagacattagcctcgaaaccgcactgtgccagaatagatacagctacgtcaaaatgccgcatttattttgccattacttttcactgactaaaaccatttgctaatgaaagttctagctgacataatttcagcacctgctgatggaaaggtggactcactggtcatggggagtacagtaaaattaggagagtagatagaatcctgaagcatttgagctgcaaaatcatagtaacaacagctcttaatatcctataattgaaaaagagattgccattttcaaagacctttcacagtcattctcttaatcaagtctcataataaagatgtcattgggactgagcagcttactcacattctcatttcactgatgaggaaactggagctcagggaggttacatggattctggatgacctacaggtcatggaggtaagagaggaatgggttcctggcaactccttctgagtactaactgttaaagtaagcagagtgtgtgtctaaacttctcatgggctactgtgaggagtaaggggtaactgcaagttagaaggcatgatgcccaagattgtccttactctgacacccactgcaagtttgaggtggtcctcaaacccatcctcatggctgatatttgctagaaggacttgtggcacttagcagaagctattgtatttacagttacagtttattacagggaaaggatacaggttaaaattagatcggggaagagacaaatggggcaaagtccaagacaagtaccagatgtgaagcttctattgtcctctacccatgacatcaggacagaatacttttctactatctatgtgtggcagtatgcatggaatattgtcagacagagaaactcacctgagcctctgtgttcagagtatttattgggtcttcgttgcgtaggtgtgattgggtgattgcccacatatttgatctcagcctccaagtcaactgataactgtggtacagtgtccctaccctaagcaatattgttggtcctttaagaatggttcatctgcaacctaaggttacatgggtgtagttaggccccatcctaaatcacattaagagtctccagagtatgatcagaggtgcccaagcaaacaaagactctttttttcaggaatatattctgcatatatttcagtgattttttttttttttttgagacagtctctcattctgtcgctcaggctggagtgcagtggcgtgaccttggctcactgcaatttctacctcccgggttcaagcgattctcgtgcctcagcctcctgagtcactgggattacaggcatgcacaacaacacccagctaatttttgtatttttagtagagacagggtttcaccatgttgcccaggctgctctcgagctcctgaccttaggtgatcccctcaccttggcctcccaaagtgctgggattacaggcgtgagccacgaccaccagcctcagtgaatgttttttaatttggaaaggattttataagaaaggattccaactttcccatttacagagaaggaagctgaggctcacaggtttcactcaaaccataaagctcaggagtaactaaaggaactggagcttgggggtcccagtcctgggcaccattgctaagtaatgtggcctattttcaataagggcttattaatcatactaaaaataagaacttaaaactaaatttttatttgcctagaaatctaacatctttagataaaaatattccatattcaggaggcataattctttctcttttcttttttttttttttgagacagagttttgctcttattgcccaggctggagtgcaatggcgcaatgttggtccacctcaacctctgcctcttgggttcaagtgattctcctgcctcagccttgcgagtagctgggattacagggatgtgccaccatgccaggctaattttgtatttttagtagagacggggtttctccatgttggtcaggctggtctcaaactcccaacctcaggtgatctgcgtaactcggcctcccaaagcactgggattacaggcttgagccactgtgcccggccatctttctttttcttcctctccttctaccttgcccaccatggcttaatttcaccagaatatcatcattatcaacatcattatttctagttcagatcattctaaaaatagagcagtcattttcttctatataagtcccaggtccagcctgctattttttgagcctacctttcctaatatctagtttatattttgttttgttctttcttgggattgggagtcagaatatcaactttttcagaaaagagctttggaaattctacatacataatatatataaattttccattcatagtgtgttagcagctttttctacaaatctcttggcgggtggggggatatttcactcttctatgaatcaaataatatatggctttttcctattggaaaaaattagtcgtgtgaactttattcttcaagaaaaagtagtttttatctgccttggaaatgtcaaaaggattcacaagtttcacaagtgatgatctgggttgattgctaggaactgtttttagttagtttttttttttttttttttttttcagacggagtcttgctctgttgcccaggctggagtgcagtggcgcgatctcggttcactgcaacctccgcctcctgggttcatgccattctcctgcctcagcctcccgagcagctgggagtacaggtgcccgccaccacgcctggctaattttttgttttattttgttttgttttttttagtagagacggggtttcaccgtgttagccaaggatggttttgatatcctgatttcgtgattccacccaccttggcctcccaaagtgctgggattacagacatgagccgctgtgcccggctgctaggaactattaatccatagacaaggctctggttagagaagcagaaagaaggctgggtagaccggggaaggtagctgggaggtctctgaagcttggtcttgaagctgtgaattcatagacgtcttggaaaagaactttataatgtggttagacaagttttataagattttaggattaggaaggcttttttagggggtggggttgcttttaaactttgtttgaaaaatggagcttgctgccatcatatcatcatcaaaaatggaacttgtctatccacaaatatttatttaaaagtcagactaatggcagaatggaaagaatcccagctttggagttaaaatatctcacttaaaacttgtcttcgctgcaggctacttggttgtacttgagtaatttactcaagattctcttcagcccagtttccttatctgtaaaatccttccactgttgttaggaggataagaaagccagtattggtaaaaacatatatcagagtccttttgactgtttagaaagtgttaatttactccacgattatccattcaacatttattagttggcttctgtgtgggagagtaaccattaataccttgaataagtttataatctggtcattctgtagagcttcctatatgatgtcttctgtttaagtatttctgtaataccttatagacatctcttttagactactagtgattgttggtgtcaacatatgtgtgaaaatgcatatatcctttattaggctctagcacacagtgtgctctcaatgtttgtcttttcaaataaacatacttggccaggcctggaggttcatgcttgtaattccagcactttggggggccaaggcgggaggatcagttgagctcaggcgttcaagaccagcctgggcaacatggcaaaaccctgtctctacaaaaaataaaaaagttagccaggcatggtggtgtgtgcctgtagtcccagttactggggaggctgagatgggatgattggttgagcctgggaggtcgaggctgcagtgagcaatgatattgccactgcactccagactgcatgagaacgtaaaaccctgacttaaaacaaaaacaaaaagaaaacgtgctcattggctaagcctggtagaagccacatgaccaaggctgatcattgctgccactgggtggcagcatactgggattgaggaaaataacccctcaactgcccggatgataaacacagagttctaaaatggcaacaaagggagatccacccttctcagttattgtttgaaaggacagctctcaggcaaaatatgtccacgaagttccatggaataattaccttccttggtgttaaaaaatgccctcacatttcaaacatgtcctgctttaagttcccagcgtcttaaccaggaactcgcttatgtgtgttgttttctgcttctttccactagggagctattgctgtaaaacagaaggggtagtattacagggaggagatgcacattttaaaatatatttctgcttcgtcaaactgtacagaactcttttcctcaatgagaaccaggtttttgcatgtatcttttgccaagatttgagaagggaagtctccaccttccagagctttggtcatattttgtttctctctaagggtgaagatgctgtttgttcttgcagggtgaggctttggccaataagaaagcagtgctcagaggtaaagagcctcgctgaagccctagttctagcctaccaggatttggtcatttcttggtttttcatttgatcccacccttgcctcccttcagaatgaaggtagaatgtgggactgtttcagaccatgaatgcgattgggcagaaagactgtgaaccaagagggcagggagaagggaagggatgtggggagagctaagtgtaaattgtagagtctatgaacaattctggagacagacaggacaggtaaggagaaactgctgctcttggtagaggtttacagccaattgtagaaccctaagaaaatacagcactttgggagtggatggacccaaaatgggtggatcatttgagcccaggagtttgagaccagcctgggtaacatggcaaaaccttacctctcaaaaatttacaagcttagccaggcatggtggtgcccacttgtggtttcagctacctgggaggctaaagtgggaggatatcctgagcccaggaggtggagattgcagtgagccatgctcgtgccattgcatttcagcgtgggtgacagtgagaccctatctcaaaaaaaaaaaaaaaaagttcctaagaaaataaagcctggcccatgcaatttgaatgtaactgtctataatttctcttggttactgaaattctgagtttgtgtctatggtttctccatccttgtctttgaggaggagcaggatggcgaagtcgcagccatttaaaaacttgttttcagtcattttgcagaaagcagacgtacacttctttgctgttggtctgtgatgcgggagtggtttgtcagttctttcattcaacaagtgctgatctttgggcagcatacactggtatgacctttatcatttgttcaggtgttgtggagaaagttgtttgcttttgaaagacttgatggagaaaagtctttctacatttctagaaagaccatgggtgtgagtattgagagctgagtgccagtttgtttttttgtttttgttttcgttttttgagaaggggtctcactctgtcacccaggctggagtacattggtgcgatgaaggcttactgcagcctctacttcctgggctcaagtgatcctcccacctcagcttcctaagtagctgggagcacaggcaccagcaatgacacctgcctaattttgtattttctgtagagatggggttttggcatgtttcccaggctggttttaaactcttgagctcaagccatccacccgccttggcctcccaaattgctggaattataggcatgagccaccatgccctgcccaggcaccattcttgactgcgagaaagtcactgtgatggtttctccagcctgagttttctcctgtataaaatggaccttgttttgaggagagaatgaggtatgtggtactcgtgagcaggattttcaatgcctggctggttgttacttatccatttagtccgagcttcagggaaagaacatgacaccggcctccagcagagcctgctcttggtccactgtttatcctggtgaccttaggcaagtcatttaatttccttgagttttggtgtaagtattgatggagcagaccatcaataactgttcttatgtctgttattaccatgtgtctgtctacatgtttgtttgtaaattctctgtgggtaaaagttctcttttcatccccttgcctcagcacggagcccagagccagactgcaggtaggcactcaatagatatttgataaatggatgttagtcatttgatttctgaagttgcgtaggtaccagcactacaaccctatgtagttcacataactatttgcagttgtattttcctttaaatctaaattggagagaaggaaggtaattaaggcataattatcagacttaatcaagcacttatttattgagcttacttggtgcctgggcttgtatcttttgtttctgatttttagtttcgtttcattgctccagcgtgggggaatttgcctgtgtatccttgaataaatgtctttctttggaaggcagattaagtagggatttctcttactgtttatttttgtttctaactgaagttcaatgaattattcttttacccagacacttacatattcctagccattccttttgcttaagtttgcagagatttgtgcttaaaactgaataaacaatctcagggtttttgtgtgtgtgtgtatgtgtgtgtgcgtgttatatgaagtcttgctagaatgcataaacaaacaaaaaaaatatcatactctcagatcctggatactgtggtcgcctggacttcaaaagccttttgtccgtatgtatttacataatgtattctccatgtttggttttcattaaacccatgagtttaataataaagtgtttggaactatgcttttccctaccacttttctttttttttttttttttgagacggagtctcgctctgtcgcccaggctggagtgcagtggcgcgatctcggctcactgcaagctccgcctcccgggttcacgccattctcctgcctcagcctcccgagtagctgggactacaggcgcccgctaccacgcccggctaattttttgtatttttagtagagacggggtttcaccgtgttagccaggatggtctcgatctcctgacctcgtgatctgcccgcctcggcctcccaaagtgctgggattacaggcgtgagccaccgcgcccggccccacttttcttgttgtgaatattttttccccttctgaagtgaatactgatttttcgttacagatatttgatgctttgggggcctgttaaaatagttgtaaatacactttctaaatagatgaaatgaaagaaattctgagaaggggtttctttgacttactggaaaaaaaaataataggaaagaaaatgtgatcagttggtatatttggctctctttcatcaacacttttatggacctgcattgctgtgtttctgtgatgtgtataaaacacagtttcagtgatcgtgcaagcctcagttttagaagataaaaagatatgaacttgaacccaagcttctctgtcaagagaattataatgtgttttgactgtaggcttccttcgagttaaatttacagtattttcccctaacaataacaacaaccagaagtgcccctttaagttgagatgcttgttaaactttacatgtatgcatgcatataaatgtacatttctgtatatataatatacgttcacatatagttacattagatttttaaagaatttcctttttgccttcaaatcattgcacagaacatccaagtagacatcatgtcaaaataatcaaaatgtatttaacgctctctcaagaaatccatttaagaataagaacacggtttgggggtgattttcagaccgtaaattgaagtgtaaatattcgaattattttcataaactcttcagttctgttgggcttttatgttatcatacagtgatttttttttttgtatttaagtttcctagcagttctcttttttaagagcctcaagtgtccaataaaaagcaaatacttgaattttcagtttctatatagtgcatattttttctcctgcttgccttatttttataacagtgatttataaagacattactaaagaataggaaagaaggattttgaagaggaactgctatataacactgcttaaaaatctatttccaatgctaaggagaggaaaaaaaaatactggcaccgtatccgagtgggatctgggatccgagtgagatggccataccttcagtcattctcctccccaaatatttattgagcctggtggacaaggagggcgggataagattgccaggccctgcttctatttctggggttgggatggcgactaaagacccgcgtggactgcatgctgcagccagctcaggaaagatttcaggaagagcgtttaggaaggcagctttgaaaagaaaatggaaagatgaggttgcagagggtcagtccaaggtgaccagaatctgacctggggcaatgccataaatccaagaaagactgggtttcaggtgcaggaaatgcgattgtgcacggacccttgcctttttacccagtatctagcccatccttctttcttagaagcagaattttctaagaggtacacggtagttcaggataaaaattccctgtgctaactgcccttgcagctagctctctgtgaccgtgtgaccatgtgacccagttctagcgaatggggtggcagggaagtcccacatggacttcttgggcgtgtccttaggggaagcatagcttcttgccttcttcacactcctccttcccttcctgccgtctgggatgtggggtctggcagagaaacaatattgtgaatggaaatgggaggaacttgggtcctgaaaattacaccataccccagagcctggggtggattatttcaggacctttcttccttccttccttccttccttccttccttccttccttccttcctttctctctttctttttttattttttttttcagacagggtctcctccacacccagactggagtgcagtggcacattcatggctcactgcagcctcaacctcctgggctcaggcgatcctcacaccttagcctcctgagtagctgggactacaggtgtgcaccaccacacccagctagctaatttttttttttttttttttttctgtagagacggggtttcaccatgttgcccaggctggtcttgaactcctagcctcaagtgatccgccagcctcagcctcccaaagtgctgggatcacaggcataggctgctgcaccaggcaaggacttttttttttttttttaaacaaacttcactcagtttgaaggcaccattatttgggtttcctgttaattgcagttaatcctattgagtaaatgtatcaaggacaaagagcagaatgaaaaaatgagtgagtaaagttgagcagaagaactcactgaaaagtcctggcaaggttccacggcacctgtgatgcttccatcacacatatttgctgagtacccgctgttcataggtcagtcgctatgcaaggcactgaggtgacaaagacaaggagaatgacagttaaatgtaacatgggctttgtggtcaattagttctgggttcgttcccaggtcctatcactaactagtacccttatgaacctggacatgtcactagcagcctcagtttcctcatccataagatggggatagcaatatctatctcctacacctgatgtgagtatcacatgagaaatgcacatgaaatgttttacttagtgatgagcatatggtaaataagaatttaatagattttagtgaaagcaaaataaaaggtcctatcattgtccttaaggagcttacgaaaacagagctatacgcacatccgtagacagttaccacactcaggaatagtggaaaactgacaagaccctggagatgctgtgtggggagggataatgggaacgcaggtcagcatgctctaggaatggtaagagaaactcccaatctgaacggtagtcaaagaaggtcttcttctctttggagactgaaaggctgagagggtacctgccctgctaaggaaatgaacaggacggaagaatgatggagggagaatgggaagtcctcagcacataaaagtttgagctggaaatgaaatatacaactctgcatagtcagcagattttgctgggctgggccagttcagctcagcaaggattgctgggcatgtgcttgaaggagaaaggtgaggatacaaaggcaatgagtacatgatccttgaccttgagaaacctatagtctaatagaggaggcacatataaaagtaattaggtaaaatatagtgcagaatatgcagtcatggagtcatctacagatctgcctggaatacagagggacaagtgtttagtattttccaactgttcacagaggacaagacacttgggcagaagtttgaaggcaattccaggttagcagtacccacttgatatggtttagctgtgtctccacccaagtctcatcttgaactttagctcccataatccccacgccacatgggagggatttgaatcgtgggaggtaattggatcatgggggtgggtctttcccatgctgttgttatgatagtgaataagtcccatgagatctgatggttttataaagggcagttcccctgcacaaactctcttgcctgctgccatttaagacatgtgtttgctccacattggccttctgccgtgattgtgagactttcccagccatgtggaactgtgagtccgttaaacctctttcctttataaattactcagtctcaggtatgtctttattagcagcatgagaacaaactaatacaccacttgaattgctggtacgtctgaggggcttgactcccagtccttcgaacatggaggggtagctctttttctaagctcctcataaagtattgtatccaattcttcagaagggatgaaggtatctggtcctgtccgcaaacagagaagtgcttcttgtactgaccaggcagtgacctaacgcagtccttgagacaattccaggtgcccctcaggccgtttttccaccctggtgtttttctttgtatagacagcctatgcctggataagaacatgctgcgtcagagagttctttttcactttgcccctcaaaatgtgcacaccgacagccacagatagatcccagatgtctttttcctgctcttgcaaaccttgaagtgggccctgccggcaggcacacctgccaaggaaaatgctgtcctcgaaatgttcctggcaccgttttcaagaggtgccgaccaagcgctggaattgctgacctccctgaaagagaagcctgcagctgcggcctctggggtgaattccccccatgggaggacctggtggagttaaaacagactatatccacatcacagagagctggcccattgctcagggcctgggaagtggtagggagggaccttcccagaagagagatgactcaggctggtcccaagcccctcctgtagaacaaacagacaaggtgaggagcaaggaggcatttggaggtcatctggcccagcacccttgtctggaagacagatttaagttccataaagtcacttaggaggagaacatagtccaggttgaaccttgctgcctgccctctggttgaaacatcagtgttgaatcaatagaccacgtcctgtccataccttgggaattagactcacccagactctgagttaagagtttctatgagacagagggctggactgggggagcaaggcttgcaaatcgaaagcatcagttgctacccctgagcaccatctcccataggagactctttgaacacttttttaaaaggcaagatgttggcctggcgtggtggctcacgcctgtaatcccagcactttggcaggccaaggcgggtggatcacctaaggtcaggagttcgagaccagcctgaccaacttggcaaaacccagtgtctactaaaaatacaaaaattagctgagcatggtgtcacatgcatgtagtcccagctactcaggaggctgaggcaggagaactgctcgaacccaggaggctgaggttatgttgagccaagattgtgccactgtactctggcctgggcaacagagggagactccgtctcaagaaacaaacaaacaaaaaaagtcaagatgttgacataacagttctgaagaccaaggtggtggaataggttaggttaggatacgtcggaggagccagtgtgaactgctcctttaagacatgaattagcccattttcatgctgctgataaagacatacccgagactgggcaatttacaaaagaaagaagtttattggacttacagttccatgtggctggggaggcctcacaattacgggggcagacaagagaggagagcttgtgtagggaaactcctgttttttaaaactatctgatctcgtgagacttattcactatcacgagaacagcatgggaaaatcctgcacccgtaattcaattacctcccaccagcttcctcccacgacatttgggaattgtgggagttacaagttgcaattcaacatgagatttgggtggggacacagctaaaccatatcaaaacataactatagctgggtgaagtggctcgcacctgtaatcccagtgctttgggaggccaaggtgggagaattacttgaggccaggagtttggggctagccgaggcaacacatagagacaccgtctctcaaaaaaatttaaagaaacttagccggggccgggcacggtggctcatgctggtaatcccagcactttcggaggcctaggtgggcagatcacaaggtcaggagatggagaccatcctggctaacgtggtgaaaccccgtctctactaaaaatagaaaaagaaattagcctgacatggtggcacatccctgtaatcccagctactcgggaggctgaggcaggagaatggcgtgaacccaggaggcggatcttgcagtgagccgagatcgcaccactgcactctagcctgggcgacagagcaagtctccgtctcaaaaaaaaaaaaaagaagaaacttagccaggtgtggtggtgcatacctgtagtcctagctacttggaaggctaaagcaggaggatcacttgagtccaggaggtcaaggctgcagtgaactgtgatcacgccactgcactgcagcctgggcaacagtgcgaaaccctgtatcaaaaaaaaaaaaaaaaaaaaaaagaaacacaacttaccaaaccaagaaacttacagagaacatgattagaagctagcatctgtttttaccctaccctcttcccctatgacccaccaccacgcaggccttgctaatgtggggtctttgtggaggatcttcaggatcttcagtgccagaacccagcatttaaactcttatttgacagtggggccacagcagatttaaaaggacaatgacatgataaaaaatgtgttcctgagagatttaaatgcaggcctatagagagcagatgttaaaagagaagaagcagactgggcatggtggctcgcatctataatcgcagcactttgggaggccaaggcgggtgcatcacttgagcccaggagtttgagaccagcctgagcaacatggtgaaaccccatctctacaaagaatacaaacattagacacttttcaaaagaagacatttatgcagccaacagacacatgaaaaaatgctcatcatcactggccctcagagacatgcaaatcaaaaccacaatgagataccatctcacaccagttagaatggtgatcattaaaaagtcaggaaaaaacaggtcctggagaggatgtagagaaataggaacacttttacactgttggtgggactgtaaaccagttcaaccattgtggaagacattgtggcgattcctcaaggatctagaactagaaataccatttgacccagccatcccattactgggtatatacccaaaggattatatatcatgctgctataaagacacatgcacatgtatgtttattgcggcactattcacaatagcaaagacttggaaccaactcagatgttcatcaatgatagactggattaagaaaatgtggcacatatacaccatggaatactacacagccataaaaaaaggatgagttcatgtctcttgtagggacatggatgaagctggaaaccatcattctcagcaaactatcacaaggacaaaaaaaccaaacactgcatgttctcactaataggtgggaattgaacaatgagaacacttggacacaggaaggggaacatcacacaccggggcctgtcgtgggctggggggaggggagaaggatagcattaggagatatatctaatgtaaatgacgagttaatgggtgcagcacaccgacatggcacatgtatacttatgtaacaaagctgcacattgtgcacatgtaccctagaacttaaagtataaaaaaaaaaattagctgggcgtgatggcacctgcctgtaccccagctacttgggaggctgaagtgggaggatcacttcagctcaggtggtagaggctgcagtgagctcacatcacaccactgcacttcggcctgggtgacagagtgagaccctgtctcaaaataaaataaaataaaataagcagcagcagcagcagctaggttccaaaaaaaaagttggaagggtgtgatgggattttagttgctggatgctgaagttctgccaacacagtgggtttggagagtaggagtgaaagagtggagactggccataagttgggagggtaagtaattggttgtgattgaaaggaaagaaggaggtaatgatgagttttggtctgggaaccggagaatggtggtccatggacagaaatagagaaggcaagatgagaagatgcaataggcaaaggcagtgagtttaatggttgacttttggtatttgctgtgtatgccctctgtacctttgacctgggccttcaacccttggacagagcttaagatggctgcgtcccaagtggtccatcccaagcgagttttccctggacttatctggaatgactctgaaccttttgaagaccccaaaactaacccaagctttgcatgatctccccaggatgggtaagacttcttactctctagagctcttttctctgtaggcttagctactcagtgaataaataggtacataagtgcttgctagcaagcagctgaggcaacctattaaaactcatgccagtggtaaagttaagctgctttctggtaagaatttcagaattccaggacgtctcaaatttctggctggtacaccctgggcaaggtccacaggctggatgggttttggaacatgtcttgattgtactttttcctcttggtttggaaagcaacgtaccctaggtaaggagagatttctgacaacagctcagcaatcacagtttccagaaaatggctccagtggatcaactatgagttaagtaaaaaaaaagtcagtgctaccgtttgaagtatgtctagagtatggttttaatccatcgctgtcaggctcacataaaattccaggcttctgtaactctttaacttgaagtattacagggtgtcacctgctaaatggaagccaagagaagcaaggagtttttcatggttaaatcttgtaaagatgctttttaaagcatattaatccattagtaatccatttggatttgggaatacggtcatatactgtttggtacaatatgtactaaacctggtcctggaaaattaagtggaaatataggtttaaactactggaacttcaaaatagcttctcagtaattccttctcagcaatcattccaattcctagatttaaaaaaatgttgatatatcaaatttccatcaagaggaacatacatatggatttttggagaggggagcagagcagaagagaaaactttcaacttttaatagtatttcaaatttacctgaaagtgacccaaataatacaagcaactgtttaccctgattctccaatacacctgcatctttaattatgctaatttgatacaggtgtcagattatgcattaacaaagacatcctttttctttgagtatgtgttttctatggttatgtaaattatggaggtgctaaacatacctttagagaactttgtatttgtattaacttttttttttttttttttttttttttaatagcgatggggtttcactgtgttgcccaggctggtctcaaactcctgagttcaagtgatctgccttgcttggcttcccaaagtgctgcgattacaggcatctgccaccgtgcccagctatagagctttatttatttatttatttatttatttatttatttatttatgagacaaggtctcactctgtctcccaggctggagtgtagtggcatgacctcggcttactgcaacctccgcctcctgggttgaagcgattctcctgcctcagcctcctgagtagctgggactacaggcacatgccaccatgcctggctaacttttgtttctttttaaatagaggtctgtttttactatgttggccaggctggtctggaactcctgaggtcaagcaatctacctgcttctctctcccaaagtgttgggattacaggtgtgtgccaccatgtgtggctatagaactttttaatgtgccaaggtctgtgttcagtgttttcttattcctcatctgacttagttctcaaagtccttgcctaaggtattgctgtcctcaccgtcctatggggagataggtcactttcccaagtctgggcagccagcagcagggctaagatcaccactcagaccctgtgattttatttttcatctcctcacatctggcgctgaatgtcaggaccttcctggcctctgggaaagacacaggatggctgttttgagaggagtgtgaaatacatgaaggcaggacttccacacacctggacgtgaactagaggtgaggtggggaaagacaggaagtagatcagtgttgcccagaccctaccttttccaactagggtgtggaccatccttcagagcttggcctccaagttggaacccgtgtataccactgacagtgtttcctgggatggtgatatttatcaagtgcagaggcccagacacagagagcttgaggacctttgtgtgagacagtgaaaccctcaaaggcaagggctctgtttcatgagttttctatctcctgctgctgtctcggtgggcctgtttgagttgacctgtcccgtcggtattagcaactggcaacagtgggtttttgttaaatacggcaaatattaagagtcgtctctgggcattttagtttattcattcatttgttcatttattccacagggatttattatgcatttactgtgtactaactaatggggagatagcaatgaaggcagactaagtgtctttgttctagtgcagccatatagtcagtgaatgaatgagtgagcaagatacaggagagaagtgaggtatggcccattataccagataaagtgatagagaggggctggcgaggagagcagtctaatttcaggaaagtcagaaaagtctttaaggaaactgaaggctgagctgccagggccagccacgtgggtactggagagtgggaggcccagtcagggggaatgctggcttagcacaactgaaaaatacaaaggtagaatatgaagtgtaatgacatggtttagattgaaatctgatgtggatggaaaggttttgtggcctttcagcccaaggtttgaaaaagaaatggaatttctaaatggagtgggtagccacaggagggctttagacaggacagtggccccgctggattttctgcccattgacttgggctcgaagtcacgtccatgttgctattacagatgcctcccagaacagtttatataatcatcaacgtatattcatggagcatcttctgtctgctagacacagaattgggtgttgggctttaaagatggatgaaaggcagtacctggtctagagaggctgctacctggatggtgtgtttgccatcctcagtaatgtgtgtcccttacagatgatgcccaatgactctacaattgctgggatactttttagaattttctttttgtgcattacttttgattcttggttctttctttggcattagctcaccagtggcaaatatgtatcctttaagggtggacttaattttttgagaaatggccaaaagtttgtttcaagtctagtctgatgaataaagcaggagatttatttttggcaaaagtggcaaataaagagggctgatttttgtatatggctactgaaatggcttagaatgccattttatcacatggtcaaattattcaatgatcaaatatcgaattattaaaaattatcaaaaggaagttccctgaaacatgaaagtgtttgggctttgtaggtacccaagtctactgggaaaaatccccatttctgggtaacccagccccttttaatgacaacttcagttctccaaattccacttccccttttagcctgcctcccttccgtcatccttcatcaaggtgacataggtctggcgatctttttggcatagacgtgtggacgttgtttttgacatttgtacatgcttttgctcaagttgaaggcccaagtttacccaattcgactgcccccacccagatagaatattcatggttagaccataaactacataactggaaattttaaatctatttttatatgcatacaaaaactgcaggcctgaagcttctaaaaataaacgttactttcatcccattatacaaaaatgcatttgaggtggtcatcattttatttgggccagggtcttccgagacttgggacaataatatattttttctactttaggcaaatgtatgcagattcttaaagcatgaatgctgtattacacacattataaattcgagtaacagaaatgtttgtgtgtagaaatagaatacggagtatatattttgtattaaataacctctgtggtatttgtttaccctgattttttgatttatgagtcgtcattgctcgctatagaagaagaaaaataaatatgcaaaacagtggtagatttttaatggggttacttcccatcttagctcagtgtttctctaccaaagctgaccttgaaattgctttttagatacaagtcaaaatatgcaaattccagaatcaggaggagtatccggtgttaggagttctttcgaagtcacatttttacatcatttccatcgacatcccgtgttccatctgcttcttaatccattagtacctgagtgggggtatataggttttctcaaatgctctaatctccacagaagttaaaatatccctaaacaggcatgtgcacatatgtctttctttcttttcttaggttaactttttttttttttttccttttgaatgaccacaaagcatatctacccagcggggttactttttttttccctttcagtattcatgacgtcaagtccctgtttgttatcttattgtcctcttatcctggtccttagagtctttcaagagaagaggttgatcccggtgtaatgtacagcttcattctaataagttgtatcgatcatgtattttcagtcactcttcatgtctatgctgtccatttgcttggatcccaaggaattttcttctgcccccccaccccatcccactcatatttcataagggtcttctggaacctgcatggtgttgggatgtatatatcacttttcccttgttatgaccagaaagactcacagccatgaatttcactgaagtttatgattggtccctgattgcctcacatcttgcaaagaatcctcttctagaaagcgttcttgcagttagattaacaagcagatatactgaactggtgcatgaatgaataggaaatatcccagttgcaaaggataaatctatcatgtagtggagagcgtgttcaggcaaaacatttggttctgcggtcgcttggaggattgggcccgtgctataattaatgccactagcagtaaaaggacattagggatgtcgcgcatgttgattatttcttcattttgtttatccaagtttccccgccttggaagctccgtggccattgccaaagaaagccctggagacagagcgttagccgttgctcctcgtaagcgcatcattaccttcctccgaacaaagtcctttttttttttttgtcagtagagggtgaaaacattattggattcaggagttcatagtagtcctgtatgaagctggggacggggggatagagttatgaaatggaccatttcaaatggcattatcttcccacagtgaggtacacctttcataaatcataggagagtgctcagaaaatagagcatttgttattcctgcagtacattgtatttgcatcccccctactcacaggaaagaagaaattctcaggtttcctttcccaggtttgaaaaggcagttaatcgccttacaatgaaattatatttttaaaaaaggtatcataatcaaataaaagaagtacttcatgtaagtcaaggattgtgcttttactactattttttctttttttgtaatcatggtggttctttttgcccacttatttaggccttaatttaattacggcgctgattaagttctttggttttattttttactgtaaacattgtgctgtattccgtaggaaaatgtagatgaatgtgggtcattgggaaataaagtgggtggaagtattggcgagcatttctttcccactctctacctcgcctggtctagccgctgataggtagttactctttagtatgcccaagttcaaattacgtatgactgtgattctaacacggaagcgccctccttttctagtagcttggatgtgattggtatggagaagcagagtgggtgcgtctttgtgtgttcttgacatagttaaagagtttggtatagtcaattccctttaaagtagtaggcttcttaaataattctagttgttcctcgtgctgccaagccatcttgaagaatttttcttcatttgtaaggggttaaaagtcatcaagctgattgaaaagtcaagaacctctagcgcagcctaccccttgcatatttgatactctcttttgcactctcgggagcagttttgaggacacactgtaaaaatgtatgacagcagtttgaagataagtctgttgccccaaataatcataagaagaagacagaagaaaaattgattcccgtagctctctgggcagtgggatgggggtaaagcaaggaattaataaaaacccaccagaatacattatttcagacaatcaaggagagcgttacattttaaaggtacttcatctcagaaagtttgagacatacttttcacacgtggcatgaagagaaaatggaatggaatgagcactaatgaggaccttgaacttaactaactgaacttgatggtcatcgcaagacataggggagaaatattttgagacatcattgtgcaggcaaacatgagcaagaaattgagaaatccgttcatgcacttctctctggtttcccggaagggatgaattccaaatcccgtggctcaggtcctaggtcaaagacagctctttagaaagagatgttctttgcttctttgctgactgcccatcccctcctctctctcaaggaaataagatattcatttgcaagtaaataatgcagcagtcttggatttgtatcagatcaactttgaatgaaagcctgcctttctgcgtttatttttgcttatctctcctgcttctgcttcctgttttgttaaataagggcaatgacggcaactattttaaattgctataaagttttagctagacagcgaatcaaggtggcaacacatggtgggttcttaaataatagttgtcatttgagtgctttctatatgatgtacatttcattttgcactttacaaataacctcttcctttttctgtttaatcttaaaaaagatcccgggaggcaggcgttattgtgcccatttcctggataaggagaatgaggtacgctaaacgagtaaaaagcaacccgagatccaaaccctttggcattcaagattacactcttattcactaactgttcatctcctccgactgcatcgccactcccccaggccagataacccatccagacctggagaactcctagagggagaaacagggaggacccaggcacataaacttgcagagcagctgagttatcagatcttccaagccatggggttatcgagctttatcagagcagccttgctcttgcagtttctgacacatcaccattgatcagtcctgggaaacaaacaaaatagagggcgatggctccactctgtgtggccccgtcaatggcctggacgcagctgaaaaaatccagaagagtgtaggacactggaaaagtagcagggtgtgcgattgcagggatgggaccagcagtaaaaggtagccctgccaagaccattaagcttcctgcaactccttctggatcccacaatttgaaggggaaatctttcccaccgcacatcactgtttggtggactaaatggctccccgatgtcccgaaagagcacagcttctggaagtgtggtatgtggtccctgagatgaagcagcagccacaggaacccatcattcctgctacccaaggcctccattgcctggttttctgttgtcagaagagttcattttcaggtccttcaccagatattttagaagctcatcaaggaaaggacgtttgaagaaaaacaaataaacaaaaacacaaaatcaaggacgtattgatttctgagaattcctcctgggttttgtttgtttgtttgtttgggggttttttgctgtggtattgtctgagcctatgataagattgttgttgattgatttttgtctttcaagactcagcacaacacatcccatccttctggataatctcttctaccctccctttccagataaaagttgactctcataattgtaactctcccctactttatcagcatctacatctttcagcctctaccacattgaattggaattatatgtctgttttatgtaccatgctgtgaactccttgaagataggagctgtcttatcttcaaggtgctcaagacacgtttgttgcatcagttgaatggagtcaaattataaacaggtgatgggggcaaatatcacaatatgatactctgaacatcttctctgacaaaaactggtcctcaagatacaacaacatttatatttgatttgtcttgctgtatcgaatcaagctgtggtcttgagtttcgtacacatctatgtaagcactctgaattgagtgactctttcccaaagatcatactgggatctttggaatgaatggcgggtcacccatccaattgcttttgcggagattcgagcatgtggggaatgcaagtcacaatatcctgcaaaagccaacttgagacctcctaggactgcactgctgcttatgacactgatccttagcccatctaagtaagtgagcatggccctgtaagtgaaattggagaggttccttgacattcccacatagctgcttccctggtaattcacctgggtccagaacacagaagggagattctaattgaaaaacttttcctaaaggccaggcacagtggctcacacctgtaatcccagcactttcagaggccgaggcagggagatcacttgagatcaggagttcaagaccagcctgagcaacatggtgaaaccccatctctacaaaaaatatagaacattagctgggcatggtggcgtacacctgtagtcgcaggtacttgggaggctgaggtaaggggattgctggagcctgggatatcaaggctacagtgagccgagaccgcacctctggagtccaccctgggtgacagagtgacaccctgtgtcaaaaaaagaaaaagaaaaagaaagaaaaagctttgcctgtatatgtagaacaaatgaaaaccaaataacagtggcaccagttcttctttcagtttccatggaatatcaagcacgatttgagttgagcaatttgatttgattgatcttcttaaatgtataatctcaaactttacaataagaaggctacttgtctttataattgtgaaatccacccttagttttaatgcatctaaagtctctgtatcaaaaagatcaaaatcaggtttgaaagtctgtactgtaactaaaaaagttttggggtttgttttgttttgaccaatttttgtaaatctcttctgttactgtttatatacccggccacttctgccaaaatatgctggccttttagtcttttggttttttctctcttttggtttgttggcttatgttcgctgcttgatctgactactggttttatttctaaggatttttttttaagttggcatctttttttctttgactttccttgtatgcccccctttctcccctgcattgtcttgcttcattcatttctttccaggttcctgcaaattgtttttatttagggctcatctggtatgtgtattatgttcttggtagacagaagctgtctttagttcgtatgggttgagcatggagggaacttcatctcgtagtcactggataaggagccagtcctggctcttcctttaactgcccttgtgaccttgaacatgtcagttcatctcaccacgtagtcattttctcatccgtctcttcaggctaataatcacctgtcctgccttcctcacaggcttgccgggcaacccaaaagagccgctgatctgcatagcacttcgcaatgaagctgtgctctagaaacataccacgatctactggactttcttaaataaggtggttgttcaggaaattcctccagttaattttactttaattccccctacaagaatgccgagacacctctgcctattttctctttctgtgtttgttgtttcttttgtttttgttttcgagactgagtcttgctctgtcgcccaggatggagtacagcagtgcaatctcggctcactgcagcctccaactcccggctccagtgattctcctgtctcagtctcccaagtagctgggattacagggatgcgccaccatgcccagctaattttttgtatttttagtagagacggggtttcaccatgttggccaggctggtcttgaactcctgacctgagttgatctgctcacgtcggcctcccagagtgctaggattaaaggtgtgagccaccgtgcctggcctctttctgtttcaaagaaatagtcaagaagtttctagatgcacacaaaatgaccaaaccagtctttccgcttatttacacaatgaagaaacatcagagttcaccctggaagacagagtttctttctgtcttcatcctagggcacaggagagatgcagtgatggcatgtctccactctgcagacatgttgcaggcctggaaaactgtgtggtgcgtctgtttttcagagcgttgagagtcatgcgggccatatggatgcagtggtccacagaattggcagtgagcccccgggggagctcagtgcaagacaagattctggcgtaagaactgcggtagcaaggacaagagggcgtcacggtgtaagaatggccgtggcaaggacaagaggacatcacacgatgaccttctcagagtcagtaggatagtttcccttcctggaagattgagatgaaataaagctttaggagttggtatcgcacgcaggcattaaatggattgtgaagagggactttgttccccctcagtcttgtctctgcctccgtaaaggagtaagttaaaaaagaaagtttctttttttaaaaaaaagccttactgctcaataaatccctgtggaaaaaaaaaaaagagggggaaaaaggaatgcacattagtcttccattaaaaatagatcaaaaaagtacccaaaagagaaaaccccataacaatgaaataaattaggataatccaactggaggcctgcaaatgagtttgctaaatgttatattttctcaagccacttagatttttaactccctgtttctgcctgaagcaataaaggcaggaacgctgtcattagcttcaaacaccattttttaagcccctagctgcatttgttatttttctcttcccccccttagctgtatccctgcatttattacagcgcaggtgcatcttgcttttgagtgctaactgagatgaaaggagtgaggaaacgctctcttcttcttgcaggggagggctggcaaattcagtgaatgcagagtcggctgggagcctttcggctggaaagctcttcctctgatgagctgtctgttacagattttcagggatggcccttgataaggcaggggtgtctgtccacgccacactgtggtcagataacccccgatcgtaataagccggaggataatcgcttgcattgttcaataaagcaattgctttgtcccctcacttagccccttcagaaaagccaaaaagaatgtgccacctagatgctatttataaccattttcacctcttgcctccaggggctaaattggaaacctaattttagatgcataaaagccaaaatatgtataggagaagctccaaaataaaatatcccagagtggcttgtaagcatccttccaacaggttcaggttgatttaccttgctgtggatatttaattatgtcattgaaaaaaacaccagtaattaaatcattatttcttagatgtgaggtccaaggacattctagaggaagtcaaaggcagagggaggaagggtgggacgatggaggcctgaagggctggtggagaggaaagaaggcagcctgtgccgtcagagagagttcaactccatccgtgcagctgctagcatcttgccttactcagcctctgtgaaccttaagttgctcagaatgagacaggtaacacctgcctccgtggtttgtcaggacatttagaaatgcagacttgctcaagacctggatctcaggtggtaggttggtccacagacagtggcaccactagctattatttatttgttgtcactgtttgggacccctgttgctgtctcaccaaagaacttcttgtctcccttttagaagtttccagagcgtcttcctgatgttgcatagagcactcacacctaacagatctcagaacttgtatcttttctgggtggctagactgaaaaatccattttcttgtgagtgagccagaggtctgtctcttgcggcatttctgcttttgagaacctcccgtttcctgaaaggcaccagaccccaagacagctctgctgcctgattggtaggtgcccatgacagctctgcttcatgcctgctgcctcctcatccctctggatgccttgtggtcctgcttgtctgaagagcataaacttgggggttcccactcgaaaagaggttccagcagttccagcccctatgtcaggggagccacttttggggctggtggtaggcagaactttggccctcgacatctcctctgttggcattactcctatggtggtgttacgtaacatgacaaaagggaccttgcagatgtaattaaggtaactaatcagctgactttagaataggaaggttatcctgggtgattagcatggatcagagttctcacaggagcccttcaaagcagaaggggaaggtggacaagagaatcggagagatgtggcagagggtaggcagagagattgcaagcagggaaggatttcacgtactgccactggctttgaagatggagggggcacatggctagaaatatgggcggccctcagaagctaagaactagctctttctgacagccagaaggaaatagggaccttccacctacaatagcatggaaaacggggacctcagttctgcaactgcatggagctgaattctgccaataacctgaataggtttggcagcagattctttcctggagcctccaaagaagagcccaggctggctgacaccttgtgagtggccttgtgagacctgaaacaggaaacccacctgagccactctttgcctgggacttccaacccacagcaactgtgccgtcgtgactagatacgtttttttaaggggatgataatttgctgtggcagcaatagaaaatctgatacactgtcatggggccttccacagggtggggctcaaccagccctcagctcatctagcatgtttcctcctacaacctggactttttcctgttgtcccctcccgtgacactcagctccctgcattcaatagaattgcttttgtgggatgatgagtgtgttcagagtcatactcagcctaattattgcttttgaccaaccccaacacataatgctgtatgtcatgctgtactacttttaatttcacagatgaacacatttctgttcttttaatccacctctccaaggctcgtgttaactccatctggacaaagccttgaggtatacgtgtggcttcttttgagcatcgtgccatagctgtccctgatctaccttgcggggcaaacacaacaagtaaaaggttttcctcttgaaggattgaacgcctcaatgcgtgcatcctacattgtctagtgggagaaatctccgttgtagattctgacatgtcactccacatctttgtaactttttatggctctcagccctactttcttaatagtagcagcagtatttatctactgtttattgtattccaggtaaaggatatgtgaagcacttttcatgcattatttaacctagctataatactcccatttgacagatgagaggactgaggcttgtagactttccaaggctgtgcagctctaggtctagtctgccatttgaatttgggcgatgataccagagaccaagttctcaactatgatatactgcacatgtttttgtttttgtattttggttcaaaaagagagtatgatctcacttttcccttcttgataggttgtagattccatgtctaatccatccttttccaatattccctcctaatctttcagttgaattacggtctttagctcaaatgcatgacatgatgtgtgtgcctttggagtggggcggtattagtcagtcgatggttatttccttgaggagaaaggaaaggagaagttgagtacttttcagtgtttgttactacaaaagcatggtggcatgccattgttctgagaggaaggggcttttttgccttgtcagctcctgatgaaaaagatgttgggttggaaagctaagttacagcaggtgaacttgaatttgaggaaagacaaagcaaaccctggctattaaaggaacacacacacacacatacacacacacacacacacacacacacacacacgtttctggtattaggaaatggagatttctaacataataaaaaagattgaacttaaaaatgacttccattaaatagggtaagaattttgaggtggaatcctttttccttgggtcagtactttctgcaagcttctaagtaatggtttctcttagacactcacggtgataaaattgggagttttcaaatgaaatctggaatgatctactggcatcatgcctaggactttggaaaacttgaaggttggcacctttggggaaaaccagacttttgaagcaggggctctgattgtctcttcttattatagtgcaaggtgtttggcagaggtgtggtagctgaaggcccaaggataacattgtccagattttcagtctttggagccataaacatccggttctttccagccccgctcaaccgcctctcttaattcaccaccctgttagcttcatctcaggccagacattgtaggtggcagcaattgtaggacaatgagaagaggccagatgaggacagaatttttattttccattgccagtaacaaacacagccctaacttgcttagaccaaagatggggattgattggcaactgggaagcctaagggtggatctggcgtggctggatctaagtgattaaatggcgcggtcataattctatttctctgcatctctcagctgtacttccatctctgtaaacttcatttgcagacatggccagcatgcgcccatagccttaatgctcagggaatattggtgggagagaaagctcctttcctatagcttcaagcaagagtcccacggctgactctcattggccctcagtgggtcacatgtaaatcattgagccaatcaccgtctttctgtctggacctggaataaagaccaccttagagcatgggagcgggatccccttgatccacaccatatagactgtgaggtatgaagtacctcacagtaaagaagtcatgttattgctggaaaaggggacatgggtattaaaaagacaaaaacaacagggcttcatcacagcagctatactgctccatcaatacccatcccaggagacagtggcagtcttgatgtcaatcttgttttaggatcattgccagtggaattcaggactgcggttctacccagtaccggggaaccaggtgagggggttaagaggcctgggcccatggaaggggtgagagagagccacatacttacagttgtgaagggggccagccaggatggtggcttgcaggaaaggtctgagcagagtaagaggcagttcctggcaccagcatgccaaaggcagatagcaacactcttcaatggatgtgggtgagaggacagtggaatccagcaggggccattgtttccttccataatatttttaaactgtagcaaagtgatctttttgagacccaaatgtgagtatgccattctaatcttcccaccctcagataaaccacagcaatgattttatactgtctgtagggtaaagacagacccctaatcataacctacaatccctcgacccagtgacctagcccccgtgtaccttccctgtctcatttctcactgttatcattgtaaccctctaccctctcttttggcttcctgcagttgccctcctgcagcagggcttttgcacatgctggtttctcccttactttgcctctactcagtctttatatttcaactcagtggtcactgtctctaggaagccttccatgactgcattaaatccttctataagttttcatagttctgtgcatttcctcttggcagcaatgcactgagctgcagttttacatttttgtttttttgttttttgagtttttttttttttttgagacaaaagtctcgctctgtcccccacgctggagtacagtggcacgatcttagctcactgcaacctccacctcccaggttcaggcgattctcctgcctctgcctcctgagtagctgggattacaggcatgtaccagcacacctggctaatttttgtatttttagtagagacggggtttctgccatgttggccagcctggtcttgaactcttggcctcaagtgatctgtccacctctgcttcccaaagtgctgggtttacaggtatgagccaccacacctggcctgtttttgtgtttgtttattaattcctatttttcccacctgacagtacgctccgtagggcatgtgtttgtttcggttccccaacgtatccctactgcccagcagaaggcttagctgttaacaagtgtttattgaatgagtaagtgaatgagtacgtgaataaatctgcgctttagaggcacttgctcaggcttgtggaataattctacagagagaaacaggaatcaaagggaaacctgaagctggctcagaagatggatgggccagcaaaggcttcagcaaaaccacacaatgctcatgaaaaatcacgcatttctctgatttgtggttattgcttccctggattttttttttttccagttgttgttgttcatggtggtggtggacaatctgaccatataccaaccaaattgactgttaaattcaatcatcagtgaccactcctgataatctgacctcctaagttagagcccctgggaagttcagccgtggttctgaccaggcaggataactatctaagtgttcccctttggacctagactgagccaaagattctccttggtctatataggataatagatttctaaaacaaaccaatagctcaggcacaattatagtggggggtggggggcatgtttaacctactttagagaacaaactctttttaagggctttgcacactaattgtatgcaaatggatgctgctaattgcaaacacaaaattcaaacctagtcaaatttgaaacctgttcatcaacagtccctttaggacctctgccccactctatgtatgcagtttaaattgctgatttatggctacataatgtcttcctaacccccagtttactgttggcttccttcagagtcattgccccaggggactcattgacggcagagagtgtgtcccctccactgttgcctcaatgcccagctcagcccagtgggtaccgtacttcaaaacctcttattgaggtccacctctgtgccaagcatttcggtaggcagtgacagaagagagtgcatgcatgaatggataaactctttcctggaatgcctgctctcatcacctggtttcaaagtcgagccagacgttctgtctcagctcagattctacctaccctgaggttcgcagctgggcatgatcgagccactctccactctcctgtagcatttttgggctttgagtttatttgacacttttcacttgctgccttatattgcgtttatttttattaattacttcagtagtcatttacaaaatgctgctgaatccaagtccctgtgcaagatgctgcaggagacaaaaagatgaacaacacgtggtctttgctttcataggttatttctcctcttccatagcaacacatgtcaaggcaaggaccatatcttattcagttcctagtcatcttttctttcttttgctttttcttttttaaattgttaagatctgccataaaaatgtctgtcagagtaggcatgattgcatattctttagatggatgggtggatggatggatggatggttggatggttgggtggatgtatggttggatgattggatggatgatggttgagtgagtgggtggatggataggtggaaggatgaatggatgcatggctgagtggatagaaggtggatggatggagggatggatggttggatggttggataattggatggatgcatggatgtttgggtggatgaacagatgaatggatgcatggatgaatgagtagttggatggatggataaatgatgcatggatagatgaatggtgaaacttttatattttactaaaaatctgcattgatagcctagtggcttgctaaaaataagggagctgcccaaatgccccatttcctttatatacttgtggagcagcagcgaaggccaagccagtgccaggggctggaaacagacacataaataagaacaaataagatacagacctgacctcaatgattttttgatatagaagcataggcacataaataaattcctgtaatgggagtctagggtgaggggtggtgggtgccataataaaaattatataaagtgctatggggaagcaaagctacatgaccaatttgttctatttatttatttgttattattatgttttttgagacagagtctcgttctgtcactcaggctggagtgcggtggcatgattgtagctcactccagtcttgagctcctggactcaagagatcctcctgcctcagtttcctgagtagctgagaccacaggcacgggacaccatgccagtctaatttttaaattttttgtagggacagggcctcactgtgttgcccaggcttatctcaaactcctggcttcaagtgatccttctgcattgtcccccacaaagtattgggaatgtattctttcctgatcaggaaactccgcagagagaaagtgacagttgaagactatattgaattttggcccacaggaaaaggaaactttgctgttagggtcacctggaggagagactgcaggggtcagagatcagggccatatgctagagctgcaatgtgggtgctcaaatgatgttcagtgcatcttcacagatggacctccacatgtccctcatgccctaaaatagatattctccacagctgcacatacaacaacgtcagtgaaatccgttgagaggagcattgaggagatgagtcaggtgtgccgcagcactcaggtcagacttgaggcaagtgagaggtgtgagttattcagagtcccagagagcttgggccaaaagagattctatttttactggagcatgtgagggtggatcacaactaggatggcgcgaagttcacctcgtgtaagcacaccaggctgcagggataataactgcactttttaaaaccagcaaatcattcatatttactttatgaaacctcttttaactttattttttatattttttttattttcttgtttctttttatttttaaaatttatttttgttttttttgttttgagacagggtcttgctctattgcccaggctggatggagtgcagtggcccaatcatggcagcctcagcctcctaaactcaagcagttctcctgcctcagcctcccgagtagctgggactacggttgtacatcaccacctctggctaatttattttttgtaaagatgaggtctcactatgtttcccaggctggtctctaattcctggcctcaagcgatctcccatcccccctcagcctcccaaagtgctgagattacatgcatgagccaccatgcctggcctctggccttcttttcactttagaaaaaaacaaaaaacaaaaaacaaaaaaaaacacaaaaaaaacttttttttttagaactgttttagttggggagccaaaattgagcagaaagtacagagagttcccgtatacctccggcagagccctggctcactatctacatccccactagatccatgtatttgtttaggttttgggggtttgttgttgttttgagatggagtcttgctctgtcacccaggctggagtgcagtggcaccacctcagctcactgtagccttgacctcgagggctcaagcaattctgctgcctcagcctcctgagtagctgggattataggcacatgccaccatacccagctcatttttttttaatatatatttttagtgaaggcggagtttcaccatgttggccaggctggtctctaactcctgacctcaagtgatccgcccatctcggcctccccaagtgctgggattacaggcatgagccaccactctaggcctgtatttgttttaattgattaatctacaatgacacatcatcatcacctaaagtctataggttcattaggttcacagttggtgatatatattctgtgggttttcacagacatggaatgacatgtatctatcatacatcatatattgtatcatatcatatcatgtcatatcatatcatatcataccgaataatttcattgccctaaaatacctctgttttcactttttaatctctttgtgcacacatcaaaaattccttttgtgtttttgagtttcaaaagtgtgccacaaacaagaaatttgggatctgctgagcccagcctcagacctgtaggggaaacaaagagggcaacaggaggtcacgaaggcatgctgtgcccacttttggaaattgtgaaggagagtgtctcaaacatgtaggcttgagccactcaaaattctgggaaataggatgttttgtaaagaaagtttgctactgtcacttctgagtagttgcagtccctcccagtacgtgggtatcttcggtgagaacaaatttcctggcagcttgaggactccgtgtgttattcacatgctttatttaatagacttgcctcatgtgactttctatatcatcctttgtgtctaagtgatttgcactgggaagatagtaaacgctcccactttatatgcagaaggttgaaaacaccatgagtgttgcaatctgaggtatctgcccttaaagaagcaatatttactgaaatgcagggcacacgacttttccagcaaaccacaccgccgtccttttgtgtgacgaaataattattttgagataccgacatgcgtgacgaccagataattatctgagaaaacttagcatctaatgatgctgttttgagatcacaagaaagaattatattagcttgagctgaattgttcttttccccctgtctctctttagttgtaaaaacacccacaaatgtgaatgcttcaggcctgaacttgtcaacagccagtggctcattgtagacatagggatgtcgcctgtgtttggggctgagacaccagaacaggtgttctgtgggaactgagaatgtctactgctgcacacctttaatctcgggtcttctttctggtgaaatacccgtgattcataactcagtcacgttactgaggtatgtctcttcggatagattctatctctaaaaactacagattctatctctaaaaacttaagtcaagggattttcaagcagttgtttgatttatgtatgtgaacctctccgttaggagaagaacttttctttggcaaacaccataggaacggagaccttaacaaaagaattaggactctcttgtcctgttttaatctcaaagctgtccctgcgctggtgcggctggcccacttgtgcctttgtgaatttgcagagaagaggctgggcgtggggggacacatgactaatccgccctttcttttgtttgtgcaacaactcaattcactgtcaccacatcagcacatttgctgcaaatctcagtgccctctcactttcgttttatttaatgcgtttctacattttcccaaggccacatgagctgttttctggcgcgtggtatgcctgcctcaaataactaacattgcctgggtcttggaatctgagccttcatattctccgatatattatttggtcctattgttccttaacttgctcatcattcacacggcgaaggaaattccatttggtccttttaagaccgccagactagctgacttaaacactcagctccagctacttctgaatatttcggttctttattgaaatggtccttttaatgtcatctttaatttaatcaaatagtgtcatcaaaataacatttactctattactgaaaattcactgcattattaactagtgtaactagacaaaaaagatggtacaaacccccatggaaatatatacttactgtaaaaatggatagagttcatggatgttctatatttaatttgcactttcaaagtactctctatggagaggttttatggttctgaaataatttaaaaacacactttactacaatccatagcaggtagttttgccaatttgggaagttatggtgccttgcagtttccaaagtaagctgaacagtgttttttaacagtgctgcccctctctcccactagaaatgcgagtccatccttttaccaagtgtggtacaacaaaggtttctctggttttcttttggtattctcagacaactgaaatataaattacatggtatgtgcaggtatcaccaggatgcaattagtttgatgaaatataccaagtcgtcaatgccactttggatagtttaatctgaaaataggacatggttggggtagtgggcacaggggaaggaaggttatgtaattttaaaattcttcctttgattcaaaagaaaaaaacatgtttgttgcattcaactccatagggtgagcatagcttagtggggagagatttggactaaaaaataagagttctgggttcaagatctgaggtaaattatttgctaggccttagtttcccatctgtgaaaaaagggagttctataacagcaagacatttaatattaaaataatgtaatgtttttaaaaatgcttgtctacccactttttcttgagattagtaagaccatcttccaattagaatgtttatccgaacttaccgctaggtatttccttgtagagtatgaaagtaaaatatcaatgggccatctctacgtcaaggttctcgttcttctcattactgagaaattatgttcctggaataatattgtacagacttagaaataagggcattgaacttaattcatttatttttcaaaaggcatgtattttttacctgttgctatatctgctgccagccaagtgctgtgcttggccctgagaaagcaaagagagatagagatgtccatgttttggaacttgacgtccattaggggacataaacatttgaaaagataacactaacaagctaattcaggtatgataataaaaaccttcacagggttagccatccatctatctgtccatccatctattcactcatgcattcatccacctgttcatccattcatctgtccattcatccatctatccatccatctacttctaggttgtgagaacccgtagtattgactctcagtgtgataggaaggccagtgtcttggtgaaagatcaaagagctcatcaaaatttgtcggatagactgcaggctcagacactgatgagacccccctgcaactaccacatcaaaaggcctaggagcctttccatgaccaaatgcccatattgatgaatccgagacaagtgagggaaagatgtcctctgtcggtgttctgaaccctgtggaaatcatacggggaactataaaagatcctgatgcctggttttcttctggagagtctgatttaattggataaggatacagcctgggcatcaagagtttctagatgacctaagtaattctcatttgcaaccaaggttgagaataaagggtgtgtataaggtgagagacttctggttaactaaaggaaataccaatgacatttgtgctttaggtctaccagttagtgggtattggtgcatggtgggacagactaaatggctacaggtcagggtcattgtcaaagagtgagggataaggggttgtgctgtggctcagaggcagagtagactgaggaagaacagctaattccagaaagccatgttgtggtgtaaaagatagtacctgacttgtaatgtctgacaccaaaaatgaccttaatttgggtcataggacaaagacctccccacctccagctatgaaagacagaaaatgataggactaggcttcatattttctagcgtaacgtttggcttgtggtatattcaaaactaagtccgtgtttgttgctgctgagtgactgggctgatactacctgtccttcagccatctagacttgctctctaccatcctcaatacttcatatgaaaggagactgtcacttcatgaaaatcatttatttgctttagcttaaatctactggagattacaactgcctcattttgtcaccttcttaccccagaaggaaatatctccacaagagagcaggtatttattgagttatgactgtcaggcatggaacagatccattggtcagaaataaggaaattgtctctaccttcaaggttctcacagtctggagggaacagagagccatcagggacaataggtccctgtgccatcagctactgggatgtatgactttccagtagaggtacacagcacttgttccaaaaggagcctatgtagctttgggagttctctatttagtcaccttattttttttgtcttcttgttaaactagcatcctgttttactgaatctctgcctcagttgctttatttactgtatacatacatagctcttttgaagacttgatgtcaaaagtaaagaagttcagaacctacggggcttgctttgggtcccaaattatcttagctttctggaaagagaagaatctataatgtattctccatggagtatctttactcacttgtgatgagatgtctgtaaaagtaatcagctccatacatctgggcatgatgaccctcaggcccttgagactcaggtgttctcagctcatggtgcaagttcccctgaaagaaagactcaagccaagcattcaatggttatgttccagatcatagtctcctaaaagccaggggtcctttatgcagggatggtgacatcagaagttaaaaggtctatgcagattaacgaggaaaaatgagggaaattactgtaaggtttttaaaacatgatagttatatatgaactgatgattatataattgaacatgcctaaattgatgtagttctctgtaaaactagttggtgtaaggaaacttggtctttgaccatcaaggaggttgcagtttgtggcatggcacaaagataacactcagcagatatatagctatgggatacatggatggatggatggatgggtggatggatggatggatggatggataggtagatggatggatgcgtgggtgtgtggaatggtgggtggtaggtgggtacatagatggatgtatggatgggtgggttggtgggtgcatggatgggtgagtaaggggggataaatgaaaggcttgttcttctgaagggactctttacaaagagtctttgatcttccagcttcacgtgcaagagaatccccaaggtgagcttgttaaaataagcatattctgggtatcacttcctgattttctggttcagtaagtctgaggaggaacttggggaactttatcttttaaacaagtacctcaggttatcatagtagtcttgctgtcctgaatcttaatgcatctctatttctgctacatcttccatgaagttgattttgcagaaatcattctgtggttccacattgactgcatccaagacctattgccttcagatttacatcaagcacaatttggcaggtattagggatggacccagcagccaagtctttgttgccttaaacagatcccttgtctcttgtcaggacctccttccaggctgctcctgagcaagtctggatgtgacttctacctatgatccagtgggttgggccataaaggagctttggaaagggacagtcttagggtgaaaaagagggagaggcttgccatctgaacaggaatctctcccagaggagagaagagaagcctaggctttaatgaggacagccaccctgtggatgactttctgtgtgatgttatgtggaggtggcttcttttttctctatcccattagctgaattctgtgccagaaggaagagatttggagtcagcaaggcatccttttttttttttttttttttttttaaaaaaaaaaaaaaagaaggaatgtgattgtgaaggaagcaagaaaaggcccaaaggctctggacaagggctaggaggctgaggagttttacacattcataatttccttgtaggccaagcttactctcagggatgacagtcattttctaagaaagtgagattgcttcacattgcatttaaaggcttaaataatgtattctgtcagacaattctctgaaatggttttccaagtgaatgcatcagaaagtgcccagaaagaatgcctggcacaggaagaggagggcattcagaaaatgtgagctgcttgcatcagaatctaacttgagatgtatcattcctacggtaaggtgcacacacattaaatgtacagttcaatgaactcatacttatttatacaactgtgtaaacaccactcagatcaagacagagaacatttctaacacctcagaaggctcatctgttcccctttctaagcaagaagtaccatcagcattaagaggtaaccactattctgatttctatcagcatagttttctgttcctgaattcatataaatagtcacccagtacgcattctttgctgtcttgcttcttttactcctcattaggttgtgggatttgcccacgatatttcattctttattgtcattcttctttctctgccactgccatcctaccaacagtttgtattatgaaaaattgcagacgtacacaaaagttgaaagaattgtactgtaagtactctgatatgcaccacctagattctacaattaacatttccctctatttgcatctctatccatttaccattcctcttgtctatccatcagtctatcttgattcatttcaaaataagttgtaggtcaggtgcagtggctcacacctgtaataccagcattttgagaggcagaggtgagaggattccttgagtccgggagttgaagaccagtctgggcaacatagtgaggccttatctcttcaaaaataaaaaaaattagctgcccatggtggtgtatgcctgtggtcccagctacttgggcagctgaggcaggagaattgctggagtacaggagattgaagctgcagtgaactgtgactacactgctgcactcaacttgggcgacagagtaataccccgtctcagaaacaaaaacaaataaacaaacaaaaagctaaataagttgcagacagcagtcgcttcactcctaaacacttaagcaggtgtgtcatccttgaattactgaattagagttcagtatttgcttatgctagttatgttagtggtatgctttttaaaaataattaaggtgatgtcatgataaggctattaagagccaacatgcattgagtatggactttctgccagacattgcactatgcacttaacacacagacacatattgttttttccattttaagatacagaaagtgggccttaaaggtgctactgacttgctgatatgctttggctgtgtccccacccaaatcttaacttgaatcgtatctcccagaattcccacgtgttgtgggagggacccagggagaggtaattgaatcatgggggctggtgtttcccatgttattcttatgaaagtgaataagtttcataagatccaatgaatttatcaggggtttctgcagtttttctcttgccaccaccatgtaagaagtgcctttcacctccaccatgattctgagacctccccagccatgtagaactgtaagcctgattaaacctctttttcttcccggtctcaggttatgtctttatcagcagtgtgaaaatggactaatacagtgaattggtaccagtagagtggggcattgctgaaaagatatctgaaaatgtggaagtgactttggaactgggtaacaggaagaagttagaaccgttgggaggtctcagaagaagacaggaaaatgtgggaaagtttggagcttcctagagacttgttgaatggctttgcccaaaatgctgatagcaatatggacaataatgtccaggctgaggtggtctcagatggagatgaggagctcgttgggaattggagcacaggtgactcttgttatgttttaacaaagagactggcagcattttgcccctgcgctagagatttgtggaactttgaacttgagaaagatgatttagggtatctggccgaagaaatttctcatcagcaaaacattcaagaggtgacttgggtgctgttaaaggcattcagttttataaaagaagcagagcatcaaggtttggaaaatttgcagtctgattgtgcgatagaaaagaaaaacccattttctggggagaaattcaagctggctgcagaaatttgtgtaagtggcaaggaacctaatgttaatctcgaagaccatgaggaaaatgtctccaggccatgtcagagactttcacagcagcccctcctatcagaggcctgaagtcccaggaggaaaaaatgatttcatgggcccagccctgggtccctgtgctgtgtgtagcctagggacttggtgccctgtgtcccagccactccagtcatggctgaaaggggccaaggtatagctcaggctgtggcttcagagggtggaagccccaagccttggcagcctccatgtggtgttgagtgtgtgggggcacagaagtcaagaattggggtttgggaacctctgcctagttttcagaaaatatatggaaacacctggatgccccagcaaaagtttgctgcatgggtggagccctcatggagaacctctgctagggcagtgctgaagggaaatgtagggctggagcctccaggcagagtccatactggggcactgcccagtggatctgtgagaagagggaaagtgaactaagctctttaaacctcatatgtttccatcagtaacatgggaacaatagtaacaattccacagagatagtattgatggttgaacaagatgtttaaatcactagtaaaatttggccagacacggtggctcatgcctataatcctagcacgttgggaggctgaggtgggtggagcacctgaggttaggagttcgagactagcctggtcaacatggtgaaaccccatctgtactgtaaatacaaaaaattagctgggcatggtggcaggcacttgtaatcccagctacttgggaggctgaggcaggagaatcacttgaacccggaaagtagcggttgcagtgagccgagatggcaccattgcactccagcctgggtaacgagcaaaactccatcttaaaaaaaaaaaaaaatgcccgccttattcagatacacagtctaatgctttccactagaagattctggcactgttagcatctctggcataaactatgttactcaacccagttctgtcgtcgtcatttttttgtgttggctttgcccttcccgcattgtgacttgatcccatttaagcagcaacctctgcacacacaatcttttctctgtccttcactcagtgatgttataatatctagaggcttattgattatttgtttgattctattgtgggcacaggagcagttcttagattaacactattagattttcccaagcagtattgccgtggtttatacaattggacgaaatgggtgatctaatttggactcaatttgctccaaagtagagttggaggaaggagatgctgtgatttggttctgcacctgagaacaagaatggaaaaagttatctccaggtgctatctgtgtgcctcatcaattttggatacactgtgtgaccagctctgaggattccaagcttttttgcgtggcttcttacctatcagctaaagaacctagctttacttatccaacttagatattaaatcccatgatataatttatttttccgtgtgaaatatctcaggaacaaaaaagtcaggttgagttttctaaaggcactggtttaagaggctataggttaagaggagataacagacatgctcagaaacaaatcatttcctgatagctgtttcagatggaaccaaatggaaaacagtgcttctttccgtttactgtacaccccctatcctggcatctaaacatatttgtaatcatactgtctatagaagttttggttctgcttttgaccttaacactaaaatacccttccacaatattataggcttttcatgtacatcgtttttaagatggctataaattccacttagtggctatgactgtagttttttttttaactcttcccctaatagtgaaaatttagattgtttctaaattttccttactataagtaaggctaaaaagtaacatgtgaatgttttgaatcaataaatatagtatgtattaataatattgagctatttcttaagattacattttcagaagtaagatcactgagtcaaagggtgcacactgtttaaaggagcttaaatatattgcaaaactcttttcatggtctgctgatatcactgaaaatggaggtctggattcaaatcacatgtgccaactgttctactttggcagaattacctactgctttgggcctcgggtactaaatttgtgaaatgggaaaaataatagttcccacctcatagagttgcagtggagattgaatgagtttgtagataaaaagcgtctgcgttgtgtctggtacatggtaaggggttcgtaaatactgagttatttcttattaacatttattattgtctccactggaagaagagcctgtagaatatgcagactattcaaatgcttcctttggtccattgttgtcctttcttttctcttctagaactttccccatagtcatgcatctgtccctgggttatctgatatgtgtttcagcctgttttcccaagtttacctgcctctctgagaagcccatcagccctgagagatacctggaaggaaagaggaaaatgcgtgattcaaatcatgttgcaagtggatgaatctagccccaaacaactgggaggcaactactcctgcctgccgaggcctttttttttttttttttttttttttttgagactcactctgtcacccaggctggagtgcagtggcatgatcatggctcactgcagcctcccgggctcaagctttccacccacctcagcctcctgagttgctgggaccacaagtatgcaccaacatgcctggttaatttttgtggttttttttttttttttttttttcctgctgagatggggatttcaccatgttctccaggctggtttcaaactcctgagtccaggtgatccacccatcttggcctcccagagtgctgggattacaggtgtgagccactatgcccaataccccctatgtagacttttaaagaaatacaggaaacagccaagactggtgtcattcagatttagcttgggagagtctagtgggtgttaggttcccacaggatgaaggatcaccatgaacggtcaggacctgacttaggaggactcagaagctggagactgcagaggatggcacagagttccaaatctttggggtgtgtaagagtaggagaggcaggatgggagaggatgggagtgatgccacataaatcaactctgttgcagcctccggggccacatcagtagctgcaggaggaggagggaacagggagacagggagcctttcttcctttcctcacccccagttctgtgtttatacttctcatttagcccataccccactatattaaaagaagatgtataagtgtatgtgtttaatctaccattccttgtggcacagtgcatggtctgcatggcacagtgtgtggtctgtatggcacagtgcatggtccgcatggcacagcgcgtggtccgcgtggcacagcgcgtggtccgtgtggcacagcgcgtggtccgcgtggcacagcgcgtggtctgcgtggcacagtgcgtggtctgcatggcacagcacatggacatgattcatacatgcaagtgaatgagtgaatgggcgatttccagactatccagaaactgtgccccatagtcctacccgtaggaatccaacagggaactgtcaccaccgacccgaggcaggaaccatgtgctctgagccctggccattttgtgtagatggagataaattgtcattgctaattgccagagaccaggtcctggtggtagccaaactgttccctagggagttctcaccaaccttgcaaaatgagatggcagtcttcatcgtggatgcaattatgtttcattgttaaccatcacaagcaacgggacattatgatgactgttataagttggtttcacatgtaaactttgacctcagagcaatggggcaggcttttcccaaggaccctgttgagaggttcatgatggtgacaaaaagcacaagccccagctgccaaggaggctgatatcgggagaggcagaatgtgtcttttctttcttcttcctcttcttcttcttctttttgaaaccatgctcattggttttaggaatcattagcatggtgaagattaaagctattggagatagcacagattgtttcattttattatgttcaattggattggatccgagccatttgcaaagtgcagtattaccataagaagggacttggaatgtttgtcacataatacttcttcatggagaaggcagtttcttaaagaaaaaaaaaaaagacaacttgaaatagcacagcttttttccactttcaaatgtataacaaaatagaactttatatttccagatggactgcctggaacccggggagtggctcagctaccaggctccagtggcccttgtcttgttatttcctccattagagacctggcgtataattgtgggagggagaagccagtggagcagtcaggggactccctggctgtttctgtgtctggtcttatgggtctgggcactgaattcagtcacaaaccctagcatgctcctttgctacctcaggggacaaagtcaagaaaataacactaggattgccaccctgctctctctctctctctctttttttttttttctttttgaggaagggtctctctctgtcacctggctggaatacaatggtgctatcttggcccactgcaccctccatctccctggttcaagggattctcgtgcctcagcctcccgagtagctgggattacaggggcacatgccaccatgcccagctaattttgtatttctagtacagacagggtttcaccgtgttggccaggctggtctcaaactcctgacctcaagtgatccaaccgcctcagcctcccaaagtgctgggatgacaggtgtgagccaccacacccagccactctctttcaactagaacagttcctctcttctttgttgcatatttttgtatttcatgcaaggtgctgtttatgaacaagggagtttcctgcagctttaataaagaagagaaaagaaaagaaagaaaggaaaattcgcatgttgaaaacattgtactaatcaaaaaagccagtcacaaaggaccctatgttatatgatttcatttacatgaaataccccaaagaggcaaatctgcagaaacagaaagtagagtggttgccaggggctggggatggggcgtggatggaggcatttgggattaacagctaaagatagcaggattccttctaaagcaataaaaatgttgtaaagttgattgtggaaattctttcacaactctttgattgtactaaaactttgaacactttaaatgggtgaattgtatggtatatgaatcatatctcaacaaagctgttaaaaaattgtatgaaaactgtgatgggattcaagtagtctaacgctcaaatttcccaagtgccctcatttaagtctggaccacgacaggaacccagatgtggcctgagtagcacatcgtggaatgggcctgtcacctctaccccacacatcctcctgctgttaatgccccctttgaaagccattagctcttttgataaccacagcacggtgttggctctcagttagagactcagatttatccctgcccgaatcattttctttgattctctgcccttccccactacagtgtaaactccatttggactttctctagttcactgtgaatggtttttgaataacatcaattagcataacctcatgcccagcatcgtccttattgttgagagcacagcagtgacaaaggtgcaactcttgctcttgagcgatcacagtttatttggggaacctggtactacctaataaaaccaggggagactcgacccaaggcattgtgtttgagctaggctttgaacaatgtatagaccctcaccaagtatggaagtggaagagtaagacattcaaggtagaaggaacagtatgaggaaagtcagagagctaacaaagattatagtgtaatgccagaatcatgagaaatttgctgagaattcatttgaggccataatttaaaaagataggaggagccatgtgtagaactttcacagaacagtgtgtacctcccctccttcttccttattagtcgtgattcttggggggcaactaaacccagcttttggcaaaagggagtatgttggttcatgtaccaggaagtcttggagtgatggcttcaggcacggctggatccaggggctcaaaaatataatcagatgatttgtttgcttctgtcttttgctatggtggtctctgttttgcttacttctgcagcagattttctctacctggtgggagaaacagctgccagaaaatccagattcccattctcatgctagcttcataacagcaggagagctcctcactctgtttcccagggtgtatatatatatgtatacatatgtatatgtatatcaatatatatatcaggtaagattctagtccagtgtgagccatatgctttattcctgagcaatcgctgtggtcaagagatagactttttagggccgggcacggtggcctacacctgtaatcccagcactttgagaggctgaggcgggaagatcacttgttgaggtcaggagttcgagaccagcctggccaacatggtgaaatcccatctctactaaaaatacaaaaattaggtggcaggcacttgtaatcccagctactcagaaggctgaggcgggagaatctgttgagtccgggaggcggaggttgcagtgagccaaggtcacgccactgctctccagtctgggtgacagactctgtgtcaaaaaaaaaaaaaaaaaaaaaaaaaagagagagataggctgtttaacaggtgtcgtaggtcatgtatctacagccatggaaagagaatggagcactctaatggatccctgacgggtcaaatggagcaaagtgtgcttcccagaagagcataagaaaaaggaagggtactgggtggaccaaatctattgttacaatatcccttatattccttagggttcctttttttcaagttaaagcattgagtcatgtctctgataaatcgcccccccaccccgatccccaccctctgccgccctggccttctttttgtgctgttgggttccaaactttacctgaggattttcacatgcacatctgttaaatgccatttaaagagaacactaacaagagaaagctagttcatttttcttcctgggacctcagtttcctcatcagcagaatcgggatattagtgcagaccttgcaggctctttatgaggatccatcgggagcctcaggcgcacactcggggagcattggagctcttcccaggccgaggtaggagtttgtccacctgctgtttactccgaaacttcttgctccacctgtcactttagaagaccctgatctgccggaaggtctccccgtatacccagcagcccagacctctcaggaaagagcaggctgtcgtcctgcattggaggaggaagcttggggcaggtggcagagcaacttcatttccagatgaaactgggctccctggccatcagctgccgtgcttggaggggcgttcagacaaagagccaaatttaaattcatgtaatgttgctgtttgtaacattgaatacttaagacatctgctcagagtctcgcattataaatgaatggaaaggatccaggagggctttattggatgggagccgtgaagtgagcgccgtgtatttcaaagcaggatcttaatcagacattatttatatctataatattttacaaattaaaagcagtagaaatagtcactggaaggaagtcagcaagcaggggtgaaaaaaaaaaaaaataaaagaacctgaagccgccaagagaggctcactgaccatctctgggggagggagggtgaagagtagcaaatttaccgtcatcagcaggtgtgtaaatgttccatttacattgaatggcacatgtcataaagtacataccgctgcacatcccaccctctgtttctgtttcaactgcagagcctatttttctttcccttccagctcagctgccttctcctccctgacctcaggtcacccaagactcccactttattatttccttttacttttagttcattattctctgtgattcagtggaaacataaaaaatggtttttaattttaattaatggcaaacttagaacagacccatttaataaatctgtcctctgaacttaacacgtctccccgccttgtaagggctgcctgtcattttattagcgctggagcctcccgaccgaagggctgagtaattgacaaaaactgcaggtaaggcaagaggcccgtaattgattcataagatcccttcctccgatcgcattgaagagttaattatttttcctgcagttgggactcagctgttgtttcccctgggattaaacagctgtcagcattgttaatgacatcaaattcatgcattaaaatcctctcattcccttcccgtataaggtggggttgcggaaatctctgccacgtccgcctttatgaaggagtgaaatcctaagaaagataaaggcccttattacaaaaccacagaccggagcttgtgttgatggaatctcgtaatgagtaattaagccgctttgcagaagtccgggctgtcatcctggcgtttgggtacttatgttccctagtggagacagccgggtagactggggaaggtgataaaagggagaaaaatagaactgttctagaacgatctccacttttaacagcacaatacagagaacagagctactcaataattagccaaccaagtatgaattctcatatgttcttaaagtatctgctgatttcttcaaacatctctaacaacatgtctgatgaatacgaagcctccctttatttatttattttctttttgctttctttttttgggggcagggggcacagtttttctttctgtctcagtctctcaaactgtaggaggaccaacttcagggttttattttgtttgctttgctttgccttgtctggtttttcaaagtgctcttttaacaaatgaaagtttaaagcttgagttcaatttgagtaatttgttcccagagaaaaagtaaatgaaaagtatttctgggtatttttaatgacacaagtttctgtgctgatatgcgggcaggggttcgggagtgggggcaccagggctcatgagccgagagcccctgcttcccttggaaaacggaaatttctatctccaactagggaaaaatttgcatgtgtagaattttggttttttcttcggcgtgtttatttaatttaacattacctatcctacgattatttcaaggtgattttattactagtcagctttcttttccctagcacaaaactcatgcaacatttatgttgaatgtttaaaattcttttctaaatggtttcacctttctgaaaaaatcttgcattcaaaaagtgtaaaggactctcctcatttctgcgcttgaaagtgcagtgtgatttcacaaatcaaacaatatcaggaaaattcaatctcgttaatacttttggagggaaaagaaggcaagcgtactcttcagagaacggattcttttggatttgtgttagagaaaaactgtctctaatgaccgcacagcacaaagcaaagcagttaaatgaataaccgccttccagtacagataataaagcaggggaattttgtgtgtcacatcaataaacatcttaattgaacagtacgtgggttcttccctagtacctgccttgctatacactagccttggaaagagtcttggtaaattgttcagcctcaagttccacaacaaaatgggattctgttttctagaacctggcctagttatgatgtgatgaatccgtctctgttaaggttatcaactttaataaaccatgtattatttccttaaatattgtgcaatgtgcagggaattatttcagttttgttttttatttagcacaaacctaaatattacacgtagcaaatgtcacccgatgcaactgtctgtcctgaagaggaggacagattattctgtggctacctaatggtgtttacagagttgccactttgccaaaccccaagacccacacttggtctctggtgttgggtccgccagctctccacccttcagaatgggatgtttagggcgtaatcttctgagacccacaacctaagccgggaagcagaggcaatttattaccccagcttcctgtccactggaggcccggggagaccttgaaatgctcagctgcaagtcagggtccaccgatgcagcctcggaatttaatgaggcctctccggacccaaagggagatggacatttctaggcttgtggaagggactccccagcccctcttctctcctggtgagaccgttgttggatgtgaaaaggccttcactattgtcaaggctgggcccctgcttttgccttgttactctgcattttaactctggaccagaattgattgccaccaataaaagatactccagtccttaaaaagtcaacattgttatgttttacttagttatgacttagtgaacacctatacgaattagcctcatctggttcaagggttctcagatgggaccacttttgcacccagggaaggtgtggcaatgtctagagacatttttgattgtcataacttaggatgaggtaatagtgtgctcctgatttctgggggtagaggccggggatagtggttaacatcctacatgaacagggcagacccttgcaacaaaatcttacgtggtcctggatgaaaataacactggaggtaagaaaccttggcctagagggttccccaacctttttttttttttcattatggccccctcccccaggagccttttgagatacgactttcctaatggtctttgcccatgaaatctgaataccacagatgtgctgaatgcctgttcatgtaccatatacacatggtatatgcctcgtaaatgaaagggtgaacagtgtttattccccaactgtcgtccctcaaaaccaatgttaacacccctggatgtattgtcacccctgttgggaatacaccgctcagagaagggttttgtccataggcaacacagagccaattgaggcctttgggcaagcggaggtcatgatggaattcagcctttcagacaattctgccaggcccttggagggtgggaggaaacaggcaagacctctggctcctagaaccgtaaggacccttgccattaggaccaaacctcttccagctttctcagcagccacatgtcaccccctcttccaccctttgccctgccaccctccatcccctgataccctcctgccttttagttgccggtgcttggaaacctttgcaaagtctttttatggagatgccatgtcctttcaatggtgcgtttagccagcgccccgctctgggctccagcaacattagggcattgttattccatccgaatgacaatttcaagctcacgtctttgttgtccatcctcgaatatcctgcaccgttcctggcacagagtaggcactggataattatttcttggatgaaagaatgaacaaatgaatgaatgaatgaaagtttttttccttgcaaatctccctgcacactttaatcttaccagcatcttgtgaaacactcctacttctttctgatctttatttcttacgtagttttgaaatgagaaccgatgaagctgcttttgctcatggtacctcaggtcctcgctcactcccagcactcagggctgtgtggtcagagtctcagattcggagcatgtgatgtgcgtgggcctgtgactaacagccacatggcacgcaatggtggcagcctgggaggctgactgagcaagtaatttctgcttaagcaagaacgtgaggggtgatgtagttgcatgcactttgccatcatagcttgatctaggtctcagcctgggatcttgcagctgcgaaaagcatggcgttgcgtttccaagcctgaacatccacacccgcgaagataagaccatctcttggattaatgtgacgctgaaataaaataatccaaagagaaaatgcctgagacccaccaggagctcaccagatactacttctatcttccccactctaggtctttttactgcaactaccgtttaaaatactttttccatgaggcagatcttagtgctgacagtgtcagtgtctttaatgcctggttcagttgcaaacatggagggcagaggtttgatagcatccaaagtatgcacgccgcactccacctcccatgcccttttctttttctcagggccatcagaaaggaagtaactggcttagatttgacacctctttttttgttcgttttatgtttttgaatctagcatgtataagctcatcagagagctttcccctggcctgggacaatcaggtttcaactgaggctcacgcacacgtcaacacaggaacctttttgatgcctccaggcaatttcctacaagctctaatatcttcctctttactcccatatgtggtatctctggtaccctatatatcattcactcaagtgtttgttttgaaccacttattttggcaagacttcttcagacaggagagccctgagagctcttcaaaggctgggcctgatggtgtttgtcagagaggttcgagctcttaaatttaaatggcctcccacagggaagcagaagtccttttggatcctccagaggcctgagatcctccagatcctgttcatttgccttattcgttatgaccatagaagtttgtggggtggcactctttattctgtcctcgccccacaagcaaagcacacaccagaagctataaggagatgagctcagtaggcctgtcctttactttattttccctattagaatcccaccatagacgccctctctgcatgtgtccttgtctgggggagtcgcttaatttcctttttctttgaggggctataaaatttttgttgttacaaaaatgaaaggggagaggagatagaagaaggaaaacagtgaaagctcagcctcgaaagaagtgcttaaaggaaaggaggttctgacagagggctcggatcatcagcaggggcagggggtgcagggggtgcctgcaagtctgtgaccgtcctgaaggacccccttcctaggatcccaaacatgcactcccatcccagcctcacaccaagctcccatctgggaagcagcagacacacataaaagcaaggaaacttcaaggacgctttttgttttcccctacttttaaaaaattgaggtgaaattcacataatataagattaaccatttcaaagtagacagttcaatagcagtacattcacaatggtgtgtaaataccgcatctatttccaaaatatttgtatctccccacaataaaagtctgtaccaattaagcagctactacccattcctcttccctaccattctaccttctgtctcagtaggtttgcttatttgggatattttatttaagtgggatcatacaatagcatcatgtgttcaaggttgacccacattgtggcatgtatcagtacttcattcccttttatcactgaatagtattccactgtatattgataccacagttggttgacccattcatccatccatgggcatttgggttatttccacctttttgctcttgtgaatccatgctgctgtgaataattgcatatgagtatttgggttcctgtttttaattatgttgggtatatacctaggagtggaagtgctgggtcacgcagtaattctttttaactttttggggaaatatcaaaccgttttccacagtggctgcaccatgttgcattcccaccagcgaagtgcaggggttccagtttctcacactgtcaccaactctgtcagtctattctggcactgctataaagaaatgcctgagactgggtaatggctgaagaaaagaggtttaattggctcatgattctgcaggctgcacaggaagcatagaagcttctgctactgggggcgcctcaggaaacttataatcatggcagaaggtaaaggggaagcaggcacatcttacatcgccagagcaggagcaacagagagcgactggggaggcgctacacacttttcaaccaccgaatcgcatgagaactctctcactgggacaacaccaaggagatactgctaaatcatttatgaagggttcatcctcatgactcagtcacctcccaccaggccccacctccaacactggggattacaattcaacatgagatttcggcggggacacagatccaaaccttatcaccagcgcttgttatttcttcaggtacattttgatgtccctccccactttactctcccctacaccttgaagcaggtgcaatcattttaggctatgaggaccagcatcgaccttcatcagcatctgctctcctttacggccaggtctccttcgtcctccctgctcagaatttcagtctttttttttttttttccctatacagacacaggaagtatatattttcctctcgaatatcacttgggtcttatcttgttttatgctacatgcatgtggcttcccccgttacaaaaagaattcacattattagagaacatttggaaaacatacagaagtaaaacaagccatccccattcccacctcccagagataacgcctgtgttttagttcatctccttctaacctttatagttttttttctatcatattagttaggcattggtttggctccaagtgaaaactgcttctgttattaacatcagcagcagcaacaagaagagagaagtttatgtctgtctcggaatacgtacgtgacaggctcccccatcgaggtgctcagatatggtggccactgcatgattttgctcaggactgaattagaggcaggtgaaaggccctcactccctggaatcagctagcgatggctaaggctcctgtgacggtttctacagaggttccacccagagaggagagtcaaatgggagtttctaccgatgctcttgaaaggatcttgttactcagatgtctctaagacaatgatcagtacccatctctcagagcctgtgtagccgtccatgcttgaggcatgagatgctgaagataaaggtccccagtggtccaggtttttccttctcagcttggaaagcagcaggaaaactgcactgcatttatccaaagggtgtgattggtaagtgtgggtagtgatatagaataaatcaacgtggctgggtgcagtggctcacgtctataatcccattactttgggaggccaaggtgggtggatcacaaggtcaggagattgagaccatcctggctaacatggtgaaaccccatctctactaaaaatacaaaaaattagctgggtgtgttggtgggcacctgtacttccagctgcttgggaagctgaggcaggagaatcacttgaactcagaaggccaaggttgtagtaagctgagattgcaccactgcactgcagccttggcaacagagcgagactccatctcaaatcaatcaaccagtcaatgtgtgcccccttttcctccaactcccaccccaaatccttgctgaatcatacctatccttcacctttataagcatctagtttttaaatctttgctgtgaagttggctgtgtgagctccatttgacagatggaaaaactaaggtagtttgccaaagatggctctttgccttcaggatttccatgtctttattttgagtaaacacttgcactgctaattttattccaacaatgtccttggaatggttttagttctcttggctgtaaccaagtctacacgataccacttgaattgacaacatcacagtcaaacctcaattttcacaattaattgtgccgcagttaattaaattgactgcctggcaatccagtctcaattaaaatactaatagtttatttatttattttgtcttttacgaagcgttttcttttaccatctctcaggatcctatgtaggtatcctgatggtaagaatgataataccatgactgattattccatagttgcaggaaccccacatggcatttcaaatcacaatcagaactttgaccttgaaaggggacccggatcagctccattctcccaaggagactttagctactacctttcttactttttgaataagtattttgcagggcttattttcatcatctggaaaggaggaatagatagggttatcttgaaagtcctctcttggaagggattatggttctgtaatcctgtaggactggactcagtgggtaaatgtagaggtgatggtatctccgtttttattgtcttcagaaatgttgagatcgagtgatataaagtcacagggttggccccacagtttagttcttggcttatgtagaaatctgtgctaagaagcgctgtgttgcgtcatcatggggcatttttgtatgtcatgcagtcatactttgcagacccctgggagcctcattcgagttcttcctgtggagtcccatgccttggtgttgaaccagtgtcctagctgggaggaccgttgtactgcagcactttcctaaactctgcatgtggtctccatgatgtcctggctgtgttagcatcagaaatggctttgcccacatctcccaactctgccctcttattaggatttctctgcgctggctgatgcctgagccatctaatgatctttacgggaataaccaaaaatgctgggtggggggggaaaacgccagcagatctctttagggcagagtagggagggacacggacaatgtgggcagctgtccatgcagcacgtatcacatccaggatgatgtttatatgaagcatcatttttttttttttttaggtggagtcttgctctgtcatccaggctggcatgcagtggcacaatctgggctcactgcaacctccactttccgggttcaggtgattctcctgcctcagcctcccaagtagctgggagtaaaggcacatgccaccatgcccagctaatttttgtatttttgttagagatggggtggccaggctggtcttgaactgctgacttcgagtgatccaccggccttggcctcacaaagtgctgggattacaggtgtgagacattgtgcccagcttggagcatcttaatttaagccctctacatccctgcacggtagatacaaccagctccgtttccaaggacgaggagcaacagagtgaggtcatttccctgagttacactgaagatggtctaatttcaaagtccttcctgtgtccactttgccaggtgccccccgaaaagcaagaagactccttcaagcatcctgaagatttggatgctacaactgtatgtcctgctggagagaccctcccagaacattgaaggctccagtgttttgactggcagaatctcagtttcaacatctgtctctaagggctctggacctatgctgggtgaaacgtgttgtctgtaggatttggcccatctgagcctcactggggatgggctaaactccgtggggtttgtattccttctccttcattgctcagaggaaaagaagaaaaaaaataaaaagaaacgaccccaaacagcctctttcgtgcacacacgcctaagaaataggaacatgaatttgcattccttccaactggtgtgtttccaaaatacagacaggcaagtttgaatcactttgactttgaaagcgtgattttgagcaatcatctggggaaaaaaatacctcctcttcactaaataagtctgtcaaaaagagtcatagtacagcgtgccattgccagaatacacgtgtgtgctggtaagctggccccaaccaattaaatagtgaaatgtcgactgcattcaggcccttcctggtctgcagacagacttgtgttagttcattttcatagtggtgtgtatgtatctttagactttaactgacagattcccacagtgagtagagtagggagttatcaattacatggttagctaggcgctgctattgtatgctctatggcttcttgacaggagcaggcagagaaggagggaaggactaatatttctggtgcaggaggactgttaatattttagaccgggctcctcaaacatgtatgcttatttagtgaggagaaaatgtgcatttgaatcctgcaaaccctcgagaagtttgcattaataaatagtgattaccagaatattctcttctaaaatatattttatttatcaaatgaatacccttctgagcccctctttatccttcctgtgatggctaaactaatttcatcaaattttgatttctgtgtggtgatgttgtgaacagtgcctgaaataataaaattaccctgagcagattgcatataaaactgtttgcaatgggagaagcagtctttggggctgtggtttcctttggctgcagtgtaatatattcctttgtttcttttgtgaagtatttattgtgggtctcctgtagtctgagtttcttgtggaagtgggcttgtgttttgcttttgtagactgacactgagaatagcatccaaacatctttttcccaccaaggcatcaaactccatcgttaggaattccttcatagaatcaaagaatcagaaagagctgaaacatagaccacggacactcaaattgtttatcctgaaatgaatgggaaaacctaagctgaagaaaggaagtgtctggccaagaagctggcgggagagtagaatcaggaaccagggcctcctcgtatctggtctcacgcttcttccgtggtgttctttcttaagttgagcattgcattctccttggataggatggatattttcctgggaaggatgatacatgatgtatttatccataaaactgaacaggtgttatgtgtgccttttctaataggaaagaccatcatgctatgaaaagagaggaaggggagaagaaatggggtacgttaagatctcagaatgagttgtggggctaaatgttcagcctgtctcccttttctccttgccacaccactagattatattttctagactctcctggtgttagatttggccttgtgacttccagccaatggaatcggctgcaggatgaaactagtcttgatccctgaatgactgcgtggagcacatctccttctggtcaataaggcatttcaggagtgagagataaacttctattgtgttaaacccctgtgactttgagacatatctcctacagcaggtggagttagcttaactaatgcagaacgataggactggtgaagcagtccatctgttatgagagctattctttttttttttttttttttttttgtgagatggagtcttgctctgttacccaggctggagtgcagtggcgcagtctcagctgactgcaagctctgcatcccaggttcacgctattctcctgcctcagcctcccgagtagctgggactacaggcgcctgccaccatgcccggctattttttttgtatttttagtagagacagggtttcactgtcttagccaggatggtctcgatctcctgacctcgtgatctgcccgccttggcctcccaaagtgctggcattacaggcatgagccatcgcgcccggccagagggctattctttgtcttttatttgctttgagtccggtataaccatgtggcacatacccctgtacatgtttgccaagactgctatatggcagagcttggaattcttaggagctttatcaggtaattgcaagtcccccacctccaagaaagcactctctaggtcaagaatcagcaaatgttttctatagaggcccgtaaaattaatattttatactttgtgggtcatatagtctctgtttcaattacccaactctgctgttgtagtgcaaaagcagctgtagacagtaagtgaatggatgggtgtggccgtgtgccaataaaactttatttacaaaaacaggcagcaggccagaattagccctgtgggatgactcacatgagcagagagttctggcatcaactttgttcggagagatactgacatacttctactcaagtaagtcaatgtttctgtctcaactggttgattggaacaacatacaaactgacccttaggaaccttctaccaaaaatatcctgtgaatcttcatacttttgtaataccgtttagttagaagtggtcagactttcttcgtcctcttttcgtgatttcctctgtggtgtctgtggatcgataccggcagctcaggtaaggaacgtgtgcaggggatgtaacagaaaggagaaagacgaggaagaagggtgcatggagcgtgcaggggaagaactgattcttttttcagttaatcggctcatcaaggttctggtgttgaagtctgatttcatttgccatgttaagaggatatggacagatactgggcaaaaggaaaaaaaaaatattggatccttgcccagctccaagtgttgctgagtcccttgccccctccaccccgctctgtcaggagccaagctctggccgcccagtttttggactttgtaactgtttccgaacggatcagattccatctgaattgcagatggctttagccccagcagcagaggctgccatgacatcggcatgcgatttcttccaggacttaactctggagagagctccatttcctgttgatcatgagggttttacaggcacaaacgctgtcttctgtcactctgtcacagtgcattatgtcagaatagaggaagcagttcagcccgtaaatctgtgccaccggcacgcagggtgttgtgttgtctccaatgtgccttgtcaacaccacagggctaatagcagtgtcagggtccccgtgccatgaatcacttcacatctctggctagtacagatctctccctgtcactagtggaagtcgcctgcactacattcagaataggggccaggcgcggtggctcacgctgtaatcccagaacgttgggaggccaaggtgggaggatcacttgaagtcaggagtttcagaccagcctgacaaacatggtgaaacccagtctctactaaaaatacaaaaattagctgtgcatagtggtgcatgcctgtagtcccagctactcaggaggctgaggcaggagaattgcttgaatccaagagatggaggttgcagtgagccaaggtcgtgccactgcactccagcctgggcaaaagagtgagactccatctgaaaaagaaaaaaagaataggcacagacaatttacctggatcctcacattgcaatgctgaccactccggaaggagtgtagaagttgcagctcatgcctgcattccaaatggctgccttctgcagtcccgtcagccaggatccctctcatacaaacaccttgactggccgagaaatgcagatgctgtgtcaaaagttcatggctcagagccaacaatgcactgtgctgacctccaattttccttgaggaggggcatcccagggtcagaattttatgcaatgcaagcttgtccacgatggcatgggagcgtgtgggaatgtcaagatgaaccggggctccgggagacatttatggagtcaggagcacacatacattcctggttctgtcagcatttccctaggcgagatgagtcacacatttatatttttacatatgcagcgcgcttgcaattttccactggggatgatagaaaaacttattgaaaatagttaatcagttttacaaagatgccataggtagaggtgcttccagacctatagttttgaaagtcacctagaggataccagtctgactcagagctttatgaaggcatattcctaatatcctccctgtgctccacgaagaacaattggtttggacatgaactggtttccatttttagactccaggcccacagtattctaagtaggttggggctgtgctgattgtaccactctttggattttagtggattttctttttaggatttcatgtaagtaacctgtgcagagagtgaggataaataagaacaagaatgacaaaccgataggctacttgacatcattccttaattccaggtcactggcggacatcactcattcatcagtactctgtttttctcccaagaatggatctgactcttgaattctctttaatagagtgttctgggaggctgttaccaattgaccagggttgatgcacatgttgaaacatctttgccatttcttgatagcttcagaagagattttaaagtactattattttgatgttgttagctttcaaagattaattccacagagatttttgggcatctttttgataatacacattatgcttgacttgggagtttcaggatgcgcaagagactccttttgactgcaaggactcagtaaaacaaagtatttcaaggtcatgctacaaaaagtcccaccaagagcatggtcaggaggtacagtgcacttacccacacggagcagagagggatcagaggaggctggctggggaaatgatcctagggctttcttaaaggacacagcgccatggttatttaagtacagcttttaaggagaactaacttgccactttgatagcagtataggactccaatatttctcatttgtaattttcagaagcacacgggaggtctttgaaatttaatgtctccctgcatcacaaaccaaaagacgagtcagtttataagtaggctgtgcttattaactcagtcctggctttattgattgctttaggttccatgatctttggcatgtgagtggttttgctttgttttgacaatgatctttttgtaccttgtatcgggtaggttggaatgtgtttgaaaatttaagaatattttcctagcaaaggcaggatttttcaagtttgttcatgctggagctcctgccacgtattttgtccttttttcttttttctagcaactctcgagaggatgagacaaatggattgtgaaactggaaggagggtttctcattttttaatccattgttttagtgagagtttaaagctttcctataaaatatgtgggttgagaaaaattggaaaagacctcttcaaggactttcctctatgctccctcatgtttcaagtggcttttttgcatgatggtgcatatgtctttgtttctgtacagggccctccatgttcagaggcagagtaacgtgaattcatttcgcgctaatgagagttgcgatatgtcggcccaaactctctgtgtccttttcttcttgggctgatgaacttgtcaacttttaaaaaatgtgctctccaaaaatttccagcaggactttcccaccttgctgtttaaacagtgaatcagccctgtgggctttgctgcttacaacatgattccggtgaaaccacaggtctcgtcatgtcccttctgtatccatggtagtcccagtgggaaagaggtaacaaacccaaattgagtaatttcaagaaattttaataacaaaggggctattttataaagggggggtggtcaaggtgtagggaaacataaaagagagcgaatttctggtctggtgctgtgggtcacgcctgtaataccagcagtttgggaggccgaggctggtggatcacctgaggtcaggagtttgagaccagtctggccaacatggtgaaaccccgtctctactaaaaatacaaaaacttagctgggcatggtgacaggcatctgtaatctcagctcctcgggaggctgaggctggagaatcacttgaacccgggaggcagaggttgcagtgagccaagatcacgctattgcactccagcccaggcaacaagagcaaaactctgtctcaaaaaaaataaaaaaaaaaaaaaaagaaagaaaattaatttctcagaggtagtaataggggtggctgtcaccatccttggccaaggagagggagcagatactggagacagttgaaggtgccaggatggagaagactccttggaaggagctgtaacctttggttgaggaattcagcctaccactggtaatactccctctccccaggagaggtcccagcggaataaacatccccgccccttcaactctttgccattgttcaagccctgctagaaaccagatggcaaaaggaagttactgatgtgttcatattggtcaactttttcaggcacgaagaccagtacagaaggatggaaagtgcatttgggtagggaaatgggagattcctgcatagctgtcaagttagtttcttcccagagagaaagaccggtggctgtagtctgtgccccactcccagcctgtcctttctcagccgtggcttgtgtgcatccctggggccagcatgttgctgcgagccccaatcgatcagtggagaaacgagctctggtgggcagtcaggcaaagcagatacacgtgcttcttttcagctttgttggaaggtttcattttgcttcaggaactaggcaggagaattcctgagttcctgtacaacctgagttctctgttaaaacaaggaggaagtaatcatcctgagttcgatgattcagagtaagccatttaacttgtagagctttgggactaacaatgatccctttttggagtccttaattactaaaattatcagcatatttagagttctgaagatgctgaacccttattgtatctccccagggttagtgagtaattgggaatagtgttccatcttggatgcccccatccactaaccatctttcctcttcgggtggttctaagaattctaattcaattagaaggccttctttttagtttgattagttcaatatcaagagctaaatacattagcttatatatatgtctgatgaactcatctttgcttccttggatccccaagatagaatggccctgatgcagtcaaaccaccctgcagaatcttaacagcaccacaaatattgcatccaggcatcctgcccatgctggcttgcaggctggggatccctgtccatagcgcccatggctccaccaccagtcaaaggtagtggggccagcagtggactcctgtgtggttcagctctcaaaaatgtgaactgaaagacacagaaaaagacttgtgtttggggataaatactgagactgagcagtcttgtggattcaggaattgggcatccagttgggaccctttgcaagaagggtgttagggagcagagagcatgagtaagccagaagcagagcaggagagagaatggagcaggtgtgcaaagagggcggtgagatgctgagagtaatggggctggcccaggaggaagtgagaggaagcaaagtgagacagaggtggtgtgtgagcgtgtgtgtgtgtgtgtgtgtgtgtgtgtgtgtgtgattgagagagagagagacagatggagggaaagagaggcgggggattccaggtacagtggctcatgtctgtaattctagcactttgggaggccggggcgagcaaattgcttgaactcacgagttcgaggctagcctgggcaacacggcaaagccctcatctctacaaaaaatacaaaaattagctgggcttggtgacagacgcttgtagtctcagctactcgggaggctgaagtgggaggatctttagagcccaggaagtctaggctgcagtgagccatgaccttgccactgcacaccagcctgggtgacagagggagaccttgtctcaccaaaaaaaaaaaaaaaagagagagaggttgagctcaactgatcagcatctcagattaagggcctccattccccccatgctttgtaattgctgcctgttttccatgaagcctgactgtgcattggttctaagtcatgggctctgcaagatcctccttgtgccttgagaagggccctgtccgcagcctgaggagcctcaactgttctctgcacgacctagttctgggctagggaatggctgtctagcttcagtggatttccagagtccggagctactaaaggtcaacagctgtgttactgcaaactctgtggcctgcattctatcaatgccaaaatgcacatcacactgacaacagctctttgtttacaccggggagcccccaaagccccagggtaattccatcaccacccaagttgtaagatggtagagcgaacaggccagaatgtgataaagtaaaatgaaagaagaaaaaggaggaaggaaaaagagagagggagaagcacatagaggaaagaaggaagaaggaaggaggaaggagggagggagggagacagggaaggaaggaagtctggcaagagggcacagtcagacctgccaggatccctctgctgtcttaatcaagctttgcctcagtctttctggactgaatttgtctctgtgttcacttggcattttttaaaaggagacaaaacaggtgatgaacacagcatgagtgatttttcccttaagagagaggtgtcatgctgagaaagaagaaccgacctccaggggagcttgtcttcagaccaaaaccctggcaaggacagcctgtttggatcttggtcattttgttagatttataaagtgcctttgaacagagcaggacactctggggacaagtcaaagcatggcagccttcagcttcccaaagaagagttgtggagaaggaaaagtgaaggaaagtaccttactaagtcattgatggcacattcagcccttgtcaaagtcaaagaagaaatttggagaaattctcaccactgtgcttaggagtcaccctgaactatttcttggatgaaattaccaccctcccacttttggcaatgagacagcaagcttggaatttggagtccatgttaaatccaggtcccagccaggcacagtggctcacgcctgtaattccagcattttgggaggctgagatgggaggatcacttgagcccaggagtttgaggccagcctggtcaacacaaggagacttcatctctataaataataaaaaaattaaaaattagctgggtgtggtggtgcacacctgtagtcccagctactcaggaggctgagatgggaagatggcttgagcctgggaatttgaggctatagtgagccatgattgcaccactgcactccagactgggagacacagcaagaccttgtctcaaaaaaaaaaaaaaagccagattctccacctaccagtggtggggccccttgggtaacttgttttcactccctcagaacctcagtttcctttcctatacaacgcaagccataaggttaacccctcctcgtggtgatgttaagatgaaacaggaaggtgaggggcttaacacatttccgtgttcccataagctttcaggagatcttggtagttttcatctcggtgttcattaccatcatcactgcttcagactcctgtccatgtggggccctgtggtcttgcgatcacctccataaatgttcctttgttcccgcctaacacaataccagccacaaaataattctcaacacatattcattagtggatgcaggggcgaaatgaaactcagggggttgggaaactcacctgaaggatcttctccctctccccactttcaggctctcctttcacatgcatgcattaattcgttcattcttggaatctacacacctgtgatgtgctagttactaaagatgtagcaatgagtgaaaggtaatcctgtccttgaggcattcacaggtaaagaagcctgcttgggacattgggccgtgagctccaacgatgtcactattcttctaggctttgtggacctttggtcaccccttctgtaagaccaactcccttatctgcctgtacagtgttctgcgaatcccggtctctactaaaaatacaaaaaaaaattagccaggtgtggtggtgggtgcctgcaatcccagctactctggaggctgaggcaggagaattgcttgaatccgggaggcagaggttgcagtgaacccagattgcgcctctgcactccagcctgggcaaaagagtgacactctatctcaaaaaaacaaaacaaaacaaaaacaatttggctccagtgagctcattttacgttgtatgtaccagtatgcaagtgttgtatggatgtgagcgtctgcgtaggtttttatttttctctctcagaatgaaaggtttgattcgtaccagctccccatcccttcccatgatcccatcttaatgtctgttgtggaagttggcccacagaagcctcaagcctaaccaacaagaaagatcacttcatatgcattagctggaaggtagcaagaggaaatcgcctgccagggtccctgactcccggaggaaagtgtcctctgagccctccttgagggacataaatagcctcaaaagtcactgaatgctaagttggctttctccccaaaccttctaagtaggcagtcaggatttaacgacccgcaaatttccaattttttagtttatgaaaaaatatatctacgtataatttttgcctccattagagtctcatctttaaaaaaaaaattattcagtgacttcctccctctctttccaatgaggaaaactggactatttatgctgcattttaggctttttttcatatataatttttcatataaatgcacattttccccttctttcggggaggaaatttaacttttgtggaaatgtgatgtgtgtttaaattaccaatttcataggcaatatgtctgataattgcagagagatactgagttaacttgtagcaatgagtttctgtgacaaagggaaatcagtttgtttgcagtaagccgaggataacggcgccgaaactttactatttgggggtggggggaggttggggaagggaggccctgaaattgctttttataattaaaaagggaatctcagatgttttatatcttgaatatttacaataaaacctttaagtgcttgtcaagagggtaatgtgtcattaactggggactctgcctcgcctctcctctcggacatgacagtgcggctggataagagaagagtaattatagttaagcagggctgccaggtgtgataaatgactaatcagcacgcaggagcctcagtcctcaaaggaggactattacagtgttatcagctgcgggcctgggtgtacggagcccggaacagggatggggacaggaccttgcgctgtgcggcttggcatgctgctccagagtgagcccatggctgtctcttagttttgtcaccggcggctttatgtggctgccacggggggacaggaaacacacaggggctccagcaatctgcctggtgctaatatttatataacacactcgccagactccatggcctgagtccgggggtggcttttcgtggtgcagcttggatggcatcggaacctgcaagaagccaagacgcctgttctccacggcggagcccgctggtcggtcactcctgttcctttcgtgtccgttgggtgcaggcattatttccagtgtatgtgaccgcttcccccgtgggaacagtgtggcattgttccctgggcaagccaacagctcagccctgtcctagagaaccctggagctacgacgagggtaccctggacccctgtcctaaatgttctttgactctgcttagccactgaggatgtttgcatttgattcatttgcttattatgatcaagaaacgttacctgtcaacattggataaaccatccgagggaaattaatcaaaacccccttcagacaaactgcatcacatcgattctctccttataggccttcttgttttgtgttctctgtgtgtgttttttttcccctagcgtgctgaagggtggcattggagtaccatttaaagaataatttttaagaaatgaacatcaggacatagacgtctgaatatgaggaagtgcctcatgtgaaaaaggacgtaatgtgctttaaagaaagaagaaggagataggacgacacttttgatacaaaggttatttttataatacttgcatttttatcggttcacgtattttaacagggagccctgactgaagtcacaaaaattatgactccggcaccgaggtacttatctgacaaatgcaatgcgaatggtcttgttcttatcaatgagatcagatttcagaaatgaatgtgaagaccgaggcgttgctttgtgcacagataaccttgcaggcgcaaactcccaaaccagaataaaagaattctctatgaaataatgggccaggaagcccaatcgcgtcacactgtaatagacagtggggggtggaatcaaaagggggaaaaaactcatttcatctcagttaatggcagggaaacgaaggcagagaaggactttctttggagcggagctggtacgacaaagagcagggtttcgccgtgtcatgcaccatttgccgttgcactagggctcttttcaggagctgtgaagccattattataatgtgaaaaaggtggaaagaaatactcccttctggacactggaagggcaaatgaggtgcaagccttttttttttctttcttttcttcttcttcttcttctttttttttttttttttttgtttttcctcccagcctctctcctttcccattatgcacaatgcgctgagaaaggattcccagtccccctggtaaaaagtctggaggatgccgaggagttcactgtgcccttagataataacagtttgtcttggctctgatcactcctttttgtgacttagctggctgggaagtagcaaaagtatcttccaagctcagcttctctctgcttgcattctttccaaatacgtgattccaaagcccatgcccaatccttgcactgaagcttttagcaggaaaggtgaacagaggcatctggatgcatcgcggccagtctgccccttgcccaattccctcccctctcctgcctacaggtcatccctgagaagtgtgcctgtggactgcgttctttggggtaggacatggaatgggaagatgaaaagaaagccttcctttttctgtcctcagccgtaagaaagaatggtttcttcacagtgccgattggtaaaaccaagttctttgtaaattatggaacccaagctggaacttggagagcattcttctaactgaagataaatatggttgccactgtctttataaaaaaaaaagaaaaagaaaaagaaagagagaaagagaaaaaactgcaaaaccgcaaactggcttgttcttatgtggttgatggggacagcaagattacatatatagccagcatttgattctcaggactggtaaagtgtgaagaacagcagtgacattctagtcttcaataaatcactataaaaatgtttatgaaccctgcaatttactgtcttttatatgcaaattgaaaggggcatcattgcaagtgtaaaggagacccgaggtggcctgaaggaagtgtaaaatgttgcagtaggttttggagattgtgtgatcttaaatgggatcatttccaaacgattttgcgtttatacctctgtgacagttcgattaatttattaatgagattgctgtaagttgcagggaagtagaggccagcttggagttaaagggtggctttgaatgaaatacattttcatttcactgaaagaagagggaaactggtgattccaaatccagatccaaaaagttattttggcaaaatgaaatcagaacgtggccccttccatgaaagtcagctcaggcgtagaatgttcttttttttaattttttttttaacgaaactcacatcttctttaaataaaatctccatttagaaatttttgaagacttgtggatagaagaagtaaccttgaaaagggcagagctgagccagaccccttttcagctgggtgctccctggaagatggatcttgccttgtggatgtttttctaccgtgacagaagatagaaaggatgaaatagaaagagtgtgagtgaattctgcacccacccccgccccccagcttccccacctgtaaaatgatttgctcaaagtttgcaaagaatggaggcatattcaaagtgctcagcactgggccggacccatgggtatgcattcataatgatcagcttcattctctccctttccctctctctccacacctttccattcctcctaactaatgtgggagagaagagaaaattacagtgagagatggtggtcagtttacaacagtatttagatgagaattaagattatgtccattcagggagactctagtgtgctctacatccccccaaaatgtggggacaatatggcaaatatggccaggtacagtgacagaaagtaaacagcccatgaaaacaggttgctctgcaattctcccaactgttcccttcccgcttcccacctgcctcgtatggaaaacacccaaagtaggcactgtttatagagccatcgcttgcagaacatctccccggcctccgacacatgtgccataaatgctgcagagctgcgtccacagtccctgctccggagaagagcattttgcttgttttcaaacacaagcatcctctcccgcgcctgggagggcgaggtgcggatcttttcgccttggcagtccctcgctcaaatgtgcgtctctggcaagtcctgtctgctgatagttgatagtgctgccacagagcggctgtcagattccaaaggcatcataccatctgcttttccaatcttctgctcttcaatgtagacatatgttcgagtggttcgtgtgtgtgcctggtgaggggggtgctattttccgggggaagaggaggaggagaggatgcttaactccaagagtcctcaaagcaaactgaaataaaattttaagtgatgccaaaataagcagtcccagcaagacatgttataatataaggtcctttccttaaaaccatacctatatcagctttggaaataacgtacctcttaactgcatggaaaatctagaagattcgtggcttgggtctgtttctattcttaccacggtgacacgcaaaagaattttttaaaaaataggtttgttgttatttctgtatatctgtatgggcctgacctcccttttctctgggctttctactccagatttttattttatttttacactttcattgccctttgctctttctggctttcacctaaacaatagcatgtatatacaacagtacctataaaattgacgctcgtgtcactgatcatgccaagaaacctaatgtatggtgaatttgcactagtatttatttcctccctccctgtctctcccctctcctcccctcccttcctttccctcctacccctctttctttgtattattcccctagaaggaaatattcaagctggctttagagaggatagcaattgtaaggtcaaccaagtatgggatggggaccggaatagattttctctgcagatttcacgctgccttcccgggaatttctgaatgttttgcagcctaatgtttagcttccaacattctttcttttttttttagacagagtttcacccttattgcctaggctggagtacaatggcgcgatctcagctcacagcaatctctgcctcctgggttcaagcgattctcctgcctcagcctcccgagtagctgggattacaggcatgcgccaccatacctagctaattttgtgtttttagtaaagacagggtttctccctgttgttcagggtggtcttgaactcctgacctcaggtgatcccgcccgcctcggcctcccaaagtgctgggattacaggcatgagccatcgcgcccggcctagcctccaacattctttaagaaaactgcaccatgagtaaaatggggacgtttttctcttctgctgggacccaggacatgttggactgcacatcagttcattctctctgatctaaggtgttggctgctcttctcccttctccactgggctctgagcttcttgagtgaagggtctgtgggttttcacgctttgtactcgggcccagagcagagcctactgccttcacagaagatgctccacatgtgtttgtagaaggaacttggaagacagtcagttttaaagattttttcactgagggactaagagaaatagaaacagaggggattggccacacctgaagtcattctgtgttcaaatcttggctctaccacctatgatctgggagctgttagaggagttaatcgatgtagttaagactcaatttcttagtatatacaataggtgtaatagtaaaaattagatgactttgatgtgtgtaggtaagcggctagcacagtgctcagcatgcatgaaggactctttcattatcgttattaactgatgtttttaacttatacattgaaaggtggaaacaagcgttgcttctattgaatgacttcttgaaagtgccagtctgatccttgaccttcaggtgcatctctaaattctttcatgtcagggtctctgaaatctgaacacatctcaaagttcccttatgcctggcaggggcggtgtccgactttgttattgcctatgcatgtataaatgtcccaaatgccagcaaccaaacttgcaggatgggtgttgacagattccaggaaagtcccagatgtaacagcggaatattccaccttctaggaaccaaatggctgtgaagtggagagacaggcagagctagaaatattccggacgtggaaatcaaaagtaggtttgcgcaacacaactgcagagccagctcaagaacccagcgccagtggctgatgcttcttctttttttttttttttaatggattcttctaaggatggctgcatcagccaggggcagcgggtcatacctgtaatcccagcactttgggaggccaatgcaggcggatcatctgaggtcgggagttcgagaccagcctgaccaacatggagaaaccccgtctctactaaaaatacaaaattagccaggcgtagtggcacatgcctgtaatcccagctactcgagaggctgaggcaggagaatcgcttcaacccagaaggcggaagttgcggtgagccgagattgcaccattgcactccagcctgggcagcaggagcgaaactccttctcaagaaagaaggaatagctgcatcacttatgctcttgatggtacagaaaatgatctgcatggaggaaatctagacatcagcgattcagagtcaaaatgttattcaggggagagagacccttcatgtgaagaaattttaggaatactttaattattttttcacttacattttatagtatttattgtatgcaccagagtgattggtgataaaaatggaggcctacttaagtctaagagagttcttgtgaaagtgggagggggatgagggttggaaaattgcctgttaggtgccatgttcactattcagatgatggatacactaaaagtgcagacttcaccactacgccatatatgcgtgtaagaaattggcacttgtacccttgaaatacataaaactttataaaaaattaaaaagagttactgtaatgattataaaatgaaaattctacgtcatgagaaagcattgtgccatattttcaccgggagcatttttttttccttaggggaaatgaaaaataatggcatctatgatcttagatttagtaaaacgcagtatcttcttccccagctgaaatagcgaaagggtctcttcaggctcctgggataaaaaccaggatccttcatgtgtctgagcaggcttcccaccatttgactgctgctcctttgtccagacacatttaacaccatctccctgcaccccttcactgggctccgaagctgcgttcacacggcacgtcattggcagctcatctcagaaggttccagctttgcctggcaaattctcctccttcctttagatcccatctctggtagacagagtaatgagccccgaagatgtccaggccctactcctaattccatggaacctataaatatgggaggttacatggcagatggggaattaaggttgcagatggagttaaggttgctattcactcatcttcagattgaaagatcatcctggattatctgggtaggcccagtcgaatcagagatggggaaaagagaggcagatgggtcataatcagagaggtggctgagtaaagaggacttggcctgatgttaccagctttaaagagggaggaagcgtccaggagccaaggaattcaggcagcgtctagaagccagaagaggcaaggaaagagattctctcccagaacttccagaaaggcacgaagccctgctgacctttgattttagcacagtgatacccattgtggccttctgaccttcagaaaataaatttgttttaagccactaatttgggggtaatttgttacagcagccagaggaagctaaggcaccctataatataccctctaaaagcccctttcttgggaagttctccagccttccccattgactctcagaggaccctggacctctcttccatggcattgccatggtttgtcatgttgcacttatttgtgtgatgatttaattaatactcatctgccccactggacgtgggcaggaatagtgtgtggttcaactatgagattcctagggcctaccaccgcctggggtccaagaagagctcagcgagtatttgcagagtgagtgaatgcaggaaggagtcaataaatacattaattaattaatctgcaggagaaagaagggcaaggtactatgaactttaattaaacacatatcccacatccaggtgccagtcagggagctgcgatttaatttgctgctgaatgcacttttgaataaagggcctagaagatgcagtctcgaggaacggaggccggttagagacaggctggcagctttgcctcctctcccaagacaaaggcctccccgcccccctaaatccagcacacaatcagctgctctccctccccctattctcagcaggagagtcaggatgcatatttctttaagggatgctgttgagtttcttctggtggagcgaaggatttgtagcaaaacccagcatgtaactcgagtgttctgtgaagccagatattggtgccaagctaaatttgtgcgtgcagcttctgtttaaggcaattatatagtgtgtaatacccagtagagaaattaagtcgaagtacattttgcccatagagattatcctctcagttggatttattttaaacaagttttgccccttatacattaaggtgcatgcaataaatcacttatgtaataaactactctatattatgtgggaaaaaaaaaaggagctggtggcagggggagagatttcaaattgagctagacctcaggcatgaagggaggggagagagggggaaatgtggaggaagggggcgtttgtgcagtgggaagttggagaaagtacaaatgaaagcctctctgcagtgaacctcatgactgctttagagaggtgcttatgtaataactgcagtggtgtcgctttagaaaaagttacagagcttgtctttctagagcaacctcttggcttatcttaattaccagcagtccatagtgagactggagggaagaaaaaaagatgtaagcttttattaaatagaagaaaatcaggggcagaggacagagggtgtgattaggggtctggggtaaccacaaatctgggcaactggaatttattgtaatggtaaattacactaataataatctggggatgaaaacagggcaggcagtgaaacctgaatctcagctggacgatgaatgagttttaatgcaagtgtatcgacgtgctgtactcctaacacattatttgttatctgaaatttagatttccttgggtgtcctgcctttttttttttttttttttttttttttgagatggagtttcactcttcttgcccaggctggagtgcaatggcgtgatctcagctcactgcagcctccaccttccaagttcaagtgattctcctgcctcagcctcctgagtagctgggataacaggtgcacaccaccatgcccggctagtttttgtatttttagtagagacagggttttgacatgttgccaggctgctctcgaactcctgacctcaggtgatccacctgccttggcctcccaaagtgctgggattacaggtgtgagccaccgcacccggcccctgcctttttattttgctaaacctgatgacccttgccatagcagaactaaagtgatgatgatgattacagcagatcagttattttgagctctgactttgcatgaggccctttattaagtgcttcacttgtgtgatctgatttaatcttcacaagcaaactgggacagagggactgtgcctattcccatttcacagaggtgaaaactgacacttagttttcacccgggttctccctgtctataaggggaaaagacagggttcacaccaaggcctgtctggatccaaaacccatgctcataatcactaagttatactacctcttcgagatgctgatttggaaaataactccatgatgaaacatgtcaagggagactgcctgtactccgtaatgcagaaatgcattagagctcaaaaatctatgctgtttaggaaagaaaaatgatatcgctcagaaaatcatttaaaaacttcctggtgaatgcacccagctcgccaatgcatgccagccacagggcctcacagcacatttcaggagcaagacaattcagaccccactcttccccctgaaaaacctccttccagaaccctcttttgcagtgagcagagataagcctctccaatttacatgtttgtcattctctaactttgagagcccaataaaactaagtgcttagtgagaatcagacatggataagctgcttgtaatttatgatttaatgcagcatagtataaaaataggcaatgaaactgaaaggcaatcaaagtctattgtcacaaggaatgggaggaacggggacgtgatctaacatttgctgagatcctgctgtataccgggaacagaacatatatggtttcatttcatcctcccattatcaccgtgaggcctcttccgcttatctattgctgagtaacaaggtgtacccctcaatttactggcgtaaaacgacaacagttttattacatctcatgattttctgggtcaggactctggatagggtttggctggttgagtctcctcttgcagtggctgttgatggaggtcatttagtggaatccagttggcaggagagctggccttggagagtctaggatggcttttgtcacatgtccagggctttgtcaggttagcagggcagggagggctcagctggtctcagctcgtggctgctccagcaccgtggtctcagggtgattggattcttgtagggcagctgtttcagctacacagcagaagtggcacggccttttctgacttagtctcagaaggcagagggtgtcacttccactgcatctttggggaaggcagtcaccactgtatagtcctgagctcactgggattaaggggaagggacacagactccacctctcgatgagaggagaagcgaattgatgggcagattttatcactgtcctggggcctttgctctttgcccttccctttgccaagaaagttccctgtactctgcaatgctgagtacttctcatccttcaggtctactgcaagtgtcacttggccaacacaccatgccttcccagtctctggtgttactgtctgcatactgtagaccatcatcttgtttgcatacttgtctgttatctctttatcatccgtctacccacatcaggcaattccaagagagaagaccactggttttgtttgatctagtccctgttgagtccctgtgcaccttcagaaccacatctagcaatagaaggcgctgcacggggaattctggaatgaataaaaacgcttggcagtaccgcatggcgagccagtacccgtgaatgctacttcctccaaagagaattcctgggataacagagaatccattcatggctgccaggaggacttggatatttctcattttccattggccctggagtggaggaacagagccgaaaagtacgtggggggcaggcaaagctgcggtcagaggcagaccctgttggtgttggccgtgtcaaccagctttgctggtttctattatagccctggtgtggcaaaggacactgtgtgactgtgagctcaggtcagcattgcgatcccttcaggcctctggcttgcaggttcctgttcaaccctcttaaatatgcttttgaagcccgtacgttcggtccacgccaactcctgtttatactggtgcgaagtgatgcctgctcagattctgggcgtttcacgggaaggtattaaatgtgttttgaaaatacttgaaagtccagctgtgtatgctttattttatatttagccttaaattagagactccatatacctcaagtaataaaaaggcacagcaggcacttgggttttccctcagcttgctggggccgtgcacctatgtgagattttattatttgtaattttgggggggttaatttcacagcttaattctggcctttatgcatttagagctcccctcttgtgtttcagaaaggaggagttgttgttttcttttcacttgagtttaataaatgaaaaaggggaagggagagggaaggaagaggaaaaagcacaaatgtgcttgtttttggatcagcccctgtactgggcacatggatgcagtcagtcctcagtgtaccccaggaaagaggaaactgagtctccatgtggctttctgtctggcctttctcttttgcttgccttgtgctttgaatgcaggcctgatgtttgcctgtggacctcaggatttgtaaggccatctccacccacctacagctaagtttcccaagagccgatctccagccaaagtccaaggttccttgatgacccctgggaggagatgcaacacacagtttcctagaatcatttactccccaggctaagcacagtcacagaaatgaggtagctgtagccaaggatgatggcatagcacattcgtttcttaggcgtgccacgtactaggtggcttcagtcagcagaactgtattttcccacagttttggaggctcaaatttgcaagtcgaggtttcggcaaggccatcctctctctgaaaactctatgggggcgtcctctttgcctcttcccggcctgtaggtatttcctggcaacctttggtgtttggggcatgttgtcacctcattgccatctctgcctctgtcttctcaccaccatcttccttgtccatgtctctctatgtcttcaatgttcttcttataaggacaccagtccttggatttagagcccaccctaattcactgtaatcacatcttacctaagtccatctgcaaagaccctatttccaaataaggtcacattctgaggccctgggtggacatgcattttagggaccctttcaggccaccatatatggattccagagtgaccagtagaacatagctcaggccaagagagaaactcaaccttggtgaagttgcatgagaacagaaggcagccctggtccctgggagaaacccatccatactctggttacccactggccattcctggggacaggcggcaggtgtttagtcccctctctgcaaccatttgcggtcacctcttatgtgctaggcctggtgctcagcgctgagtgaacccatatcaacaaggcatggtcactgcgctagggaagtccctggtccagtggggtgagggtggcagtggctggcaacaaagacaatgagcgctgagattgaactacagaaagcagaagatggggtgacaagtttggcctgcggcaggaaagacttcccagtctttaaggataagtggcatttgatgagttgcacaaagaggagacctgtcctgggaatggaggagaagatgtgaagcgcgggaagtccagggacacacagccgtgcagagacccgggggcctcagcaggttagagtgtctgcatggcaccggcagaggatgaagacagggctggggaggggcatggggttagcctaacaagggcatcaggtgccaggttagagtttcggtttctaagctgtagataacaaaaatttcttgaatgcttttagcccctgatctgagttacgctttttttttttccttccattttccatccaacagacatttgtgaggcactgtatttgttttcaattgctgctgtaaccaatgattacaaatgtaccgtcttaaaaacctaaatgtattatctgacagtcccataaggcaggagtccaacacaggtctcactcggctaagatccaggtgtaggtggggctgggctttttctggaggccctagagggcagcttgtacccttgcgtcttccgtttcttagaggttgcccatcttcatggactcagggtccctttcctccatcttcaaagccaacagcacctggctgagtctttctcatgctggcatccttctggctctctcttcagattccctcttccgctttaaggacctttgtgatagttttgcacccactggatgacccagaatcatcttcctcttttaagatcagctgattagcaacgtcagttccacccacaatcttcatttccctttgtcgcgtaacctaacatattcacaggttctggtgagtgggatgggggtatctctaggggaccattatccagccttccacaggcactttgtcacaggccaggcgctatgccaagcagagaggtcacaatagcaaatgacacagacaagatccttgcacttccaaaacttatgttccagtgagggtgaagggcgttgaagaagtcaacgagaaagtcaagtttttacagtaagtgtaagttgtgtgggtgaaataaaaaaggttctttgctggagaataacaaagggagggacttacataaatagagtaatcaggggagggcccctgagaaactctaaaacatgaggaaagggctcatgatgtgaagaactggaaaggtgttccaggcaaaaggaatggcaaacacagtggccctgagacactcagagaaatcactcaggctgccttcgaaaggatgtattggagaagatgaggccaggggattgttagtaactgttgcaaggatccgggagaaagatgatgaaggccttgtagggcaagctggataagagcacccaaaatatccataaccgaatccccactacataggcatgctactttatatggcaaaagggaatttgcagaagctaagcactttaaaattattatctccttaaacctcactgcagagttataaggaaagcactgttatcagatgaagaagtagatttcatcaagtgactcacccggtatcatatagctgcttagcggcaaaaccaggatgtgaatggagagctctttctcggataccaaagctatttaatatttatcattgactaataatggtagagaaagtaatcatcataacctctgccctttattagtcactcatggtgtcacaagccctttacaaagcactgtgcatgcaaatgattcctcataacaaccttgggaggtagttactttcattgtgttagctatctcttgctgtgtaagaaattaccacaaatttagtatatttgttatctcatagctccataggttaaaagtcctggttcaggctgggacttctgctcagggtctcatgaggctgaaatcaaagcgtcagccagggatggggtcttatcagaggcccttggttattaacagaattcattttcttgtaactgtaggactgaggtgcttgttttcttgctggctgttgactgagggccccttgcagcccctagaggctattctcaggctctcaggccctatccacagatgacctcacaacatgactgttggcttcttcaagactgaaggaggctcccccatgctctgagtcactctcttcagtgagggcccagccccttttaagggcctagcgattagatcagtcccacttaggattgaatcccttttgattaatgcaaaaccaactgcgttcaggcctccatgacatctgcgaaattcctccccctttgcttggtagcctaactcactcaggggggcaaattatcccatcatattcacagttgccgcccacactcaagagaggggattctataggaaatggaagtcttgggggccatcttgaatcctgactaccatagtctgtgaaatccccatttcacagatgttgaaactgagacttagaagcattatgcaccatgccaaaggccatggaaggacagagcttgggcatgctcccgacaccaggtcatactgatgtcactctccctactcccttcactccctccagcacctggccttcacctgaaggtgctgaccttgctgtttgttggtttcagcaaacaaagggagatcacagcacctgtcccaggccttgtcttccagccccacaaacgtgcacctgcagccggagaccagggggccccgatcaggtggcagggcctttaattggagccacgtgtgtataatgagcagcgcacacacacaaaggcgagctaaaaatgtctccacccttctaaatatgggatgccttggccaggtattgagtcagctctgtgacgccagtgcaattatcccgattcagcatcagatttattcaccattaaacatgttctaacttgattgcaaacaagccttgtattatttagagggatccacggagctggcagagggggcagaggtgtccgcaggcctcctgcccttccaggcttaatggatgatcatcttccctgctaaaaaggcccattcactaggtgagtgatgtggaactgtttaatgaaagcaggaagatgatgtgaatgccagttcacttgagtgttacaaacggtttgggcactatagccttaaagtttctcctgctctttgcagatgaatgaaggggcgctttctggaatctttgtggctggggctgctgctctgcactgctgtggctctttttcacaaatgcttatggagctctaactgggggcaaggaactgtgctacggttgggaagagaggagtgggcaaaaggagacactggggcttctgtgactttagaggcccatcatcaaattttcttttttttttttagatggactttcgctgtgtcacctaggctggagtgtagtggtgcgatctcggctcacagtaacctctgcctcctgggttcaagcgattctcctgcctcagcccataggcacatgccaccacacctgactaatgtttgtatttttggtaaagacaaggtttccccatgttggccagccttgtcttgaactcctgacctcaggtgatccacccacctcagcttcccaaagtgctgggattacaggtgtgagccaccgctcctggcacccatcaaattttcaaaggaagaaatggaatggtgcaaccatggtacatgggaaggaggagggggacacacaagactgtacctatcatgggggcttcgacctcatctgggaaggtggttggagagagtgagtcctgacctgagctttggaacttatcaagttgagagagaaatttgataatttgtctattaacgtgtgaccttgggcaagtcattgaccttctctgaacctcagtatcctaggacttcagaagcgaaaggaagaataatgggtcttgagtatgcctagaattgagcaagctgctatgcttgcaaaggccttggccagctgctcacccaccatgtccctctgttcccactccaccttactcatgcctagacttcttgctttttaaaaataatccacccatgaaacaagtgtttatttacaaggctggcttccccaggaggctttcacaaatgcttaccgagcatctgctgtgtgccagacaagagtgaggagctggggactcagagaggagcagacgagggagacactcacattagagagtggcgtgtgctgagggaaggtgcctcaggcgacagatgggaccagggcctttaactcagtggcagcttcagagacagatctggaaccccaggactcaaaggacctatgtttgctaatcaagtgaacacggaggacctgccactgggcagggcatccctgaccaatccacaggtgatggcgggacagctccaggccctggggatcccccagggaataagccagattaaagcccctgccctgtgaggtgtggcaaagaaacagacaattcatgaaataaatatatgataaataacatatgagaaggcagggagtggtatgaaacaaatcagggaaggaggagacggagaagttggagaagacagtggattgtttctctgggtggtcaaggaaggcttccaggcagaggaggtttggccatgggtaccaaggggtagagatgggaaccttccagggacatggacccgatgctgccagcagaggggaaaccatggccctaagggcagagcacactggggcgggggtgggggttcagtgacagtctggtggcctgtgtggtgaggagtgcgggagatgggaacagagagcgagagggcagacggggtcatgttgtgtgggacctcggaggtcctgccatggctttggtttctacttggagagaaatagggaggtttgggcaggctctgagtagaggagtagcacgatctggcttacgatgatttctaacatctcaccatctttacttctgtatataaatatatgataagtatacctttatatatgtgacatgtatctttacatatgatatgtatggttacatatctactcactcacacatccacacacacacacacacacacacacacacacacacacacttttttggaaccattgaaaagttgcagacatcatcacggctcaccctgaaattccttagcaggcatcttctgagaataaggacattcttctatgcaaccatttcacatccacactaagaaaattaacactattacgtagtattatctaatatgccctctacattcaaattttcatgtctccaatcctgccccctttggaacttctgttggtgttcgatctggaatctgagaattcccttgcatttggttttcatcccccatagtcttcctttttttattttttattttatttatttatttatttatttatttatttatttatttatttattttttgagacagggtcttaatctgtcccccaggctggagtgcagtgacatggtgatggctcaccacagcctcagcctccctgggctcagtcgatcctcccacttcagcctcccaagtaactgggactactgtgatgtgccaccatagccagctattttttttgcattttttagagatgagtttttgccgtgttgccgaggctggtctcaaactcctgggctcaagctattcacctgctttggcctcccaaagtgctgggattacaggcatgagccaccatgcccggcccccttttttaaaaaacaaaaaaacaaaaaactcttttgtgttttagaaatggggtctcactatgttcttcaggctagtcttgaactcatggcctccagtgatcctcccgcctcagcctcctgagtcactggaatttcaggcatgagccactgtgcctggcctctgtcaacttccttatctagaactatctttttcctctattgttttgtccctcacttctgaatagttcagggatccctctggctactgtgttgagaataaagtgtcaaagccaacagtggaagcgtggacactgggtaggaggcttttgcagtgctctcggcccgcgctgtccaatagaactttctgcagtgatggatgtcttctatctctgccctgtccagtataaaagccacaagccacatctggctgtgtggcacttggcatgcaactagtatgacatcttaatttttctttttgagatggagcctcgctctgtcacctaggctagagtgcagtggtgcaatctcgactcactgcaacctacacttcctggattcaagtaattctcctacctcagcctcccgagtagctgagattacaggtgtctgccaccacgcccagctaatttttgcatttttagtagagatggggtttcaccacattggccaggctggtctcgaactcctgacctcaaaagtgatttgcccaccttagcctcctaaagtactgggattacagacaagagccactgcgcagacggacatatgaatttttaatttgatatcattgtgatcaatttgaagatccacatatggctgagggctactctaatgagtggtgcagctccaaggcagagagatggctgtgattaaccaatgaatgagggaacaaatatccaggcagaatgaatagtctatggaaagggctggaagttccacaaagcaggacgtatacgtgcccttttttcctcccctggtggccagccagcccctgaaacacagcaggtattcggtgcagccttctgttttcttccagatcctttgactcctgccccaccaacatggcccgtggcagactgggctgctgtttgtaagcctggctgaagaaaggcatcacaaagaaaatgccaccagcaggctgggtgtggtggctcatgcctgtattcccagccctttgggaggccgaggcgggtggatcgcctgaggtcaggaagaacctgggagattggaggttgcagtgagctgagatcgtgccactgcatgtcagcctgagcaacagagcaagactccgtttcacaaaaaaaggaaatgctaccagtgagcaggaagttggtggtcctccagaattgccctgttgagggtatctccctgccctggtctgaaagctgccacttgccgcccaccgcacagccccagggctttagctcactgtgcaggaagaggccttcctctgtgcatcctcccacagggtcgagagtgaatgccttgcctttaaaaataaaatgcatacgcctgtcctcatgcgctctgatctgccagcaggctgtgctggggagtggtgagtagtacagggatgtgtctgaccccaggagaactgccccgatccctatcttgtctctgctcagttctggtaactcttttatcttccctggagttatttttttcccttctttgtttctctttttctgtgtgctcttctaagagtaaaacgcatgtccccccatgaagtcactcaaagctcaggcgtgtgcaacagggacagcaaaagcacacacaatgatggccagagacactgctcagtgtactgtcttccaccgggacagcccactcaccaagggttaggtcctgtgctgcctgggtcccgggtctcctcggaggtcggtttgcatcacgtggatacactaatctacccaagttgacttggagaaccaatctgaaatcagatgggagctcccggaagcaaagcaattgcaggttcatttgttacttttattgtctcatttcttcttatttttttagcccaattgcctcctacatggggaaggttggggtcctctttattctacttttcattctcgctctgccgccctcccaggtgtttgtaatcacatatttttcatttggtttccgggtccagcgacaagaacaccagaaacacctcctccccagagaggaagagaggatgctccgccgcctgtaaggattttttgctctcctccttttgtcagttggcatgcgatatgcttctcaggcagtaatttagagactgtcaattcctgagagccgctggggaactgagcaatcgtctgcatttcgtcgctttagcccgagctgggtctttgagctggcagagaccaagatctttttctgggaagggatggtcctatttaaggaaggccctggattttgtcaagtttgaaaggttttcaacatcttcccgagatggtggtcatgggagtagtggttagggtggttatgacgcatgggacgggagaataccatgcccacccggtgatttataccaaaagatgctttcctggggtggttctgctggcagtcgggcagtgacatgttattaatgttttcctgttttctattgtccccgaatggaaaaacactgtggaacctttaaattttctcaagctgtctatgttttcctggatcgtccctcaattttccgtggtatgaaaaatgtaaatgttgctacattcagttcagggaaatccagccgttgctccagatccttctaagatttttcaattccagagatgttttcacctggaagattccccagatttggcaaaaacaacccaactcctagccactgctttttgagcagctactcagtgcctaagactttgaatagtttattaatcatgtgtcactgcagcaaaggggacatttcggccctgatttcagagatgaaagaaccaaggcatagaaattgagtcactttctggagtgtacacaactagtaagtggattcgagttagttttgctctattccaaggctacttactatgctatttttggtttcctacttttgttcaacttatatttatctgattatctgattctcttttacaagcacttagtgagcatcagctgtttcaatgagcatttatttactgatacctgtggtggcacccaggaaggactaggaatgctctgtgatatgtaggagaaggatgtatccactgggcaaaggtacctgcgagggatcaaagatggaaaggcagaaatccaaggactacgtgtgacatgaaaggggcctttctcctgctgtcatcctgaacctctgtctttcaaatttggatgtgtcgggggccacaggacactactgtgcatttgcctgtgatttgccattgggttggagtacttctcctgagtttctgcagtgttctaggtatggtcttaggccctggaataagacagtgtaggaaacacagaaggtgcctgatttcctgggcctagctaaggggaaaaagcgagacaatggggtcagaggaagctcagctgaacagatgaagttgagatgaacagaattccagtgccaccatgatttccagccgtgtgaccttccacatgctttttgatttttcttgaactcacttttcctttgtttgcaaaatagtaacaatattttccttccaagtgatggtgaggatttaagagttaacctgagtgtctgctgcatagtaggtgctcaataaactataacgtctttatttcttttccttccaatgagaagtcacttcctggagggaagccacctccaggaacagtcctggttcaactcatgaggagggtcactggttgggttccatattcatatctgcaaccagagttggaagcacaccactgtgggattagtcatgtccctagtccctgtctccgtatattttctccttctcttattagtttatcttttccaaaatgggctgtttcgtctctgatcctgatttatttttattttaattaaataatttatttttctgagacagactgtcgctctgtcgccaaggtggagtgcagcggtgtgatcttggctcactgcaacccccgcctcccgggttcatgtgattgtcctgcctcagactcccgagtagctggtactaaggcatgtgccaccactcacagctaattttagtatttttagtagagacaggatttcgccatgttggccaggatgatcttgatttcttgacctcgtgatctgcccgcctcagcctcccagagcgctgggattacagacgtaagtcaccacgcctggcctgatcctgacttagttacggttacctctctttgtatctctatatgttctcaaattccaacctgtctttgtaatcctctatttaagctatcgattacctccaaaaggccctgaatgtttcagaaagaaaggatctactggcagcttctgaaggcttctgtaataccttgtaccccaatgagtacaatgaaatcattaggggttctttcctctcctttggaatgaaactgctgcttaacttttctcccactgatgagatgcggtgatgctgtcacagttgggtggttgctcctcctgcagtcttcttcccattgcatgttcactctcttccccacttgcccacgagcagcaactcctgtttcttgtttttttccttttctttttcttttcttttgagacagagtctcgctccgtcgcctgggctagagtgcagtggtgcaatctcagctcactgcaacctctgcctcctgggttcaagcgattctcatgcctcagactcctgagtagctggtattataggcgcacgccaccatgcccacctaatttttgtgtttttagtagagatggggttttgccatgttgctcaggctggtctcaaactcctgacatcaggtgatccacctgcatcggcttcccaaagtgctgggattacatgcatgagccatcgcgcctggctaggaactcctgtttctgtttttatcctcttcccaagtctgcaggccccgcctggcccacccagtccttcttagaagatgatgacctcaactactgctttttaaagaagactgacgtcgtgttaactgagtttcgataacgcccctctgtgtattttctcatcgtcttattatgttttccaaaataggacctggggtcgaactcctgacctcaggtgatccgaccacctcgacctcgagaagtgctggcattatggatgtgagccactgcccctgccctagatggtatcaccttcaaagcttaattaggaagaataatatgagcactgagtgtaactccaggtcgggtatattatgtccctctgtgttctctagctagttatctatccatccatctcttgccttgtccacagaagttacaggtaggctgccgggcgcagtggctcacgcctgtaatcacagcactttgggaggccaaggcgggcggatcacgaggtcagaagttggagaccatcctggctaacacagtgaaaccccatatctcctaaaaatacaaaaaattagccaggcatggtggtgggcacctgtagtcccagctactcgggaggctgaagcaggagaatagcgtgaacccgggaggcggagcttgcagtgaaccgtgatcgcttcactgcactccagcctgggcaacagagcgagaatccatctcaaaaaaaaaaaaaaaaaaaaaaaaaaaaaaaaagaaagaaagaaattacaggtaggctagagcacggatgagcaaactgtttttataaaggaccagagagtatatatttcaggctttgcaggccctatgacgtctgtcacaattcacttctgcctttctactgcaaaaacagccatggacaattcataaattaatgtgcatggccgtgttctgataaaagtttatttatagacactgaaatttgaattccatatgtcatgaaattatatttttttgattttttttttcataaaaccagtctaaaaaagccatgggttattttgtcatggcacgttttgatatgaatatttccacccccattatttgcataacaaattacagattatccagaacaggtgggctgtacataaacaggctggtgggctggatttgtcctgtggactgtagtttgctgacatccaggctagatccttaatatacaatgaagtagtaaaacacatgtaaaagtaaaaagcaggcgaaatagaataaaatacacatttgcacaccacagtatccaaaaaggttatgtactggggctaaagatttggcttggagtttcctggtagtcaaggcaaaaaagggaaacaaaactagttacagagtttctcggacctatgagcaaaaggatttccatttctaatcggaggcagaggtatcatggccttcaagaatcttccggttaaacacggtactgaaatttgattttattgtctatcgttgagtccctagttattttgcctttaccaaggctagttgcagagtatttgttctagtatgtaaaatcagcaatcagccattttctggtcattgtaatggtgtaaattatatctgacagttgttaattaaatacctactcatgctttggagccaaagccaaatagtgctctgtaaacattatgatttgtcagtaatcaatgtgatttgtataatttgtgagcaatcagatactttatccaaaagcggattattgacctctgtgcccatcttgggagaaattgccacttggtctgtgtctacacagacccaagaggagaagggatttgacaatggtctgattaattgaatcagtggtttgggggagtgggctgtctgtattgatccaattaaatagataattgtcagaatcgaggtcatgtctataagacaccaccatttcaaagccaaagagattgtttcaaacatatcatgctcaccccaatcaatgtgggccgcctcctccacatgaaatcaaccagaaagtgattgattctgcagagccataaaccagggtctttcctattttcggcaagtggttctgtgctaaatacagtgctttgaaatttttgttccccatagacccaaggatgatgattcattatgcaaataatggggatagaaatatacaaattgaatgttagggctgggcgtggtggctcacccatgtaatcccaacactttgggaggataaggtgggcggatcgcttgagctcaggagttggagacaagcctgggcaacatggcaaaaccccatctctacaaaaaattttaaaaatttagccgggcaggcatggtggctcatgcctgtagtttcagctattccggaagctgaggtaaggaggatcgcttgaacctaggaggcagaggttgctgtgaggcaagatcacaccactgccttctagcctgggcagcagagtgcgaccttgtctcaaaaaaaaaaaaaaaaaaaaaaaaaaaagaaaaaaaaaagttggaatgacatcagactcaaaatgtgtcacttagcagtggggatgcaattctgagaaatgcatggttaggtggtttcatcattgtggaacatcatggagtgcacgtacacaaacctagatggtgccgtctactacacacacacttaggctgtatggtctagcctcttggtcttagcctacaaagctatgcaacgtgtgattgggctgcgtactgtaggcagttgtaacagtggtatgtgtatatctcaacatatctaaacatagaaatagtacagtaaaaatatgatattataatctttgggacagccatcatatatgcagtctgtcattgactgaaagttgtcatgtagcccatgactatcgtctcttttaggggaaaaaacaaaagcagaaagcaagcaagctggtatcctgcgtatctgtgagctcaggaagcagctgcatgtgcatactggataagcaagggagactccaaccccgggctctctaagggtgtaattgttgcaggcacactgaggggcagacctctgggtcttggttagtggtccagagagggaagagagcaaaggtagaaggcttgagtttaatttctgcatcagactcaaaacccagctaatcttttctagctggtcatttcaacctagctggtgatttcaggctagttaagcaacccctcggatcctcaatgttcttttccctctaatgggggtaaatatacttaattcactgggtgactgcatccataccaagcacacagccgtgatcagttagcctctcacttctctactaatccccactgtggggaagagctcatcattaacatgccttatctgacatgtggcaataacttctgcctttcttatgtcatctgcatggttgcagtggatagtcactggacaattgatgaacaactactacatgctagatctctccctggggagagtgcttgtctttgaaacagtcaaaggaggaaggaagaaaagagaggcagaacaattataataaagcaacttaacccattgagagacataaggatgctgcaaggcgcagtgctggatggagaggacagtgcctggggcagtcatggaagacttcttagggaggtgactttttaaggggttttgtgatcaaaactatggagtcttaagtccaaccagtggttatgaattccggctctgccacttgctataatagctgtatcaccatgagcgataacttaacctctttgtggctcagtttcttcatatataaaatggggatcatgatagtctctgtcccaggggagttaggaggattaaatgcaacagtaatccaaccacagtatgaaaagacaggctagcacatacaacacaatctataaatgtttgctattattgtcatcctttttattagtatatcatggtacaagtttgctgggtagaaagatggcgatggggaaggggacatttcaggccaatgtgataataaaatcaacagacaaaagaagggagagtgtggtgagtaggataaagctctgtacagatgcaaggggaagggtgttgatgtcaacacgcatgcagcttcccacacgtcgtgtggattcttttctgtgctctccattacggaatctccctgaaaataagtggtcactttgaggtttgatggtttaattctaccacaaaagtataaaaagcaggcagcctgctgtttatagatttttttttaagtgagggagtatgttaatgagcttagattgtcagggagctaaggggattcttgacatcaaattgtgggtagctaaataggtcaccccaagttattcagcatgggtggaagaccaagaggatacacaagcttcaaaaagttttcagggagagcaagagatgttcatttacctcattcaaaatggaatctttaatgctagtccagtgcttggccagtacaaggccattatatatttgttgaatgaatgaattcgtgaatatgtttataaagacaaggaaacgccattctgcaaatctacatgcagtaaaatagtttttcagtcactttgccttcatttgtttgacattcttggaatatttgggctctacaaggtgctagggtaaggcacgcaggatgcaagattagcgagatattgtctctactctcaagaaactcgctttctttgggaatcatcacctgtttttgtgtcacggaccccttgggcatttggtgccctttgcagaataatggttttgaatacataaaacgcacgggatcacagaggaaaccaatcatattaaaatacagttgtcaaaatattaactcatgggatctagtaacaaatgttcttccttcttaacccattaaagaacacagctcatggtcggtccattaactactaattatcaaaacagtgggtgaaaacgatgtttggaaatagctgcgactctcgcgtgataggaaaatatctgtgatttcgattgcgacaaacacacagatgcttctcacacgatcgcagtgcattgcctaaatgacagtaatgctaaactccagtcagatgttagtgaaaaataaagatgtaacattttggccatctgtgtacaccccctctttctagggttccagccacagaccctcagattaaggagtctgcactagcttgtagcttgttcaatcacacatacacacaaaaagtgccagttataaaggagcaggaggttttctggagccaggatgagctgggaccaacaccagcaactgtatcacccagttcactgagagttaaaatcacccatgtgacgttctctctgcaggcacatagtaagtgctggataaatgatagggattgatattgaccagctttgacacatgaataggagagggttaggcaaagacaaagagagatggggatgccaagtaccctctgggcagaggaaaccatgagtgcagaggcacgtaggcctgaaacaggccagaaagcaccaagcaatttgcttttgctggtgaaggaggtataaaaggtagagttgcaaagactggggatggagctttaggctgggatcagcgcccaatgggctgggatgacaagtgcttggggcacattggcagctgcgaaaagctcgctctgatgcctgtgtggggacagattttgggggcaagaggactctccagcaatctgtggcaaaaaaaaaaaaaaaaaaaaaagtcccgcttgttatcaagcctactggcttatctgttatttcttggacatgccccagtcgctagtaaataaagctgtctactttacattttgtctctgtgcccttttacagccttttctcggaggagctgagtcccattatattccgaaagcatatgttcccgatgattgctcattctctttccaataatatctttgcaggacaaagaggaatggggaagggaacatacttttaggatgtcagtcccagttttaattacaagtgttcctggttgtggcattcatgtaattgggggctgatttatgccaaatgatatgcactgatgtaaggggctggagcccaagagggaggggaggccaagaagaggcagtggccccccaccaagcccggaactgaggtggcacatgtcagcggctttgctcagaagcacccagggatgatggaaaaggcaaccgaaagggctcagcttctgcagatagagtctgtgctttgcactttctggctttgtgacctttctgcaggttacttctctcccctgagcatcagtttactcagctgaaaaatgcatctgctaataatacctatggcatagggtttggggaggattaaataagataatgtaaatagagtttagcgtggtactgtgtatatagccagcactcactgctgttggcttattgaaaaaacaaaaataatacctacaataaccacaatatagcaacagcaatcatgttcaagtctgtatttggtttaaggagggggaatgtgacccgggggctctgtcattagatatatgcacacacttgacctaatggaaagcttgaaagcaattggatgggaaaacagtccatcttgttggaaggctgtcaagctgtgtaataaaagaattactgttctccctttgcatttatgcattgcatgtctctgttgaattcagagtgctttatagacctctgatcagcttccagcatcctcttggtatgagttctagggggagatgaggaatgtgcctaattcccttgagtgatttacttggtgttaccctggagttgtgaggacaaaaggatggggctgactgagactggggatgttcatcacaaagtgttcaggttacatccaggctgattactggccaggagactaggcattcatagtggggcgtcctttaaggtctgaagaggacagtgaccatccaccacaggcaaacatgtgtgtgttaaaaaggaatgacgttttggtctgtgctacaactgggatgaacctcaaacattacgctggacgtggtggcttacacctgtaatcccagcactttgggaggctgaggcaggtagatcacctgaggtctcagaagttcgagaccagcctggctggtggtgataccccatctctactaaaatatggtgataccccatctctactaaaaatacaaaaaaaaaaaaaattagccagacatggtggtgcaggcctgtaatcccagctactcgggaggctgaggcaggagaatcacttaaagtcaggaggcagaggttgcagtgagacaagattgtgccactgcactccagcctggatgacagcaagactccatctcaaaaaacaaacaaaaaaaacattatattaagtgaaagaaaccagatgcaaaagatgacctaacatgtgaatctgtgtatacaaagtacctagaataggcacctccaaagagacagaaagcaagctagtgattgcagggggctgggaaagaggggactagagaatgactgctaaagcattcaaggtttcttttggggttggttaaatggtctagaattagatcgtgttgatggttgtacaaccttgtaaatatactaaaaaccactgaactgtacactttaagtgggtgaattttattttatgtcttatttatttattcttttagggacagggccttacgctgctgcgtaggttgtggtgcagtggcacagtcacagctcactgcagcctcaaactcctaaggtgaagagaccctcccaccttagcctcctcagtagctgagactacaggtgcgtgctaccgtgcccagctgatttttaaatttttttttctttgttttgagacggagttttgctctgttgcccaggctggagtgcagtggtgctatctcagctcactgcaagctccgcctcccaggttcacgccattctcctgcctcagcctcccgagtagctgggactacaggcacccaccaccatgcctggctaattttttgtatttttttagtagagacggggtttcaccatgttagccaggatggtcttcatctcctgacctcgtgatctgcccacctcggcctcccaaagtgctgggattacaggcatgagccaccatgcctggccctgatttttaaatttttcatggagacagggtctcaccttgttttccaagctgatctcaaaatcctggcctcaagcaatcctctcctctgcctcagaaagtgctgggattacaggcgtgagccaccacacctggccgctggaaatacatttctaaagaggaatgggagtcaggctggtgaagaaacacgtgagtgtgggatgaggatggggacacagagtgatgtgaggcctacacaacaggagttcaatcctaggacctgagctgatgtaaatgaagcaccgccaggcccagttggggaggaccttgtgttcctgctggagagtgagagtccctccctccccattccactcccaagagcagtgaagagtcaggaaggtgggcttgttttgttttgttttgttttgttttgcttgttgagcaagggaatgcggttcccctgtgtcggacttgtttcagaaagacaatgtcactgaggctggggcagggagattagctgagaggctcttgcagttatctgggaaggagctgtccataaaggcctgagttaagacagtagccctttgggttcgatttagtggtggctccccaaaagatatgttcactggaacctagacatttgagaaaaagggtctttgcagataagttcagttgaggatctcaaaacgaggtcatcttgggtggaccctaaatccaatgacaggtgttttcagcagagacagaagtgaagaaggcacagaagagaaggcggtgtgaaggtagagactgagatcggagtgattcccccacaagccagggagcactgagggctgctggcacccccagataccaggagaggggcacaaataggttctcctcagagcccccagaaggaactaagccttctcacacctagactttagacttctggcctccagaatactaagaaaataaatttctattgttttaagctaccacacagatgcaggaaactaatataccctttaatgattttctccatggcctttctgataatcctttcatccttcatctcccctgttgccgttttctttgctttgctttgcttgcttgctttttttttttgagacggagttttgctcttgtcgcctaggctggagtgcaacggcacaatcttggttcactgcagcctccgcctcctgggttcaagtgattctcctgcctcaccctcccgagtagctgggataataggtgcctatcaccacgccgagctaatgtttttggatttttagtagagatgggttttagccatgttgtgcaggctggtctcaaattcctggtcccaggcgatctgcctgtcttggcctcccaaaatgctgggattacaggcatgagtccccatgcccagcccctgttgcccttttcaaaacactaagtgcatcatgttaaccttccactcgcttctttaagtttcctcactccttttaggtgaacaacccaaaccctcatatgccctagaggcccttttcagccctgttgacacttcccttctctgtgctttagtcaccctaccctcggtcaactcctaactcctgcctgccacagggcctttgcacatcctctgccggggaggctctcccttcaccttcattaggttatcagatctcagctcacacatcacatcttctgagataccttccagactcccctggccacggtcacttcctttgctgtggactctctgggaactgtgtccccttccttctcacatcagcttgcagttctgtacttgttcatgtgatcattgatcagggtccattttctgctccagacaatgatctctatctagaaagaatcatgcctgcttttctgcactctcctgcctctaggggagagaacacagagcctggcatgtggtagactctttttttttttttttttttttgagatggagtctccctctgtcgcctaggctgcagtgcagtggcgcgatctcagctcactgcaacctccgcctcccgggttcacaccattttcctgcctcagcgtcccaagtagctgggagtacaggcgactgccaccacgcccggctaatttttttttttttttttggtatttttaatagagacggggtttcaccatgttagccaggatggtctcaatctcctgaccttgtgatctgcccacctcagcctcccaaagtgctgggattacaggtgtgagccaccacgcctgggcggcacgtggtagactcttaatgaatttttgctgaatactgagtaaataaagaaaagttaacacagtggagtccaggtacagtggctcatgcctgtaatcccagcactttgggaggtcaaggcaggaggatcacgtgagcccagcagttcaagaccagccttggcaacatggtgagaccccatctctacaaaaaataaaataattagctgggcatggtggtacatgcctgtagtcccagctactcaggaggctgaagtgggataatcagctgagctggggaggttgaggctgcagtgggctgtgatcatgccactgcacttcagcctgggtgacagagaaagactccatctcaaaaaaaaaaaaaaaggtagagatggtggagtggtgacatttggtagataatatagctctgcagaacttttcattgcaaaatgaaaattcttcattgttattataattacttcaaggagcaaggccattttgtgtaagctatcctgggcctccctgcctcccattttacaccctgtttattgatactaagaagagcctccaactgaataagaactaatgacttctgcctgccatcattttggaatgtccaattccccgttctggagagcctttgattataacatcagcctgtcatttggacctctgacctgaattatatgaatctgaaaaatctcttcctttcctatcgtgaattcggtcattgttataagccaagctttgcaaaggtggaacaccttggagatacttatctcctccttactctacccaagtaatgactcatccttttatacagaatgtctcttttttgatttagatgtctttttttgatatagatgtctcttgatatagaagcatttctcgggatggtttttgtggttgcctagtgtcttctaaagacccctgaacatagcatagaaacagcacgtgtcttaggcttggaatgagataatgtctcagtgtttgagtagaattagggagtttgctttattttcctttgtttttcttttttgttgttgtttgtttgtttttgagacggagtgtcgctctgtcgcctaggctggagtgcagtggtgcaatctcagctcactgccagctctgcctcctgggttcacgccattctcctgctctgcctcccgagtagctgagactacaggcacctgccacgacgcctggctaatttttgtattttcagcagagacggggtttcaccgtgttacccaggatggtctcgatctcctgacctcatgatccacctgccttggcctcccaaagtgctgggattacaggcgtgagccaccacgcccgactgctttattttcctttgtgttcctaatacctggcccagtgtctggcaaatggaaagttcccctggatgtagttgggtgacactatgagtgtatcgttaggcatgttcaaaatatagctaaattcagtccagacattctacctatgttttcacagaaacatgaggcagtgtacagcgcttatctgtggcatttgattaggacattttactgaagagttgataaaaaagcacaaattgtaggctgcaaatctatcatttttctttcctccttcttcctctccctccctcccatcctttcttgctttcttccctcctctctccttccttccctccctttccagcttaactaaaattttctgatacttttttcctgaattagggtatgttttggggggaaaaaacgcttcagtgcgtgtttctttcgacattacacataagcccccatggaaagcaaattgaataaatttactctctaaacttctttccacaagagtaggtttataatttattttctttacattatctggataattacatttggtttgcttacatagatggaggcgaatggttttccaatcttcaaaccaacctatatcacaaaagcattctgaaaactgggaagagatcacttcacagtttcctgaaccactagaaaaaaaaatgttcataaatttatagccgctgacattgaagttggagaaaagagcatatctagtacctatgctatgtggagaacactctccatgtctttgaaaaataagcacaatacaaattatatttgaggatgacctgccaaagggttgattatcctggaaacatgttttctcaatggtccatttgggcaaacaggccagctgaggtatctcaggatagcaacaggataagcagaatcgattgatgaaggagggagcctacctctggaggccccaggctgggactttgggtacagatgcacaggagacctttgccccaccccgtcacggctgggcctactcagttccacgtctttgagttttcacgcggaaactggatgtttcttacatcctcagctgcaggcatggggaagagacgcacatcagccattaagaaaaaggtatgcagtctacatgcctgttaatttcctccacatacacagtaaacccatcatgtccatcagcaccattgtcaaaacatgtgtgcaccagtaaagggttctgatgtgtgataaatttatttagctattactcatctgaagttatactattttaggatcttggggcagtgaggactttggaaatggaacaggatgctcctttaagttagggtaaaatgaagtctataaaaactgtttttctatatcctcctcctaccccacaaagaaagttagggtaatatattcttatataaaattgacatttttaactttaatgagaaattgcttgtcctttaaactttaggcattgatgcgcttaattatgcttttcaacaagattttgcatttttaatatttccttttagagcttccaggaatctcaattattaattgtaccctggatttattggtctttggactctcccgctagtataaagactgtagattcatcaaacattgtttactgtcttcaaacttcaacagtgttttaactatcaaatagaaaatcgaaaggaagcataaacgcatatggtcactttactggtataataggggccaagagccgttgtgttttataatttcttgatgatcctggtggtaggtaagccaaccgctatgaactctgatgagctctggtttaccccatagtccaaataaagaatggtttctgacattgtatgaccaaaaaaaatagcatctgcccaaaagatgctatttataaaactgttacaaatggagcttattgttcaccagaattttatgaataagtaatgaagtctaattttccgttatcatagccattggttaaaaatgcatgtctgttaggacattgtaattattttgtattacttaggaaaacttttatgattctactcttttaatttttttaataattactttatgacttcttcattagggtttctctcctccagtgcgtacgcagatcttctgaaaaggaatctgacaaatttagttgctgcatttttctaaattgctttcaagactacccagcacttcagatacttttcatggcccttttttcccaaagtgttctccaggatgccttttgatctgcacgggcaatcccattagcagtgatggcttaaggttcccacagaaactctgccacagaggcactgacaccagaccaggcgtgatccctaacagcttgctgtaccgactcatatgagggctgtcttggtccgtctcatttaaggtttggcttctccaaagattagacacccttgttttcgttcaacctttgtttggctttgaagcatcatgcacttgggtcttgaaatcttgggctcaccgctgcttgtaccagtatcttctaccctccggttgtttgtggccattatcaaacaaacaccatgccaactaggtgtaaatgcagactgatattctgaagaatccaggaagggctgggcatggtgcctcattcctgtaattctagcactttgggaggctgaggcaggaggatcgcttgagcccaggagcttaagaccagcttagggaacatagtgagacccctgtctctacaaaaagtaaaaaataaaataaattggctgggtatggtggcacatgcctgtagtcccacccactcgagaggctgtgatgggagaatcacccgaggctggggaggttgaggccgcagtgagccgagatcgagtcactgcactccagcctggacaacagagtgagaccctgtctcaaaaaaaaaaaaaaaaatccagtaggaaactatataaacactagggttgctttaaaatgtcaaggccaactcttatgatatgcggaagccttcgcccccttcttgagggtgtttagggattagatgagtgtcccatctgggtttcccatccctgcagagcccacgtgtggggtgctgagaggtacgtggtgggtgactccctggggagcactgtttggtactgatcactgtcccatcctggcactgcagtcctgggacagtctacacagctcctgcctccttcttttcttcaggattatctcgagttggtttgcaaagtgaaacgcattagacatcttcaagtgggctgaagaaagggactcaatttttgtgggtccatgttaatgtaattcttatgaatttgagataaagtggtcattaaagcctagaaggaagggaaaagctacacccccctgtggatgtgtatgctaaacttgattgatctgggcatatgtggaatttttacctttgttttgtctttatttatttttaaaattgaggtaaatttacttaatttaaaatttatcatttaataccatcttttttgaatggttaaatagtggatgtattttttctagtttttttgttttgcttaataggctctctctctgtctctttctttctatatatatatataatatatagaaagatatataatctatatatagatatctatataatatatataatctatatatgatatatatatcttattatatattatatatatagatagatatctatatacagatatctgtatacagatatctatatatatagatatctatatatatagatatctgtatacagatatctgtatatatatatagaaagagagggaactgaacgggatgctttttattttgggctgttattaggtagactctcctgggacattctacacagctcctgcctccttctgtatgtaatatatatattatatatatataaaatatatattatgtatagataatttatatataaatatgtgtatatatatatttgttagggtaaaacaaagtctataaaaactgttttcctttgtcattgcccccaccaaatatttatatatatgtatatacacatatgtatatatgtatgtatagagagtctattatatatattacatatacataatatatacataatatataatagactctataatgtagactctaatatgtagtctatatattatattataatgtatgtaatatataatatattctatgtaatatataatatattctatgtaatatatattaatatgtagggaatatgttacatattatgttgagagtgtatatattatatatgggtttctatatattataataaacccatatataatatacataatagactatacacatatacagctaatatatatacacaatagtctagtatatattatacatgtaatatactttccatacatacatatataatttggggggcaaaaacatatatataatgaatataattatataattcatataatatatgtaatagagcgtgtatattatttacatatgtatatatatatatatacacacacacacacacatttcaactttcttgaactcctgaaccagccttagattgcctagtaccagggttcttctttttttaaaaaatttatattttattttaagttcaggggtccatgtgcaggtttgttatataggtaaactggcgtgatgggggtttgttgtacagatgatttcatcacccaggtattaagcctagtgcccattagttatttttcctgctcttctccctcctgccaccctccaccctttggtaggccccagtgtcttttgttcccctctttgtgtctatgtgctctcatcatttagttcccacttataagtgagaacatatggtatttgcattttctgttattgaattaatttgctaaggataatggcctccagctccatccatgttcctgcaaaggacatgatctcattattttttaaggctgcatagtattccacggtgtagatgtaatatatatataatatatatataaaatatatattatgtatagataatttatatataaatatgtgtatatatatatttgttagggtaaaacaaagtctataaaaactgttttcctttgttattgcccccaccaaatatttatatatatatacacacatatgtatatatgtatgtatagagagtctattatatatattacatatacataatatatacataatatataatagactctataatatagactctaataattattttttaaggctgcatagtattccatggtgtagatgtaccacattttctttatccagaataaactattttttatactggttttaggctcacagcaaaatcgagtggaaggtacagggattttccagatttcccctggccctcactaccacatgcgtagccacccctttatcaacatcatgttaactattttaaagtggacagttgagtggctttaagggcattcatattgttgtgctaacatcatgaccatccatctccagaatgattttcatcgtgcaaaactgaaacgctgtacccacagaacactggctcctcatcacctccccaagcccagcccctggcaaccaccattctcccctactttgtctatgaattcgactactcttggtacctcatataagtggaatcacacagtgtgtgatgtgttcttttgtggctgacttatttatgatactggattctcagcatcatgggagttaggactgtctgtcgcaccatcaaacaggcatagctggctggctagaccatgtcacagggatgttggaactgggtggcactgactggcccagccaaggggtcacgcaggggactcctgattcattcctggggaaagtagttatgtcaggaagcacaggctatggctcacggctgtggctgtgcccacgtggtctgtgtgggctggtggtaatgggccagggaactgaatgggatgccttttattatgcactcttgacattttttatattaatctgttttcttctccatctataacatttcccacatgctacactgaagggatattttaagcattaattctcctaaaaagcctcatgcccaatgtaaaaatagttcactgtctcagaaaaaggcactctctataaatgaaaagcaccattattagtaatgtcaataactttcctgacatccatttgggcattgtatatgttttgataggattacataaataatgaaattgtatgcaaagcatcagaatgcaaaaggtgttttctccaaggtgtatacactgcctgggccttgtactctggccctcaattttcttaaacagctgcatcttttgggggctctgttaagacatgctactgtctttagtattttgccccctcaccgaatgatcaggagactggcttccccaatgccctgggcttaattcccagatatttattctgttgtggagtgattatctgttcctggattgtctcaaaggcattaatctttttggtatccaacatcttgaatgcttctgtgtcattttcctttctttttttttttcaaagcacttaattatttaaaaacaaaaatacttctctgatcagagcatacctgccgtgctcaaagcacttgcttacttggaatgccataaattacatgaaggaattattcattgtatcacgaaacataccttccagtctcccgagtagtgtattaggctaagtatggtcttttaaattattactttaaaaataaaagataatggaattatagcattaaatacattttgcaaatgatcttctagtaggattattgaaagacagtaaaggcaagtataaatcagaagcaaaatcattgtcctctaattcattaatggttaataatattgctgactcttttaacttgtcaacatttcctacattcaacattgtactctaatatccagtaaagtgaaacaaacaaacaaataaatacacttttttcaagaaaaaataaatatctgtgatctcatcatttgaccgtcagtattttcatttttgcatgtgccactttaatttccctaggcaacactagctagtggcccacaataagacgtagaaaacaagaccacgtaccttccagaatcattggccctggctctactcctggaaacccagtccatctctaatccctttgatttccaatgggaggcaaatccaggggagttctagactgtctagaatattgtaccaagaacaaaaggccaaccccattagacagtggccaagggaggtgaactaaagttggtgctgtgaacagggctaatggtttgtgatttacccataagtggaaggtgtactccggctgctcctttaatattttatgattagcagtagaggtgtgtctgggggaaagagtcagcttattttatttatttattaattttttgagatggagtctcactctatcatccaggctggagtgtggtaggtgggatcttggctcactgcaacctcgtctcccgggttcaagtgattctcctgcctcagcctcccaagtagctgggagtacaagtgtgcaccaccatgcctggctaatgtttgtatttttagtagggacggggtttcgccatgttggccaggctggtgtcaaactcctgatctcaggtgttccaagaacaaaaggccaaccccattagacggtggccaagttggtgctgtgaacagggatcctgcctctgcctcccaaagtgatgggattacaggcgtgagccactacacccagccaagaattcagcttcttaaaggagctgcctcagactgtctcaagatcttagaaggccatgcctacattgccaccagcatcccttggctttttgcttggcttaagaatctatcttttccgttcctccttccagcatactcagcacagtccacctctgtggtctctctgtggttttctttctgttttcctgctctctccatttctcattcaccacaccctgggctatctttcactctctatgaaataccttggatttaggaattggagatttccttgggtcaggtttcaccctcttcaagtagcgtctcaaacagtatacccactacagctttctccccactctgtcaaccatgccatggggcctactttttgccctgactcccaccagataatgcccatcagatggcacctcttttggctgaaaaatcgaaaactcatcactcttcctgcattcattagacagtaccctttatgttcaactttgtaatttaagtcccattcttgcctcatagaattattgcccgttgacctccatataagtatctgcatttgctgcatcattcatgacatgtgaggcctttgacaaaccctcctatggtgcagcttcctccgagcagctcctaaggaagtgccagagtcagggctttcctctgcctgaattatcggagctcttggcttaatgtgggagaagagatgaatgatctgtccttctatgaaaggcttaccaactccattcaattcacagtggctctctgaagctctgtttttggaaggactgtgaggctgtacctgcacttgattgaacgagtgctgggattgattagtgatgtctgcagtgagcgaaggattgggaagagtaaacaggcatgctgcatatctgtcatcatggctctgagtgtatcctgtttcagaagagatgaactgtgctgtagagatgttagcatcaggtattttagacacatgaagagaggatcagattcagtggaagtgccaaagggattctttcagatgggcaataagtggttctgaagatacgtatttctcagtgtgttatcttggctccatttagccacacaaaaggaatatgggtatagtgatgggtctctcatggctcacgtattaactgtatttgttgttactgcttctcaggcactctgttaagaatgcagggctcttcctcagactcagggcggggcctgggctttacagcaatggttttcagtttgtaatctctctcaaggaagggagaggagcacaaagctgccttgactgccagcaccatcagaaaagtgacagcagtcttggccctgtaattgccaacagtaattcatttgttcgttctctctctctcgctcctgctcctgactctgggggatgcttcttttcctaccctgcctggaaagtgctggggcatgggtgaaaccagaatggttttgattctcaagtctttttgtagagaggaagaatggatattcctagggtcagttgattgagggtgtgttgggggaatgtgattatcgatgatgctgtatgctgggtactagactgggggttcgttacatcaagttgtggggtctgtggaaaggaagttgtcataggagtctaggactcagcagctgtcaccttcccaaagtcacactgctgatgagtgacagagaccacatttaaatctgtgtgtttacaaggtctacaactgcaccctgctacctcccagaagctgaggcaggatgggcaggttgccacaccctcccaacctcctgcaaccttagttgttagtgaaaggttattaaataggcctcacaatcgcaagccaggtaaatatgtcattggagaggttggttttgtttgcatttctggtgaagttgagttgtttttatcccctacaaggtcatctagacatttttatccccaaggtcaggagatctttctgccagaggtcagcattccatccagctcctgcctgctctctgggtggccgactgtgccagtagaaatgccagctgcagccaaaggacaggctttccatccgagaaaagcactcacactcgcatttcttttctggttctgttcctcccctacataaccagaaaaagctcgttaacacatgatggcaaccaggctccaatatctgccagttcccctgtacagattcctctttagcattctctcggcttccctcctcaacaattaattcagatgagcagttgggagagtgcaggatccagttcaaaaggatctgtccccccgtgaaccccaggacagggtgagaggccacctgcacactttttttttgtcagctcacaccctgttggccctttgcaaatatttgtctttcctcatgcacgtggttattcccagaaagatccagtgaattgtctcctgaagataaaatacataaaagggcgtttcaaagtataaacagtgattttaatgaaaaataagaagaaaatgcttatgatacaacattaggtggaaaacgaaggaagaaaaattctgtgagtctaattatggaaaaaattactaagatatgttttaacatgccctagacatgcacagaaaaaaaagactggaaggaaatttattgagatgttattgtttatgagtgttctaattatgatttttaacaatatattatcagagttttctgacaaagaattaactttttattttttttgagacagagtttctctcttgtcacacaggctggagtgcaatggtgcaatctcagctcactgcaatgtctgcctcccagattcaagcaattttcctgcctcaggctcccaagtagctgggattacaggcacccaccaccacacccaactaatttttgtgtttttagtagagacagggtttcaccatattggccagactgctcttgaattcctaacttcaggtgacccacctgcctcagcctcccaaagtgctgggattacaagcatgagccactgtgcccagcctagaaataacttttaaatcagaaaaatacattttttaaaaagatgtaaagcatacatagaggataacttacaaatctgcatttcatgaccacatatatctattgagttgcccctaggatcatttttttcaaagctaatgtctgccacaaatgggagttttaataggttataattcatatgacttagtgttaaacctctacgttgggattcttaaatttaacatggataaactgaacttgatttcctgcattaaaaaaaattaaagaaatgaaagttctgactgttttattgtagctggggaattctttttgcaggtgatgctcatgttacggttttgaacccaggactttgcgttgcagttttgttcaggggttgcagaataccgatctgactttgcaggaatgactgtcttggtgcataagccattaacctctctgcgcccttggattgcctcctctcctgccagcagaagccaagtcacctcatctgtaagggagtttcattgaggactaagtgggaccaggccgaaaacgacccccttcccccataggaagtcacagaacagccaagccctggaacaggaggagcagcttcctcctgggcacagctgtgcagaaccagaggcgacgcatttgcccatcgtaaaggctgattagaaacagttgggtcccaagcagaatccttttgcccatgactgtgtccatggtcgaggtgtccattgtcactgttgccagatgccagcactggcgagggttttgccttcctaccgtaggcttcttgacccggcacctcggaaagtaactcctgtccattgttccttgtgccatctttcttaagaaaacatgaggaggagcagggtgatgctagatggaagcaggagagcctggggtcttagtttcagtggctctgacttcagttttctcacctcgaaatctcccttctctgaacctttttgcgtgctcttctgtctgtctgatattcatcatctgactcatctctaccagtcaggagttgcttcttccaggaagccacattccatggactgatacgctgggctccatgccatcctggggttctcttgagtacatctggaggggtgtagtgtgttgtaaatgcatacgatcatgctggtacatttcatcaaaggtggcagttacactaccagttgtgtgcccttgggcaattagcatcaccctgctgtgcctcagtgtttccatctataaactgggtataataatcattcctaccccataggttgctgtgaagattggctcacatcagtaatgtacttggaatggatcctggcataaaaagagcccttggaaaatgatagcgttcatccttggtatgacctccaagttctttgaacctcaaagagccaagtcccacatctcaggtacatttcagttcattctttctgagttgatttttttttttttttttgagacaaggtctcattctgttgcccagactggagtgcggtggtgcgatctcagctcactgccacctctgcctcccaggcccaagcgatcctcctgcctcagcctcatgagcagctgggaccacaggatgcaccaccatggccagataattgttttgcatctttggtagagacaagccttcactatgttgcccaggctggtctcgaactcctgagctcaggtgatctacctaccttggccccacaaagtgctgggcttacaggtatcagccactgggcctggcctgagttgataatttttgtcatttctttctcacttttctcaggaaaatcatgactgtaaaacagatcagttttgctttagttcccaccctcatcatcaacccctccccagctaccctgcaaaagagtcacagatcattgggataactagaaccacagagatccccctagacttgtcagccagggaacctgacactcttagaccttcttctgagtgctttgtccttgtccggagagctcggggaggagcaaggttgtactgggatttttttccgatcacagaaagtaacttagctagctgttgcccagccaatttgcccaagggagaggttgctcctgggttgcaggacgcatccatggatggagcatgggttttgggctgtggggggacaatgaggtggttcctgaaatccctagttactagcagacaagtgcatcagacaagtgcatttcaccgttctgagcttcagtctcttatccaagcagaaacatggccagaatgcaatgtcctaatacatgtaattcattacgtgtgttgtcatgtaatgtaacacacctattggcagtctctgacacaatacagatattgaccccatggtcttgccccaacttaaataaaaataaaaacgaatgcaaaagaggaatcttctttgcactcgtgtgatgtctgttaattcttggctttcttccttcataaggttaatcatctccctgtcacccctcccgcttgtcccccagcctctgtgtgtcaccttctctctgagctcaccctctctaggaagccttccttgctggaatgcccattccctgatataaggattccacccaccacgccccttgcggttccttgccggtgtcctgtcctgggcagacataagccctgtgggttccagtttctcattaggaacctggatgatggagcagggatcatgctcattaagtccgcagaactcatcagctgcttagcagggggccaaggagggctgagcctatgacgggtgaataagtctggttggcctctgggagtacgggatcagaattccaagtgactggggtcagtagcaggccaccaagagccatcccacctcagaaagacagaagccatcactgcaaatggcaagggcatgaggcagtttgaaactggcaaaactggacctttcatggaatccagggcttgagctttaatgctttacacttttgttttttcattccatacgcttttgctttagcttcctggcaaaattcagacaaacctagaagggataataacttacattcaacctctgcttgctctgtcctttctcacacgtgtttagagaaactggaggagcccgggaactgctttctcctctctaagagtcttggtggtttcttgtgtggaaatgaatgggaagttcaccctggttctgcaaaatgggtgcgaaatgtaaaatgtatataccttctatcctactctttatgttccacaaattttggagggaaactgattaactctctagctaccatgttccaggtgcctgcacctgcttgctcttggttaacctgcacccacgttcccccgcctgtctctgaagtattcacaggtggaggctcagatgcacacagtgattgagtgccctagctggggttggaaactctgtccatgaactccaaagcccacgctctcttacaccctcccaaaagctgaggcttcctcactgtcttttgcattatgtcatgggtggaaacatgcaccttccctgaccttttggcttggaacatggaagttcattgactttgttgcctagcagggcctggagctgggtttcttgcctgatcaatgtatatcattttgccaagagacagagtctgtgctggagagattgattccctggttatttatcttcctctgcccagtgtaaattggtcagcctgatcctattcgcatgataaaaatcataatgtctcaaattacttactcaataaaatgtgggtttgtctattattagtgattattagggttataatgcagcatggaaatttggagcaaattaactatacatgcaagctgttgggctcaagtgcagttaatcatacgcatacagtgccagtgggcagaaggttttgcaagaatagcttcaggaagactttgtgggaagacagatgaatactcagggtttttttttttttttcttctaacttgtcctccttgatcaggatttctcaaatgcacatttgtctaatatactgttgaaccatgcaagtaccaaaacaaaacaagaaacccagaattatagctcaaatttaattaaaatagcttttattgcttctattcatgtgtccctggattttaagtgatgcgtcagaatttcatgatgagcaaatgcctatggatgccctcatttctcatccttcttgactgtctgctaagattcactcttggtcttgtctttgagcttttctgttcagtgatgtaatgggacaggctctcctgtcatcaagagttcccatcatacctgggcactgccatttcctctgtggtagatgcttcctggacacgtgggcaggtgagaggtgctgactttgcctacttgcagctgaagagaagagagatgtagctttgaatggccacatgagtgtttttttaaatgaaaaaaaaatctatgtataacttgtttcctgtgagggtgccaggaaactttacaatgaacttcgtgaattaaacctctaccagatgaatagaggtggtggcatggtagcagaaattaggattaaaaaaatggtttttgatttatgaaaaatttttctgcaggaaattttgatttgttctttgtggattctgaggataaaattaagaccaacattgaggatgagagacagaactgaactcaacttaaaatagcttcagggaggaaaagcaagtgcattagataagtaagtgggaagtccaggggtagacgtgagttcaggcatagctggatccaggatccgacagcttgcatgtgtagttaatttgttccaaatttccatcctgcattataaccctaatgtttgctaataacacacaaacccacattttattaagtaagtaatttgagacatgatgatttttgtcatgtaaataggatcaggctgaccagtatagactgggcagaggaagattcataaccagggaattaatctctggatccaggctgaaatgatattatcagacacctttctttctctggtcctcagttttgatctcttctctgctagctttattctaagacaggcttagatgggatgtagagagcaaactctggaagtggagtacctctggcctccaaggccagtagttgtagcaaaagtccagggctgccgctcattcactctgctcggacctttctggtcacttgtcttctgtggtttggtccttgtggccagggacaatgaaactctcattgattaggcctgagttatgtgctctctcctagagccaggaagaggcttcggccctgcccagacccggtggcctgagagtcacagtgaggcgcagctcccaaagggagactgaaatataagcaaaagaaaaggaacacgtactgggaatcccaaacagcaaatgttcactgtgttcagggaggagtcttcaggcccacagtgtaggcattcaacaaacgctcttcagggagaaggaaagttaccatcaaaatccgtcgttgaaagtattgaagttccagctggcggtctgatacagcttagatgttgtccctgcccaaagctcatgtcaaaaggtaatctgcagcgttggaggtggggcatggtgggaggtgattgggtcatgggggtggatttctcatgaatggtttaccaccatcctcttggtactgtcctcacgatagtgagtgagttgttgggggagctggtcatttaaaaatgtgtggcacagccccccaccctgtctcttgctcctgccctggccacatgacgtgcctgctccgccttctccttctgccatgattgtaagcttcttgagacttcccccagaagccaggcagctgccagtatcatgtttcctgtacagcctgtggaactatgagccaattaaacctcttttctttataaattacccagtctcaggtaattctttatagcaatgcaagaatggcctaatacatggtctctgagcaggattattgtagaggggactgatgttgaagaatggaaaagaaggcagtgtcagagaatgctgaagagtgtggatcttaaagtccaacctcaaggcccagcgctgccacttaacagctctgtgaccctgtaaagtcactcagcctcattgagtcccccatcctcccctgtgtagaatgaggctaatgctagtgctcatttcatagagttgctacaataatcaatgagataatgtgcataaagatttacatacataataactgctcaataaagggtagatgttaaaattagcatcagcgagctctagaagatgctaagttctctggaaagatcagctctgctcctgtcaatctctccaaatgttagattttgcctcaaattttaggcattcgttcattcatttattctttcgtaaattctatcgcattaacctttacaagtgttaaattaaatcttttccccaaattatgcattagaaccaagttcttatgtggtggatgtacctcatttcagcaagagctttctaagggtacagaattaaatatgcagcctctgggattcagtgatagctcatgggacatttgacctacatggaaatgcaggctggagttgcattttaattggcaaggatcagcccagttgtccagcttgtagcttggagtgtggcctggctcccactccagagagatgtacatcatgatctgcgtgggtgagaggatactctcaggaaatgggcaaagttgccagctgacctctccagaaagagagactatgttgttagtttcccttacttggatgagaaatttctccattcctagtctcattttcccaatagaacacggaggcagaatttaaagcctcaaaacaatctgatgcacatcagctatcaatgaaaaggaccagcttggaggcagaggcacctgagttttgcatcttggctcaatcacttactaactgcattgtgggttaacacagtgtgtgtgtgtgcacttactaactgtgcaactgtgggcaagtgatgtaatctctctggagctcgtctttccttttttcttttcctttttttttttttttttttttttttttttttttttttttgagatggagtctcactctgttgcccaggctggagtgcagtggcacaatctcagctcactgcaacctctgcctcccgggttcaagtgattctcctgcctcagcctcccaagtagctgggactacaggtgcacaccaccatggctggctaatttttgtatttttagtagagacgggctttcaccatgttggccaggctggcctcgagctcctgacctcagatgatctgtctgccttgccctcccaaagtgctagaattacaggcataagccactgcacccggccacagttttcttttctatattgtagggataataatcctcccttgcaggactgtgctcagcacatgttcattgctcaagagaagtagccactgttattattattgtcagtatgtatccaagtgtttagttcattttctctgcatttgtctaactcccttttttcccttgaactgtaaagctctcagcccagggatatagtagcaccagcacatagtagatgatcaagaaaaattagtcattctctctggttcttcctttcctgtatcctgttgtctttatcagttcaggctgctgtgacaaaagtatcacagactggatggccttaaccacaattgttttacatggttctggagactgggaagtctaagattaaggcagtggaaggttcactgtctggtgaaggctgggctcctgattcatagatgtctgcccttcttgtgcatcttcacatggtgggaagagggtgagagagctcaccggggagtgtttctcccagttcctccccagtacacagaaaaacaaagctttctgtctcaccaggaggactccacggtgagcatagcttggctcagcccagcaggagattttgaaccgactctggtagattcttcctgcagccattcagctcccacctctttctctcaaaaagaaatccagggctgggtgtgtgtgggcaacttcaccctgctctctttgtcccccaggcctgcactacaacaaatgtctctttgtgtccaactcttcttccatttctagtccttcttttctcttcttctcgtacttcccatattcctaatacgattggttactcaaattcttaaacaactcacaactcattatctcccttccatgtaaaagtaacccccagcctgagctacctgaccccgtggtttaaacaataaagcaactgaccttttatcagaaatttgcaaagccatttaatttacatatgtccttggcatccacaaatattgcttctcctttcaaccagcatgccacccttccagccattcacatatgtattcattcattcattcatttattctttcattcagtcaataaatatttattgagtagtaagcacatgcaaggcattgagggtggggagggaaagagacacaaattgtccttaccctcatggattcaccatgtatttaaaggccacaaatacttgtgtgagaagcaagtcttaatagtctgaagtgttttcttagattcccttgagccgcaatgctgaaaagcttatggtggttttgctaatgaatttgacaaggccagaaatagaccagatgaagattgatccattggttaattgattaattgattgatcgactgaggaatgtcagcctggtctaccaaggtttatgaaagcctggcatatagaaatgatgtcgttaatgcacaaatacctgcatcctgtcttgaactccctctaggggccaccatgtgtatcagtgtcctgtggctgctgtaacagattactacaaattttgtggcataaaataacacaaatcgattcccttacagttctggatgtcagaactgggtgactttctcctgagactgtcctgatttttttttttttttttttttttttttttgcttgtcagtttgttttgggtgatgcagatggaaggtaacgtcacagggcagctgtattccaggtacttggtgactcttggttgcgatctgatgactggctcacagtaggaccatgacgtgagcagatttgtagtcctgcatgaatgaaggaaagaaagaaatctgacaactcattgattcagattcacagactctgcattttgaaccagaatacacccgagcaattacctagcacaaaatctcctgtctgcagaggagttgcaggaaggagaattcactatatcctctcctgaaaatatcccttgtggtcaaggtggctatagactggcatccctctgctccctaagatgccagggactcacgtcttctaggatatcaggggaagatacagggcaatgggcctcagatcacagacacggaaaatcattttctatttcatggagcatggagaagcttccttcaaaaagctagccttcgactttctattttttgaactgaagggcaggccaggagggagctgacctgtgtagagcttggaggttgtgttttcagctgagaaaagtgatcctgaacctctccatccttgcaaagctcagatggaagcccaggggccccagccctccagccccacacacatgccggtgcacctggactgccactctacctgtttacaaattacccccattttctgcttggttcagcagcaactgattaccgtcccccgtgatgtaattagggcttcagagttcacgtgtgtctattatgagctctcctgtgctttgtcttggtgcttcgtttctgtagcagtaatcatatatatatataaaaatttggtatcaattgtttggctaaattatgcacagtgggccatcctaacctgccattaacataacgtatgctaaagaatgtgttgtgtttttttgttttctctgataattatactctaaagcatcaattgcttatttgagtaaattaaactttgagttgttcttatttcttcaaactttcaaattgtcttgcctgcagcagatgcagacccagcactccggctgctgccagtggaggcaggagcctcgttaccacctttctgagaaattcaagtgccacacagtggtcaccagcattgtagctgccctgatgttccgggctcagctgcaatatagcacatctctaccaccatccccagagtgacctccagaactgtaagggacccccgcctttggtacagagatgggagttaaacacaggtgtccactggagtcatgattcctctattccctggacaaatatgcaatgagaatccctgagggacaggcactgtgctagatacccgagatacaaaagcgacaaggtttctatcctctgacagtttatactttagtgcagtggtcagcagactgtttctgcaaacagctagatagcaaatattttagactttgtgacccatacagtcaccatcacaactattcagttctgccagtgtaactcaaaagcagccatggctgttacataatgagtggctgtggctgtgtgccaattaaactttatttacaaaaacaagaggagggccagattttgcctttgtcaaggaagtaagcataatagtgcaagcagcacgtgcccgctctttcacactggggcaaacacaggggatttattcggcacaattgagtaatgtggatgaggctgctcagggctggcagttgtaggacgcaaaaccttgaggggcatcgatattctggtacagctgtcacccatttgcagcacagctgggacactccacagagaatgatcaggaaggccaagcccagatggcattgttgaggggctttctcttaagactgcatctgagtggcagggcgcagtagctgacccttgtaatcccagcactttgggaggccgaggtgggtggatcacgaggtcaggagttcaagaccagcctggccatgatggcgaaaccccgtctctactaaaaatacaaaaattagcctggcgtggtggccggcgcctgtaatcccagccacttgggaggctgaggcagagaattgcttgaacctgggaggtggaggttgcagtgagctgagatcatcccaccgcacaccagcctggccgacagagtgagactctgtctcaaaaaaaaaaaaaaaaaaagttacttctgagttaaaatatgaagagtgagcagtacccagccatgcagaaggacatggagtggtaaaagcatgtggttccattaagggaaagactccagggcaagaaaaaaacatgtcatgcttgtacctgagggaaggccagtgtgattgcagagtatggggcaccctggaggtctggaatgggaggagtttaaacaggtcattagagcttcaagatgaagcataggccagtgacttggttgctgctgctgcgtaaccgtgtggcaactgagtggctcacggcaatcagtatttacttctcacgtgtgtgtggggttcagcagaactaggctgggcttggctgccctgccctactggtcctgctggttttggtggggcttccccctgtgtctgtgggtcagcttgttttgctcctgcatctttgcatcagctgggctttctgccctaggctggacatgggtggggcactttagctggggtggttctcctccacatgtctctcatcttcctgggaccagcagggctagaccagacatgactttcttatggcaagggcagaaatgcaagacagcaactcaaaacacataaggactttcaagtctagacccagaactggcatacccattcctctgtcacacactgatgccccaaataaatcacatggctgagctcacggttagagagggaggatactgcagtcccaaagcccggggcatggatccagagaggagggtgaagaatgggcccctgacccaagactgcacttgtatttgagttgcataagaagctgctgaggaattttaagaacaggagtgacatgacttccgttacaattgaaaaaatcaatctggcgaaatgaatggggctacataggttgggggaaggaggtaagagaggaagtgaggagaatagggtgggtcgaacctgttgaaggcccagagcttgcttctcttctgccgcctttaggaaacgagatgaattgttaaacttcttgcactgagctttaccaggtgagctgacagttatcctctgcattcatcaatataagccccataaaaggcaaagtggttgaggagaaacgagaaattacagcccagattagcagccttgagtgctccttgtgaacacaagacactgacccaaatcacacgtcacggctcttcgcccattaacgcttatagcaggattattcccaaggaagctgtagccattatatttgctgccatcacaacagtaaaataaacaggtgtgactgcagccctactcctcgggttgtttcatgctgatcagttgttaatatatgtgtgacttgaagttggagcctgttgggagaaaaagttgtctttagaggagtaaagtgttgccttgctgtgggaaggggaaactttttcttgggaagtggactcaccaataatttttgcatcatgcgcaggagaccctactaaaacctaagtgtgcaatgctttaaatcagtaagtttgtttttcattaacataaaatccaaaacaggtgctgtgatcagcaagccgctgtcctccaagtggtaattcaggaacccaggctccttccattctgtggcttcaccttgaccaacgaagaccttttgaggttgccacattctccaggccactaacacttatgtcattggctacaactcagtcacatgaccatggctgcctgcaagggaggctgggaaatatagtttgctgtgtgctgggtgggtgggagggagcgtcaacattagtgaacagccaggcagtcgctgcctcaaatttctttagtgttatcctttcatgccagcaattgaatttgatttgcactgtttcacttctctacaagggtgtaaaaagtagaggttcctcttgaaagaatttcctccccatctaattaggaataaatagtaacttctcttagaagcaaagttaattcaaagacctgtgctaacattcttaaatatctgctagctgtaatgaagaaatcaatgtactttatgttcttagctcccacagtttagcctaaatatttgccctggcatgcttatactggtccaagcaagcattaggtcatagcctgttcctcttccttatttgaaggtgtttttacctttctcagcattccacaagttacttcgtccttcctttgttctcctctgcctttgcctcttttttctttttttattttaattttttttttttaattatactttaagttttagggtacatgtgcacgttgtgcaggttagttacatatgtatacatgtgccatgctggtgcgctgcacccactaactcgtcatctagcattaggtatatctcccaatgctatccctcccccttccccccaccccaccacagtccccagagtgtgatattccccttcctgtgtccatgtgatctcattgttcagttgtcacctatgagtgagaatatgcgttgtttggtgttttgttcttgcgatagtttactgacagtgatgatttccaatttcatccatgtccctacaaaggacatgaactcatccttttttatggctgcatagtattccatggtgtatatgtgccagccatcccgttactgggtgtatacccaaaggactataaatctttctgctataaagacacatgcacacatatgtttattgcggcattattcacaatagcaaagacttggaaccaacccaaatgtccaacagtggtagactggattaagaaaatgtggcctttgcctcttttaaaaagttctaagttgctagccagtcggaacaaatacagaatgtgaggtccctttccagccaatggaaaccggacacagcagtagagtacacgtgtcaggttataaatgagcctgtctcctttgtccggtgttctctcatggcaaaactgctggcgagtgtaccctttctgcagaaagtaaaaatggccttgctgaggaaattaaattcctgttcgagtgctatttctttatggcactgaggagcaagcatttctaacaatcatattgcttaagaagtggatggcaagaagataattactaatatgtctgcaatcgatctgaaattgacacagttgatctcactgattcatggggaccctgggagtatgtttgtgtatttgggggttgggatgggggggtgggtggagggtcagagaggtggcaaaagcaggtgggaacagggttacagagcaaagtaattagatgccctttagatgctcttagttaaagaccatgcaaaaaggatgaaatcttttgatcatgttcttcacaatattagaggtaaaacatgaactcaacgcttttaggaagaaacaactggattgcgttttctattttattgacagaaactagatggggaggccagggtgtgttttattattgcacacatacgtaattacaaagtctttgcttttttcccctacataaatttattttgagatttaatttccaccaattagaacccgaatgaagccgttttaatgtgattcctgcatcccagcaacgtggccctgcttcttagtgcgcacgtaaagaaacaatcctggagtgaattttaagtacctaaagttgtgttagactgcaaatgaatatccaattcaatttgtaggaaactttagattaattaggtttataatttgcacagtaaggtaatgtaaatgtgttgctacggcttgactttttgcttaatcctctgagtggatatttaatctttttaatattagaattaaagcaacttggaagatatgaatattaatctaattatattccgatcactttaatttctttaatgttttaaataacaaaacaactttacaaattggtttaggttggggaacgcttttagaggattttgcatctcatcagtaagtgcaatttagaggatgcaggcttgggaagctgtaccttaagtttatagttatgcaaatgaaaaccattaatcctggagcctctgacttgcaaggtgtgcttcagaaatttgcagcttctatttaggtaggaagagtttgccagcccgaaaactccagtaagcaaacagctttatagtaccccagccatagaaagtgagagctttcgaagaatctgtggttagaactaagaggatttttctttctcctttttctgctgttattatctcaaggagagagggaaaaaaaaaatcagagcaggacatgaacagtgcttgcaaattttattacctcattataattgatacctgctctctgagccaataaaagaagctatattcagcactggctgtataagatctttaatgttttaggctgtcaatgttggctgtggttaggctgacataattatgagctgcatgtaccaatatatagctctttacccacaaaagcatgctgcaacggggaatctttcagagataataaaaggattcatcaagtgtctatacgatagctacttaaatcgctattgttttagttaggcccgcaaaacatatcccccagctatcccggtttcttatctttcttacttgatatttcaggaatttcaagcttttgtacagcttgttcagttgcatcctagaggaggaaaatgcttttggcgtgatttccatttcaagatgacaacagggagaagtctttccaaaatgcgcgtgttgcaatttcagatttaatcaggggaatacattaatttctggaactaattacagattttaaaagagtgatgggtctggtacagtggctcacacctgtaatctccacacttggggcggtcaaggtgggaagatcccttgagtccaggagttcaggaccatcctgggcaacatagtgagaccttgtctctatgaaaaaatgaaaaataattagccaggcgtggtgtcgtgtgtctgtaagtcctagctactcaggaaggtgaggcgagaggattgtttgagcccaggaggtggaggctgctgtgaactgtgatcacaccaccgcactccagcctggatgaaagagtatgacctttgtctcaaaacaaacaaagaaaaatcataaaagggaggcagaaaattaactgaagaaattgtgttataaaaggcagtgttttaagttctagaattaaaagcaattgcagcaaataccaagtgagattttctgtattttgagagtttgtgtgtgcaatggttttccactgactaatcaggctgataaaacaacctgaaaatggctttcccatggagtttatatatttcgtcagagacctaaaatggtataaatgttcaataatagccagtgaatataaaactaaataatccatatgagacaaaacaggtagaagaaaaaaacattcctcctcagatatgcaccttttaattgaataaagcaaacagtaacagtgattaccaggacacttgctgttttctgttattttggtttatattgcttaattagccagcctttctaattaacattacattttgctgagttcacattgtgataaagatgaatatcaattcttttctactcatctcattgagagatagagttgaattcatcttcccttgtatctaggctgcacttattcgtttgcttgaccaatggaatgtggctgagtggccgtgtaaaatgcctgactaccctgagactgccatgttgaaggaagcccagctagccatgtggagaggccttgtggagcgggaaatggccaacctccatccattggaagtcatcccatttgaggccctagatactgaaaatcagaaagaagttacttcccattccccacctcaaggccctgtccaaactgaagattcatgggcagaataaacaattgctattttttaaaggtgtatgtttggggttgtttcctacagagcaatgaataaccagagcaaacacccaagggcaataaattatgaatagtgaatttaatttttctatgtgacctatggaatcagcctattttatggcagtacaaagtatatgtagcaaccaaacagtttcttctttcctaaaactcaaagtgagtcagacttcttaggcttgtagatgttgaggactaagctttgctctttatcttctctttatggatttccctttggaagcagggataagaagagggaaggtctcccagatgtaaatttctcataaatatttgagctccatttcagtaattctttcattctctgatctgttgcctaatcttctatttagcaagtactttccatgaaatagaaggctttaattgatagaattactaatttgaatagcttagcacagctcagcttgtaaaaaaaaaggaaaaccactatccccattaaattctcatcttgtaaaaccagccatcagcacctccctgtctttttactaaagtttcccttctttggtctttagtgctaagtaataggctgtcactagaccaaaaaaaaaaaaaaaaaaattcagcatttcttttcattggaggttaccccagaacacttaaactttggagaggaaaatagaacccctgaagaaaagtgaattctcatgacaatttgtacattctttgaagaatgactgtaatacatggaggagttaccttggacccatgtgcagagtagtgtcgtgaatgaggcctgtgccttgtcctgtggtttaaggataggtaaatgtatctggggcagagggttgcctgggacaaaggcattataagcttattcatttaacttgagtacagggtttctcaagctttggcactgccaacatgtggggttggataattttttgttgggatctgccctgtgcattgtaggatgtttagcagcatccctggcctctacccactagatgccagtagcatcccttccccctcttgtcacaaacacaaatgtctccaaacattgccaatccccctccattaagggtcatgtctcttggctgggataagtcttctctaccgtatccctttaactcaagaagtttttcttgctaagtttatgtgatcttgaaaatacggtgagattgaacttgattttctttaaaggacaaatatctgcttcttccaaattgtcataggaatagttcaaagctaaagagcctttcaggcaggctgggcacttcaaacctacaaaacatagtgctaaaattaaggagtgtatagtcgtgtgtttatagggacaggatatttattatctatcacttttgaaaatgtcattggcattatcgttcacttttacaaatacgaaggaaaaatatgaaggagttctagaaaacaccagaagtgattttgccgccatgggcctgaattgaagagcttaacccactaatctgttatgactgcttggggagtgctagcgcaggttctctaacacactgagagtcgtttggagggtagtgtgaagtggcgttatagttctccttttaatggttgagacaagaattgcctggacctcttttaggatacatcaccagtcttccaatggcaaacttatgtttattccagctgattctccccagcatgggggcatgaattgcagtggaaatcagtggactagaatttggatgcaattgcccccaaattatcgaagagaaaagaagaccactgtaattcaccggccatagcatttttaccaactgtttttgctaagcattagtttcttgtgataggttcaattctcaggctccttctcattagagtctttctgtaaagaccattattatttctgttatatttcctgtggctgagctgagccgcacttggagatttgatccattttaactctctcattgccttcagagagttggtgattttggggggggcaccagtgtgagtcctttgatccttgaatgacaatttggatttgtctcaaggtcctgataaatgggaactggaggaactggcctactatggtattacaggctagcacatggtttgcattctgagggagctcagaataggcaaggtagaagacataggtggtcaagaatttagaaagacccggactcgaatcccagctctgatccatctcagctctgccatattgccaagttccgctgagactccatttactcacctgttgtatcatctgaattatttccatatccataatgtgcaaggatatccttccatgttattagaaatacagatacaccatcattatcagtggccaaatcattcaaatcgctgtttgcttcttctcgggctcttattcaagctcacgatgctattctcatagtgattgcgaatctcactgcataaaggtgattttgaaaacatcacttttcctccacactaatgtgtgagcttagccagagtaggagatatatcttacttaaaaaaaaaaaaaacaaacaaacaaaaaaaaaaaactccttcttcatttgttatagttccaggatagagtgtgtacctgtatagagagagtcaggcagatacaggtgtgccctccttccaagatgtgtgatggtgggcaactttctttgcatctctgagcctctattttctctatataaaatgagagagaaaaaaataattcctagatctagagttggtgtgaggctaaaataagctgcttttagtatcacatttggcaagtagtaaactctggataaatatacttttgaattgtgtgattattgttgttaccatttattgaaagggaatgatgaatgtagtgagagaaggaaggaagagagagagggaagaaggggaaaaagagggatggaaaggaggaaggaaggaaaggagggaggaggcaagtatattagtcatgatatagggaattgaaaagacattcacgttttgtggtgaatgaaaataacttgacctttatgaagctggcctaatccctggaaggaaaaaatttccttggatatgtgatttatataatcaatcaactagtccttattttggtagagctaaacttctgtctttgggtttactcaccgtatctgtgtgcatcctggcaatgtttacgatatacttctactaaaatattattttattctatactaacaaagggatttgttgtgtgtgtaaaattcaaatttcaatgaagattgtgtatttttatttgctaactctggaaaatgtgtttacagaagaaccagagaaggacttactcctctccgtacactttggacatgtcaaaatctagaaatagagatcagtaaaggtaacacatagcaccttaaatctgatttaaaaggaaaacaatgactattatacagatttatggcttcttgtcaataatactctgatttctggagattgttatcagtcataagctttataggaaatatctccttttgaaaatgacattttaaattaatgtgaaattgtgttttaatttaattcacagggagtcataaacaggtgggagaattatggaacaataattgtgtttgcaagaaatggatttcatcctaaaactccatgaatatgctattacagtttgttgtcatcctgaaatgctctgtttaaccataaaatacagcgtaaaagacaccctcatgttgaagtccttaatctagtgtgtaattgcttaagtgagcacattaactatatcgtcaactacctgttctcaaacactttaacaatcagctcaccaatatgggtgtgatcttgacattgagatgtagagcttgacacctgcatataaagtagaaactcaacagtgtttgagaatttgccattgcatctcagtcttttttatttatatgttttttctttttttgagatggagtcttgccctgttgccctggctggagtgcaatggcgcgatctcggctcactgcagcctccgccttccgggttcaagtgatgctcctgcctcagcctgcctcccaagtagctgggattataggcgcatgccaccatgcccggctaattttttgtatttttagtagagatggggtttcactatgttggccaggcatctcaatcgttttactaagaaatttggaggccttgagaaatgggtaaacttgaaacatttaaaaaagttgttctgctaattatcctaccacgtgtgtcagagacaacattaccctcttattacttaaaagtaatttggactggttcgcacacacaaaaatagctttattaacaacttgagtaatttatcaagttcagattctttttttcctccagaaatgctgcttttggtacactgagaggtcattcatttaaagtttgtccttggcaattccttattgaatagattccattttattttatttacattttgtacaaagctgataaataactgaaaccaaattagctcaaactggttatatttctgggtacaaaccaggtgtatagttaatccattgttgtttctgtgtcaaccaccattgtcctcacctatacttgggcagtgggggtggggaggagaacataaaaacccaccaagcctcatttttcttgctaatttatttccttgaacttggtgagattctatctgcagtgtttccaaaaatagttttggaaattgcaaaaatactacaatgctgttgtgccggccacactgtgagtgctgactgtcatgcattttatagcccatgtccctctccagtgaggcttttggccactggccgttaattggtaaggttcttgaaaactgaagtgatggtatcagcatggatgcccgtgctttctgatgccactgaagatggatagaagcttcaagttatgctttgtgcagactgaatttttccaatttgtgcttagtagcatcttattatattagaccagcactgactggtgatgaatagcaagattgctcccttctaagggcttggcaaaccaagaagaatgcagtgacatatgtcttatgtcttcaaaagcaactggacacttgaagagtattttctagtctcattttgtaaacccaattacgagcggagctacaatttttatctttgtttaatgtaaccaatgaggccattgtcactgtatggagaatagctttagtccatattctctgttttttaagactctcagtctccttgcaggtgcctttggagagttaggtgtttgctgtgatttgagggatagtggccaataattttattgaaatgaatattggttaattaaagcttattgtatgccatgggccattctaagaacttccatccacccaaaagcactatgaaatagatgttgttatttcactgatggaaaaacaagcacagagaggctaaggaatatgctgaagcttgcacagctagtaaatggcagaacattcagactggaattcagacttatacactcacattcataccacacagcctctcgaagggacgtgccccttgaacgcaagagaggtacattgggtggccatggtgctcacagtctctcaatcctttatgttgagggagaaatgataaccagatctcattttgtgtgccaacccgaaagcctgacttgactgcctaaaatgttaggaaggactctaaagccctatctggattccaaatttatggttggtgcagactggatttttacaatttgtgcttagtagtatcttattatattagcccggcactgactggtgatgaattacaagattactcccgtctaagggcttggcaaaccaagaagaatgcagttccacgatccacttggaatgtgtgcagtgagtgtgggaggactggtataagtagcaaagcacttggcactctgggtgtaaagcattcagatctcttgcaaaatgcaaattttacctgcggggatacccattcaacaattagaagctgctgatttctggacgagagttagtttatttagaaagtaacactcagagacactgggacagagaacagatccattttaaggctgtgtgagcactgatccatgacagtattggttcaggggcaaagaatgggaggaaagaaaaagacaagttatagctgcactgaaaacaaactgggcatgtcctaattttgctcagggctacttctcttagagtcgttaaggttttgagcatattaacagcaatactgatcatagctaatatgcctctatgtcaggctctgtactgggttctttgagtatactcaccacctcctgacaaggttttggcagccttacttggtagacactatgattcccattacatacatggaatgtacagtaactgaggatcactgtgatattgggaaagtgggacttcagacgctagcctccccttgtagtgcctgcattcttttcacagcccctccccaccttagaatcattttcttcaagggagagtatggtttgtgatgcccttatcagcaaaacttcagctagaagatgcaagggtgaaatacacctccccaccccacgtgatctcatagcacagaatgactggccaccccagactgaaggttagggagactgggggccccagactcaaggttggggagactggggagagggaaagcgaggaagaagcgtaagtgtatcttacagtttaaaaccataatgggacatatcattttcttagttctccatttattaataaaatgcccaataccttctggcatgtgctttgaactgcttttaattatcttcagttggatggagaaaaggtaatggggacctcataatagtcgtggagggacaactgggatttatttccatagggaaggcagagactgtttgccagggaaccaaggcctttcaaagttgaggacacttcccggtgccgtgcggtgtaaatcacagtgcaaactatgcgattatcccctgcagaggaatcgagtgtgactttatgggattcttcaccaagcacttaggaataatctgatataaaacagcaggggtggagagtaatgacaacttcaaattagtttaatgaatgtttacatttaaaaaaaaaaggcttttctgcaaacctgaaaataagaagtgacagcttcctttcctatttcccttgcaagaggtacctcctggttttcagcctgaggaggaaggtggctttatttaactccttcagccccggaacatcacagggcccttctttgtgcattctgggttctaacagccccttgaacagtgcttgagagtatttccattataaatgtcgaatcggcattgaaggaacatctgttttaagtcaacttagactcaatccaggaaaaaaaataaatttctggctgtccacctgctcaaaaggtcaattacccacccaaatcagccagagatggctgatgggctacagatgccgaggatatttttagcaggattttggcaggtaccctgcttgttgaatgcagcaaagaagagggaggttgataaaccattatactgtttgaaagttggtgccgcgccaaatctcccaccaaatctggatggtgcttttgagctatttccccacttctgctgaagaaggattcatttcagtagaaggagtgggataggaaatgttcacattgcttgcagtatgtgaaatagacctcgaggtattttggataaaaaagcaacattcgtgttttagatatggttacccagcccaagccgcctctgctctttatagccgtgtttttgaagtgttcttattttttgttccgaaatcggaatatttcctggcgtgcgtatcttggccccatcacatcacaacaggctgaatgctgtccacaggttgccagtctggatatggaatattagtcaaaacgatataaactaacttggtctctgctataggagggacaaaataactacaaaacaaaagcaagaaataaaacaaaaccaaacaaaagcctgcagtgtttgggcccctttcagggatatctggaaaaccaaatggagaattccaggagcggatttggaaacaaggttgggtctactttggcctttaagccatcactagaaacactgactcttgcgcgctagagtgatgtttttccttctcttttggattgacgtgccagcacctcaagaaacctctgtgaaaaatccacaggtcttcaagaaccagaagaaaacagaataaaaatagctcaaaataaaaatgaaaatgaaaatagagcaaacatccatttctgtgggacctaaagagttgggaaacctaaacaaccagatgatgatagctgttgctgctcttcctgaaatcaattttaaagtaggaattgtcaaagataatgagactagtatggagcaaaaactggcaattttcagttaaccagaatgttgcatgaattagaaccccagattttcctggagatgactctagccaggccatttgaggacaagttgccaaatatttgtattttagaagcctcagaagtgtgcacaattttctagttctcaacaaggcactacagcaacatgtctagtgtttatgtaaatgatctttataaatcctctagctgatagagagttttcttccatcacaggcaaaatgtgggtttagatgcaatttgtaatattgttgtacaagagtggggtcctttcactgacatatacgaagtgttgtaatacaaggcaaagaaaatacaaacccatccttagtcatttagaaagacaacctggttgagaatttaagatgatggtttagggcatagcttgtggaattcgatgggttgcactgtaagtttcagtttccttatctgtaaaagtaggaataatatctagacctaaaggttattttgaagattaaatgagataatgcgtgaaaagtgctgactcagcacctgcagaacccatgcgtcgtcatcatcacgtttgttgagggatttgaggcgtgtctaggaacgcagatgtggagacacctggagcatcttcaggagctgtttctgcggattctcatgtggcttatcaagcacaggaaatagttttcctggaaagacatggagcaaagcagttatttagccgtccatccggcactgccaacctcttcgtgttcctgcaaggattaaatgagagatggtgacagtagagagtcagccctgagggaggagtgtacaattcatgggctactattccatgtgtgtgggtcaggagacgcttaaggcattcacagcactgggtgtgaggaaggatgcaaataagcttaacttatttatgaattatctgccctggaatggcattctaatgttgtgttggaagagagacaagaatgtgctgggaggatactcagtttataacggacgttctgatggccagtgcaaatggcgccaggaatctgtgtttatagagatggagcatggatgcccctgagcacctgtgtgtgtgcgaagggtgaatgggttgctgggagttcgtcggttgtttagggaagcacttacgtgtatgcctgtgtgtgtctctaggactcactctccacttcccaccttacttattattagtgttcttgtttctcttcgctatggggaaatgcagataaaccgtaaaaacttgatagagtgaacaaaggcttcggaagcttccttagttcttataattgctcaatgggttcttcttgcctgctgcacaggtaaaacccagttcactgagatgacattatggcaggaaagaaagagtttaattaacacaagtccagccaagcaaaaggacaggagtttattattacccaaatcagcctccccgaaaatttggaggctagtgttcttccaggatagtttagcaggaagggagctagggaatggaaaatgctgattggttggggatgaaatcattgaagtgtggaaaatggtcctcgtgcactgggtcagcctcagttccagttgaatcacaagtcccaggcctaggtggggtcagtgggtcatcaaaatgcaaaagtctgaaaaccattccaaaaaaaccagtcttaggttctacaatagtgatgttatctacaggaataattggggaagttccaaatcttgtgacctcctatgcctacatcttagctgaattcagacccctctcctaatcctaaccttgtggccttttaggagctttacaaaggtggtttcatttcgggaaaggctgttatcattcttgctttaagattaaagtataaactaaattcttcccagtgttactttgccctatgcccagggatgagtgaggactgccagcccgtggggctagaagcaagatggagtcagctatgctgtcatattcctcttatggtcacaatttcacaaaggtggcttcattctcatgaccattgctcccaggcattgttcttgaataccttagaaagtttcattagctcatgtctctcctctttgtaccaccttccaacatttccctactgccttggacattaaagtccaaatccagtctgttcatcatgatctgtggagcctttgataatcgcagcctccagcttctccttcacacctgtctcctgtctcctgctttttctttttgtgcactgcccaagaaccttttcatctactaatctttgagtttgccgtcctctcttcctaaatcactcccctccctccactgttccacgtgggacgttccttccagagaggcctcccttaagcccaccttccatacctcctctggttatcctcagtcatgaggccctgcttcctcccgcacactgagcacaggcagtacctgctttactcatgtacttgtttattatctgtgtcacccagtgggacatagtagactccatcagggctgggaaggaatctgccttcgtcaccattttgacatcattatcaagtgcgcaattaggctcacagttgagctcaacataggatctgtggaaggaaagaaggacagaaggaaggaagggggaagggaagaagggaggaagggagggaaggaaggagggaataatttccaggaagcctcattggatttctttcccccttatttctgaaagctcacctctttacagctggcaaggccagcagaactgaacaatagagccggattaagcaagcattcaggtgcccacttaattcaatcggcgaatttgcatttctcaggctctgtgccatgagagcctgccgcctcaagggaccacctgccttctaccagaaggactttgctccttggagaatttccctctggcaatggtccaggtcaaacgaggtaccatacaaatgtggcttgtcaccattttccagtttaactttctcaagccttggctgcctcgatttcattccagactacagtagcagctgaaaaggtagctaccattgcagtcgaagacactggcagatgggactggcttgttggcagagatggcagagatggcagagatatgaactatctctgaaagggcattctgcatgccacagttaagtgctctgttgaaggacggctctggaagggagcatccgcgaaatgaataagaaggtggttattagtgaggtctccctgaaaggagcatagctggatgcaatccttggaggccctgtctagggcctgtctggggctccagctttcatagggccggccatcccctttgctctgggtgagatctgtctttgcttctggtgattctgatattcactatcgagaacgattgctttaaaacacatcagatcaaagttttctaaaatcagagtaaaagctaaaacctttgcaaggtcctgcatgacttgagtccctgttcctcccttgacatcaaaatggctgttgtctgctctcgctctctctctttctctctctctgcttcagctgtcctgacctccttgacctttcttaaaaactttatgaaaactccacgtttgggcttccctccacctgagatgctcttctcggctcctgtgagggctacccctttaccctttatagtgtctgcccggacatctcctcactagagaccttccctgaccactgccacatggaatagtactaatacttcatgctcatcctctgcctgccctgggtttttaatttgtgcgtgtgggtggggtggggggcgggggggggcacttatcaccacctgcatattatgcttttgtgcatttcaggttggtctttcccgcaagaaggtaaactcatctgcagctgtattcgctgtgcctatggtagtgcctggcaaatgcacagaagtgggtattactgaggactttgtggttcgaatggaatgagtgtgctgctgacagtgttgcgagtcatctgcaaatgaaaagtccttccttctcttcccttctggaaccttccaaagaggctagcctcctgagagggcgtctcctgggaatgcctgtgatccaggcaaggcacctaaatcagccaataaataattagttttgagaaaaaagcctgcacaaaagcagaactcacagattttctcattgatcttcctgcctttgccttggccatggtcagtctttggggctattagctgcatgtacaagtgcacaggggatgggaggggggctccggaagatccctaacccattgtggacacaccatttatgttagtggaatctggtaagagtgattgaggagagagcattgggtgaatgaccctgtaatccttataaaaatagtagcaacggtaactaatgatgtttatgaactgcctaagaatgccatgactgtgtcaagcacttcccataactagctcatgtaaagcctgtaaccatcttgggggtgaggacaattatgtcccattgtgttatgtgtctgtgtttgcaggagttgttcagtggtaaggtgcagtcaggacttaaacccgtgttcctgagagtagctctgtgctgcctgacacactccttcctcctgaatgcacaatcatatgttcacgtgccacatggttttcagaaagcactgcacgtgtaggaagctcaagacagagacgtggctggtcacggtggctcatgcctgtaatctcaacgctttgggaggctgaagcaggaggatcacttgagcctaggagttcgagacctgggcaacatggtgagacccccatctctacaaacaacaacaacaaaaaaaaaaattagccaggcgtgggggtgcatgcctgtgctcccagccactcaggaggctgaggtgggaggatggctcgagcccaggaggccaaggctgcagtgagatatgacctcaccactgccctgcagcctgagctatagagccagaacttgtctcaaaaaaacccaataataataataataataataataataataataataataataaagaaagcgagagaggaggtagggaatgaatgccgaaagtggttccttgggtctgatgcccacgcttaaccgattcccagccaaacatttcacagttgtcttacgcacaggcgtaagatatgcatctatcttggtgtgcacctgagaagtagttatgtctaagtttccgacttgacttggtagagtcatttgatcagtaaagcgcagagcagatgaactacctggaaagaaagtgccggaactccccacgtgtgacatctcacttcggggaaaggtgggccctgcgctgcgcttggcgaaggtaaatgcacctgggtatcctcttgacctggaatggtggaaaataaagaaaacttcagcatgtagcaagtagttgtgagtacgattaatgctgtttagagttgccagttctcttacgcactcagcgaaggccgtgtggcttcgcattaatcaccaccaagccaacatgagcttccagcaaaagagcccagtgattgggaacaaattcaaaacagctttatttcattgacagacaggacctttttgttaaactgtggtttaaagacctttacatctctgtcttgttcacacgttactgtagtcatttacgtaaacttaggaactaagaaccgacttatttatcacaacctattggcaggaaaagggtcacataaaaaagaatctttattggtaggtttttttttttttttaaagctaataaacagtgctagtggaaagtatgctgttatcaaccattattgaagtaagtgggtttctggactgaaaaaaaataaagaaaacatctaaatgtcagtgtgcaaatagaaagtagcagtcaattaaatgaggcagtgtgtggtcaccatagatggccaatgtctgtgttattagggaaagaagagaagccgggaaggaggaggaggtttctggggttaacctgtgttttgctaactggtgttagttagtctcagataagagctctatgtaaaccaactttggcccaaattgactcattgaaaaacaccttgtttcaaattttttccccctctatgaccaaaaagttacccaaacctttgtgtcacatatttaaggatgttcaaggcaaccaattagtattcaagcatttagaattattttgaaacatcttctgtgaaaaacaatttatttcctattccaaaataaatgcagaatattcctaatatagtttgatagttcctcctcaagacttatcattcaaagattgggcaaattgacttgaaagagaaaagttaagctatttccctaataccaaggcaatgcaggtcagctgcagtgcctaatgtttataaaacttgtaaatgttgaaacccacacttggtctgagagaacatcatgctccagtttgttcttaggaatgtgtttctgatgtgtgtgtgtgtgtgtgtgtgtgtgtgtgtgtgtgtgttttccagaaaccaactgggaagggccctaagctgagattactgttgagaagtaaattgtgcttttaaagtgtcctccagcaaaatggtctcctggctgtctttggaaatgacgtatcagtccagatgccctttttcttgatggattgctaggatttttactcaccaccgatggaaaattctcatagtctggaagggtggagcgtctgccttctatcatgattgtacacagatgagcaaagctccttggcaatgagtgaggcagacgggcagtcaggttcggactggtgcagcaggtaggctgctgctagggaggaaggaagaggcacagaagttcagggcgtgagagggtatgcgagagatgtcaacaatccaggagctggcttgcttcttcctttagtcagtggtgcaagcttcaagtggataattcaaatgaatcaatggaaaggcctcttttaacatttgatttgtttcttcaaagaacacagatgaagtttttctcatctctttagattagtgattctatattggtgagggagtggaagagaaatgtgggtgtgttgactatattctccacagaaactttttgaagtagcatcgtcactcagcacagaacattttgacaatacacttccagggcaggtggtttcttactatgtccctccctacccccacatactttgggactcagaatgtagggagtgtactctcgagggatgcagcccatacgtgaatgcatggaggcagcatataaggttgcaaagcactgaccttctctttttatgattcccatttattccatagactgtgaagtctgcctgtacatttccaggctagcagtttttaatcaaatgtatgatcactttcttctgatgaacacagttaaggggctttgttgttcaggtgagtctcacattgtactcctctcctaagagcatttattattacttgctacatacatttttgacaacctgacaatgacttttttgtcttaatttggagaaaacatactctgagcttttgaagttggtgtacttgttaaaggaagccagaaaagcttttcaaccatttgagagggtgtgaaatacagaaggggttgtgcgtttcttcccccctcatctcttagagccctgttacccaagagagttcaccaattacccaaaccaagtttcattttgttttctctctagtttgaaaactgtttttattgcttcaactctccttgtctaggagagctgtttcaggtttttagagtcctaagaaaggcttcactggctctctgccagcctcctgtcccattacacgctcaggcttgtagtcagttactctctgctggttttgctaaaccactcttgggtctttcttggcctcctgccccgcattccccttcacgttgtaaacgtagctttttaagttggtcccttgattgcttcaagtaattgatctgttggcctaaaaatgagtggctctgattcagaggtaggagttaaaccagattctgcctagggacaagtgtgttgggagctctgcttctctggagacaatggtcagcagtgttgcaaccaactccatgtctggtgcaccagatggtctcattgggtggtagggtggccaaaccttgtgtgagctggctcacttgttcattcattcattcgtttactcgttcttttttgtattagcttaaaaatgcttatacgccggccatggtggctcatgcctgtaatcctagcactttggaaggcagaggcgggaggattgcttgagtctaggagtttgagaccagcttggccaaaacagtgagactccatctctacaaaaaaagaaaaataaattagttaggcatggtagagtgtgcctgtagtcctagctactcaggaagctgagatgggaggattgcttgagcctagggggttgaggctgcagtgagctatgatcataccactgcaatctagcctgagtaacagaatgagactgtccccccaaccccccaaaaacagaaaacagtattcctatcatatgcattctcaactctgcagaggtcctgggtcacatttcctgcaaagttgcactgcctcccataggcatgagacctccacatggacagaatttcatgagtgttcaccttggtgttgctactttgcaacatagacttgaagattcagagaggagatgtggtaagagtttatttctggacagagaaaagctacaccattcatctagatctcattaatctgtattcattttgacatgcttttctgcagttgacgtttttatttattaagcgctttacaagatattcagtatcattatcgaagctataattattaatgatcaaagttagcagtacttgttttagctgtcatcttcatcatcaccatcaccatcaccatcgtcatcatcagggccacaacagcctcttcttttctcttaaatcttccagcaattcttcaactttgcctgtatatttatcatacaacataatcctagtatttagtaaatgcttggtctttgatttcttattttcaaatgcatgtctttagaaccagaatgtgtgtagctgttttctggcctgaatttgggctgagatgatgagaagtttagttgccactttcagctaagtggaagtgttttccccatttggactccgggtcattgacaaacgtcatcactgtttttagttgaaatgtgcttccatgtggctgttcatcagcacacccatatctagacgtgtgctagcctcagtgagagttgcagaatctgtgtattcatttcctttatctagaaatcctcattatggtacataaaagagctttctatcgcttttttacattatagtagttattcgttattattattattattattattattattattattattattactgagacaccgttttactctctctttgcccaggctggagtgaaatggcacgatcgcagctcactgcgacctccacctcttgggttcaagtggttcttctgcctcagcttcctgagtagctgggattacaggtgcacgccgccatgcccggctactttttgtatttttagtggagacagggtttcaccatgttggccaggctggtctcaaactcctgacctcaggtgatccacccaactcggcctcccaaagtgctggggtttcaagcatgagccaccgcgcctggctttgttattatagagttatatggatttatcattttaggtggagatttgagtttatgtctcctacagacagccgtagactttgtttcattttaagatcagtgttgcagacactgctgagtgtcttcaaatgtctgttctccctttattacctactaataaaatacctaattttcaacagcctgggaagagactatatttccctgcttgcctttgcagctagagtgatcctttgatgaagttctagtaaatgggacgttagcagaactgtcgtatctcagggcttccgtagggtttataactgatccactgagagataagttgagagcttgagagtcaacctttagaaaagttcgtaactatttgtcaaaattaagcttatgtctgttccaggtagtaattttaaaatgggcttatattttgtatgtcctttttaatttcctttttctagcaattctcaatgtttttttaaaatctcttctggaggagggtacccttcacaaagttatttgccaaaggtctgaggaaaaaaaaagcctttcaccatggttagttcgagaagcacagcaatacagtacttctgctacgagtgtatacaggctgaggatgggtgctttgtggcccttttcttttaccggctgactagaatgttgacgttaaagcagttagagttcgagcaggcaactccgaccccaagttggagctgtgtgttgaagatagaagagcaaatatgtggaaggaacctggatttctatttttttaaaaaatataataaatcatccagccccaaatgtcaggaacctgggtttctaatgatggttggctgtcacccccatttcccacactttaaatgagagaagtaaacatctgacttcctaaaaccaccgttgtcactcaaagccgaatctcatcctgactgaaatgtcactagtcctttttttttttttttttttttttttttttttttggtcatattttctccatttggagaggctggctgacccatcaatgggcagtgtgggggaatggagagacctgggattttggggacaacagtgaccatgaggggatctctacactcctacttggaaatggagtagcattctacacttaagtatctccctttataagctaggaatactaagaacctaagagtctccatgaggattagatgaggtaatgtttgtaaagaatctgagatatagtaagttgatcagcatatgttatttatcctcttcttccctctacaaagataactaagctgagatagcctaactcccccagctcagaaaatagcaagttatttgcaaaatcaaatgctgatgtaaccatttccattctgaactcagaaaatggagataaatctcttgcaaggcttttgattttagtttttagatacagaacctttaaaaaaaaagaaaaataaacgttttgccaaagtgtagtatatacaacagatgtgagggaaggacattgttttaagtgggaaacgtcagctctctcaacttctacacattcgactattccctactcctcagtgaccccaaagaccccagagaaactcagtatgaaaaatcactatggaagtgcaatagttattactttgtttggaattcactacaacactgtttctcaaaatataattcctgagtcacttggaagattacaaccaactgaattagaatctctggaaggcatcctaagagtctgcatttgtatgaagcttcccaggtggttctgctcagccctaagtttgaaaactactggcagaatagtagcagagttacttattctacattcgttttttaacccattgtaaaaatcatacatgtatgttcaagacaccggcagatcacaggaagggaaaaaaaatcacttatgcttccaccaccttaacctagaaacctttaggacttttcagtacttcctttctgtctttttcccctatacctaagtttttatttacaatatagttgtagccatatgattgttgctttcattgttgcttacatgtgttaaataattttgtctctgtataataacaacctctggcgatttttcctttctctctctctctttttttttttcttttgtttagacggagtcttgctctgtcacccaggctggagtttagtggcatgatcttggctcactgcaccctccgccttctgggatcaagtgattctcctgccttagcctcctgagtagctgggactataggtgtacatcaccacacctggctactttttgtatttttagtagagatggggtctcatctggtgatttttcaagtaaggtaatggaagcaagagaggtttacatacatggtgtacatatacctcggcagcctgtttccttcccttataactatctcaaaaaaacatattaagttatttttcagaattatgttttttcctgttgcttttgactgtaaagggcagacttaaatttagttaacatctgctctaacgttggatcatgtgtggagtccccagttttcaacattaaaaataaagtatttgttgaagtggggtttttttcttcttacagtatatgtagaaccattttcttgaaaatgtttcttagaaatttgttacttagaagatttgagccaatgatacattgccgagatttgtaagagtaagaccagcctacgctgagtattattttctcaaaggaatattatgaggcacatcccatcttcatatcagggaacaaactgtcacattttagtgaaatctgtgggttatgtgtgaccacacacagtgtcgtgtttgctccctttacagaaatctaagtaaaagaatcactttttcctagtatctggatgacttgatttcttactatcttgggccttcttggaaaccctgaaatgtagccttttcatcttaattcacaaagtgttcattctcacccttttccttcatgagaattttctgaagctattgtgaatctatggaagactcaaggtagtatctttttcacagcattcaaaaaaatgctgctggctccttggcttgtccggtgcatcctccgtgccagcccccgctgtcctagaaccatctaagctaactctccgatgagctctggcctctggacctcagcctatccaggccccttcatgacccagtcacagtgattctatctgtacctaccacagctaggtaggcggtatgggaagaccacaaacttgagagtcagacggatcgaacttcgtctttagccccccacttaggtgttatgtgactgtggtcgggttattggtaacatcttcttgctcagcttcctgacctgcagaatgggaataagaatacctagcacatagggttataatgaagatgaaactgcttaacgcatgtgaataacaacaatggctaacatgtatcagacgcttgtcttagtgtttattgttttatgcgtattgtcctgtttcatcctcatgcttaccctgagagaaaggtggtattattattcttattttgcaggtgaggcttaaagaggtcaattattaggttgaactgtatgaaatgactgtttttatagggaaaaacagtagccgatcatcaattccctaaggttccacgtaataatttgtccaggtctcatagcaaaaaggtggccggatgaggatttgaacccactgctctccaacccctaagcccgtgctttgtagaattaatcggagctctaaagtacttgaccctgggcctgacaccaatcaggagcttaaaacccattagtttcttttttgttttatttttgcccactattaaaatgtgccaaagtaataagatcaaacagggcccctgcgttttgacaaacatccgaattctgaatttcagcgtggaacagggcatggaaagcaaacacaatggggaaaattgccgtggccggtcccgacaatgtgtggattaaaaaaccacatgcatgcacagagacctgatgtgaatggtatttctgagtggaagctaagtaggagctgaaaatggccttttaaaatacagaacataaggatgcaattcacagagatggtctaaactgtaaacatgcagctgtggggtttgtgaggctcattgcttacataccgacagcatacaaattgtcaagtacttaaagttccattgttgctgaaagggcctccacccaatgtccttaaatggtccccccttttttttttttttcaaaccacaggatttacatctctcgtagcatctaatgaaataccagcaagaattgtgtgttggtgtaagaaataataatctttccaaatccttttgttttgttatcatttgctaatagagatctttgaaagaaaattcaaagattgaagtttgtattctcctaaactcctgcaaagaagtcctgtgcaaggatcgttcactagtgttctgcatcgttcttcttactcaactctcccgagaggcattgtggacgcctgtggggttggtttttggcacccatccctgaccccttcttctccaggaaactctgttcctacctgctcctcttgtggctaccttgggaggtgccatttttatcaaggttagtgtgtggttaagcaccttcccacaagctcaggggaaaaaaaggtcccctccccagattttttttagaactggaagtttccatttcctggcactggtgaaagctctaggacataaaacttgggagccgatggccttcaggctgcccataatgtgaagagaggtcatttcagacattcagataaagtctgtggctccagtatttttctaggtcttgctccctccctgaccttttcacagtttggtgacacaactcttccttgaattccataggttgacaaattcccctgagtttgggttagggttttgttacttgcaaggcaggcatcacagggctgctcctggccatgcatagctttggaatcacttctctgattctcatggctcgggaaggagaaagtgtcctgtgtgtggagatggcagggtggctggagttgagaggagagtcccttgaatgccacgcaacatttctctctgtaggtgtcctctgcacactgtccaaactccatttttaaccttgactgcatagtaccgtgtacattcattaagcatccctcgccataggagaatctgagttcctgggagcatttaacacagttcctggccttgagtaaaaacttcataagcacttgttgaattgaactgaatttgttgtctgtgtttaaaggacttgatggataaagggagatttaacagtttatagccagattggactcaaccatgatgatttctggtccatcttttagaatgtcttcacttctcttggcctttatttctccaagtggtgataatgagacctatccctaacggttaaagtgacatggtccatttaaagtgcttaaaccaattgccaggcacataataggtgctcaataaatacttcctttatttccctgttaggcctctcccaaccagagatcaaagatgattggccctgaagttatttttccccccaaatttgatagaaatcagtagagatgctaaaatataatacatttgacctgcattgatcaaggtaggctaactgctataacaactttacaattagtgccttaacataatataaaatgacttcttgttcatgtaacatccaaggtagctgtacctagttgcaatgctctcttccaagtagatatttagggacacgggctccttctatcttctgtcaccaccacctttatttttagcatccgcggtcttagcaacagtagaaggaaagaatggagataagacagtgggtatttaatcaccttagcccataagtgactcacgtcacttctgactaccatatccaatttttgcctctctttttttcttgggttccccccgacaaaaaaaaatatgacagaagtgtcacccatccagccagccagccatcaatccggtatccattcatccatccatccatctaggcatcccaggtgactcattcctgtgaccttgggagacagtctttcttcctagaggttgtttgccccaaccccctgttacattcttgaaccatatgtttcccattgtttgcacttcccctagtcacctggtgctttaatttttgcctgtaaccttctgaaactttccttaaatgttcggctttgacctgtcattcactaagtctttcaccatccttcactcatcttacctccttcttctgtggcatttcataaatttaatgattgtaattgtgattacaacataattgtttatgtctaccccaggctttgcaacagggaactatatcattattttgcagacacaacaaattctgcaagcatgtatctttggaataaaggagagagggttggacacaaatgtgattacaacatatgcttctctgggcatagctttgccccattgcacgaatatagaaaatttggcaggctgaaaataagcggaaagatcctcaagctgttccttccaccccctgggatgctgattaagatttcagattttatttattctacgggtatttgttgaatatttatttcttacgataccacgcactgctttaggcactgggaatatagcaggatatacaaaacagaaaaatcatggccctcatggattattggttgtgagtaataggaacctttcaatctaacttaggaaaaaaggttagggagccaaggaggaagagtgggtgtgatgatgcatcaggataccagagaatcccgtggaatcccacagtgacacagccaagccttgggaggggtgacactagcgatagagacagaaacccacacaggagtccttttctctgtctctcatctctgcttttctctgtacatctggttcaattattctcttgccacgaatcagctatttgtattcctctgtgcacgtcgcagaagatcaggaatttgcacattatagtcacaaccatacctagaaccaaattgcctaacactgaatcccaaatccaaattcctgggagatagaattcaattcttctcttgccacaaatcagctgtttatactcctctttgcacgttgcagaagatcaggaatttgcacattatagccacaaccatacccagaaccagattgtctaacactgaatctcgaatccaaattcctggatttggatggactcaatctggacccagtatctacatttggtccagtcatctgtatccggcatcggggtcttgttgaaaaaccatggcttagccgggtacagtggctcatacctgtaatcccagccacttgggaggctgaagtgggaggatcgcttgaagccaggagtttgagaccagcccgggcaacacagggaggcaacatctctaaaagaattttttaaggaataaaaaggaaaagcatggcttttattctaagagcaaaggcattttgtatatttggcaggtatcccaacagatgcatcacccagtctcttaaattaagataataatttatttggcaagtgaattcttctagtgtagttagatagtgatgaaaagatttttatacctccaaacacacacacgcacatgcacacccaccaggctcttctttacttctcactcatagatttgaaaacaactattatattatagaagttttttggtatagctgccaggggtcattgtttccatcccctgtgtggagataagaaaatcgagatccagtggagtgtggggtgctgagagaacaagtctatgttttcttgagacaaagtcttgatctgttgcccaggctcgagtgcagtggcagcatcttggctcactgcaacttctgcctcccgtgttcaagtgattctcctgtctcagcctcctagggagctgggattacaggtgtgcaccactatgcccagctaatttttatattttcagtagagatggggttttgccgtgttggccaggctggtcttgaattcttgacctcaggtgatccatccactttggcctcccaaagcgctgggattacaggcatgagcctaactatcctcattaagccatctgctttctgcagtcattttcatggcgatgtgttataacaggacagaccttgtactttggaatcaaacattctcaactctgctatctgctctttgtggggccctgaacaaaaatctttactctctttgagccttcgcttcctcattggtcaagacttttctcactgcattatatttgagtgagacccgtatcaatggattgaaattctcagaaacccaagaccaggaatagcccagtgacaggaatttagaccatgccaagtgtgaaccatggcttgcgggggctcctgtctcacgctggatgctcctgcctggctgcctctggtctccagcagaagacctgtcgtgcttgagtgacaaagcagattgcttcctcccacctctgtgggttaggacccctttttctatcctagtttcactctgatgggcgagttcactcacagtgaaaccgtagcaaaacctcaaggtttggcttaactgcaaaggggtggttgatatcagattcatacgccagaaccagaagaccactcgtgagaaattctgtaagcacaggagtgtggtttatgtcaaaatcaatctgatggagtgaagccattccttgccaagcgaaaatacagcatcatcaactacatccttgagcctagaacctcttcactcagcaccagctagtgggtaaagcccgggagaggttgtaacaaatctgattccctgacactcacctgaaacaagattcagcaaaattaaaagcaatattaatatatgtcgccttgggaaacagaggcagaggagaacaggaaagagtcagatggactttgatttgagacccgtttctgcttcttcccagggtgtgacctcagcggagttccagagcatccatctcctttgtaagacacagataataccaactgcatggatttgttatgagagttacatcaggggagggtcatgaggtcaccttcccatggccaggagaagcaggtactcaggaatggctacttctctggccactttatagacctatggagatgttgaaagtagcccaaaggaactgtgtgcctcgcatcttggtccatcttcatgggttgatcattgtggttcatatcactgtttcatgaaacacagcccgccagaaagtcgcgagtgttttgatttcatcctatacctatagttacaggccatttaagatccacagtctgctcttttagcttctgccagcacatttggacatctgtgcagttcccagggcaggtgaagagttgttcatgtgatgcaaacttttgagaagggacgtgtagggaagatgggagggaggtgatatttattgagtattttctttttgctttcagctttataccttgtgtgtgcttacagaggtcatgaattgtccgctgttgtatgtgtaatccgtggcagatgtgcataataagttcaggaggggctcggttttgggaggccggggatactagaagataaccctaaaatgtggaaatctacatcagagagtggtgtgagtggttcccaaaatgcctacctggcactcctaccaaagacacagcagagaacttggggcctcttgtttcagccattttcatcttcactgtaaatctagacaagataatgaatgaagaacctgacacatttaaggaactccatagttgggagcccagtgtgagtcattatggcgagtccctaacactgcggttcccctacttgagggcgcaggtaggggcactttgctgcctcctttgacaataagcattgccattgccatgtgatttgctttgcctaatgaaatgtgagtgacacttccagatggaaatattaagagccagtgtgtggttcaccctgaccccttcctatgccccagcaattaaggaagcaatgttcagatgaaacccatgtcttcctcctgggtccctgagtgaccacagtcaacagagcttccctgttggccattactaatgtcaagaacaaagctgtgtaaagtcactaagattttggaggtatcggctgttgcagtagaacctagcctatctcacctgacacaaacgttttctttctcacaaaacctcacaccagtgttgttttattcatctgcttatgcacgcgtatggctgcaacatccttccaaaatgcattacaggctctaatgcacgataagacagttaggttcgaaggaaaacaaagacaattgcacggcacagagggaatatactgctacggtaaaccgatcactaacacccggccctgaatttgcttcaaagttttcactaaggcacaaagggagccgtgtggagctccggagttcccatctgaggtcttgtctaactccttggcaacttttatgtatttgtataggagactcttttgccagatggttgaaatgttcatcctcctattttgttttaatgcaaactgacatttcttcatcttcctgcggtgggtttcttttatgaggtcgtgctttgcattttcatagaaagaatttctgactcccgatcggagcccacccttgtagtttctgtgggggctgttttggttaaccactcgcatcagttttaagtctccacaggcagaaccagaccatcgtgaacttcttgatttacatggtggtggagagtggctgagaaaccagggagaaacaggaaggagctgattgaggagaccaaaggagggtggggccgcagctctcaggcactcttggtgttcagaaggccagcttgaagaaagatgtgcatatttgcaaatgcatttcttgttcctagtgaagaggtgaggaaggacactgactgtgctagagctgtacaaagagaagtagaactctaaatagagaaaatatgtaaagatcaataaatcacaccaaaaataagtcataagaacaacaaataataccaggaataaataatgtaaaatataaataattcctaaaatggtgataacagcttatgacaagtaatttcttttttttgagatggagtctcgctctgttgcccagggtagagtgcagtggtacagtctcggctcactgcaacctctgcaacccaggttcagtcgattctcctgcctcctgagtagctgggactacaggtgcatgccaccacgcccggctactttttgtattttcagtaaagatggggtttcaccatattggtcagactggtcttggactcctggcctcgtgatgcacccgcatcggcctcccaaagtgctgggattacaggcatgagccaccgcacctggaggacaagtaatttctaagtattatttcttttaatcctcacagtgactccttgttagggtttgctgcattttatacaaagaagaaaggagtctgtggaagtgacataaagtaggacatgtattcatttactgattcaacctttcatttgtacatatatgtatattttacagacacggtcaccctgtctaggtattaacagttattacaaagatgatataattttgcaatcaaaatacagacacagttgtctgtctcccaggctggagtgcagtggcacaattatagctcaccacagccttgaactactaggcttaagcaatcctcccgcctcagcctcccaaagtgctgggattacaggcatgagtcgccacactcaattatacacttaaatatacatatatatatacaatatacatatgtaaatatatctgcatatacatgtttagggacaaaaacacgggagtaccatttctgtctttgtctctctctctctttctctcacttgactctgttgggagctatattagttgttttctctttccaaaccaccttctggaggtctcttagattttcccaatgatgaaggagctactgtctaggttattacagtagtaatagtggccaagaaaatgatatgaggttgaagtggacagatgatgcttttcactcttctgggaggttcccactgggtggtctgctttgctgagctttgaaaaagagcttttcttcttcccagttcactgggccgatgtgggcacagcctcaggttttggtttttttctcctttgctccttcaccacctagaaaactaatttcctataaagaaaatttctctggaaatgcaactttctcaataggttgagtctactcaaagactgacaggtaaaagtggtccacatagaaaaacctgtttctctattttgttttcaaaattatatcatctttataataactgttagtacctagaaaaatgcatacattttattccttaccaaaaccagttaccctatagtcaaaaggcattcagaagtattagcagaaatgtagtcagtagccaggcatagtggctcacacctgtaatcccagcacttgcggaagctgagactggaggatcacttgaggccaggagttcaagtccagcctgggcaacacagtgagacctcatcactacaaaaaataaaaacaaaaaaattagccaggcttggtggtacatgcctgtagtcccagctactcacctgtagtcccagctacttgggaggctgaggcaggaggatcgcttgcatccaggaggttgaggctgcagtgagccatgactgtggcactgcacttcaacgtgggcaacagtgtgagaccccatctccaaaaaaaagagcagtatagtcagtaagaaagaaaacaaactaacagtcaatattgtggctgctctcaatgttctttaaacggatcacattgccacttttttctctttgtaaaaatgaaaattcccagcacatattacatgctcaataaatgttaattgagcattttctgtctgagaagttcaggcaacttttcatccttccaattgttaagttctagtttcttattacaaattattactgttattattttaatttgattgatatgcaaaagtcaaatttgtgcaaagaaaatgcaagctttgagatgagaaagcgtgtcttctggtatgtttcttgatacattttgagggtattgagctctaatttacttaagatgaccttttgaaaatagattaacttatcaaaacttgtggtggaagcaagactttgtcagtacagtactatccaaattctaaagtaatgaatgcttctctccctctggagttagagacctgactctggggtgtggataaagaatttgtgtcctggccaggtgcagtggctcatgcctgtaattccaacactttgggaggccaaggtgggaaaatcactagagtccaggagtttgagacctgcttgggcaacatagggagactctgtctctacaaaaaataaaaagaaattagccaggcatggtgctgcatgcctgtagtcctagctatgtaggaggctaaggcaggaggactgcttcacgctgggaggtgaaggatgcagtgaactgtgattgtgccactgcgctccagcctgggtgacagagtgagaccctgtcccaaaacaaaataaaacaaagagtttatgtgttcagtaagagctgcagtcacatctctagtacagactctgcagagcactaggaagccccgtgtctgaatgggatatggtgagagaggcagcctagggaatggagatacctgggggtccccatctgctcctgatggacagctcagatgaccccaagaccctctaccaggcactgatggagtaaggatggagatgggaattgcattttagaggtaagaagccaagtggcatgatgaggagagtattcatgaaatttatggaacagtctgggggaaatgccatgatttcaagcccttcacctaaatcttcaaaagtggcatggatcagtgcctctcttccccagccaggagcgtgtgaagcatggggacctccggaatgttctcagaaaatgcttggttcttcctgtgttgagcagggaagaagctgaagctagcatgggcaggggagaagaaagccagttacatatcaaagaatgcttatctccgtagacaccactgtgtttgagagtcacattgggtggtttgtaggcagcttttcattttcacagccagtcaggcaaggcttggaataacttgtctaagaatcctcatcttaaccctgtgctagaacaacaagcttggaaggagccagccaacaggagaaagccagagcaagactctgtgctggacaagaagtcctgagcactggggagttgacttcatattggaggcagagaagaattacctgccgatggctgttggcccatggcaacaccctagatcgttgcatttgtggtcctgctgaaagaggagacttaagttatagagttattggtacttgcaacactttctctggaatttggccatttctctgctcttttagtttagtacgttctcttggttgcgaggaaatcactgaagccacctcacgtaatgtgagcatgtatgctcaaggggaccaggaaatgctgaaagttcaggcctcggaaaggacaggatgtggaaggatgttctggactcaaggaggcctagggacccttggcaggaggcattcatgggtctgtagtccaaggctccactaccatctccttggcttctctcttccattctagcttcttctgcttattcatcacttttgcttcctatgaaattggtgcatcctggtcttggcctctttgagccctctgtatagtgtgagctcatctggtactcttgactctctcaggctcctgaaggagaaccatcagatagaagcatctcatctccccaggccatgccactgggcctcagccaggcttgaactagctaggctcagtccacggggtggccttcaagcagcctagacttggatccctaagcacagcctgtggatgggacgttttaaggtaaagggaggacgcagagcattgcagcccgttggttgttttctccagcacagccatgcaaaatccatgtagcggcaggaattttgcagctggagttgctcccctgagactctgatcagataaagacagggtttgctgaacaccgtaggtctggccctgagccgtgggcagcctgatgagcacaggtgaatggtgcaagggataacctcacagtcatcagcaagtcttatctgggccgctgcaaatatgacggagtcagaaaaatgacaacataaagaaatgcgatgttttctatgggggtttctttttgaaactaaaagaggttttctagactcactccatggagaccactttactttccatttttctcagatgataacatctgcaggggggctccttctgtgggtacatcatttgtcaaatatgtggtccatattgagaaccgcataatacttattaattaccacagttgctacttaccgtgggctgctaagactgctttagatatactgcagatattcaaagagaattcatcgtccacccaacggcaaagtccatagaagcccaggatgcattctgaccctcatcctttaaagcttactgaacatattgatcacctcttttccaaaggatacttcctattggagtgtacttttaaaatctattttttttgtcttaatgtttagtgtaatgagggagtataggatgaactcaatgtaccttgaacatagctgttgtcaggaatgaagccaatttcattttgcctgaattagggccctttggtgtcttttctgtatgcagttaatacagttcgtgtgctgtaccaagggtgcgaatgtgacttttcatcaggaaggccgcatatggtgggcacagggcctagctctgccgttttatagctgcataactggtttcttgaccttttatgagtctctactcatgttttatatggagacattagtcatctcacaagatttttgtaatgattagaatatttgtaaagttcctggcaaaggtttgattataaattagcgtcatcatgaacgttcaaggtggggaccttttttttttttttttgaggcagagtctagctctgtcgcccaggctggaatgcagtggcatgatctcggctcactgcaacctcctcctcctgggttcaagcgattcttctgcctcagcctcccgagtagctgggactacaggcacacgccaccacgcctggctaatttttgtatttttaatacagacagggtttctccatattggtcagggtggtctcgaactcctgacctcatgatctgcccgcctcaaagtcccaacgtgctgggattacaggcatgagccaccacgccctgctaaggtggcaatctttatacataaaaaacaggaatgacttcttcgaattggtgcactagagaaatgttttccagtcgcctaagcgtttaagcatggtaaacagattaccatattagttgcccagaccttgcaaaacttcatagtgtttgtttgtttcccttgggaggctgttctgagaaggaaccttttcattcctcggagttctgatgtgttcattggcccctgttgtcatgctggatatgggggcggttcaaggggggcttgggtgcctgagaaaaagagtgaaaaacccaactgcgaaaacccaagagaaaccgaaagagtgaacactggaaaaaaaaaaaagggggggccggcgagcttcaggacctaagcggttaaggaactggctttgacaggaagtgggcaggaggctgttttcagtatgctcatgggaacccagctggaaagtgctgtggtgagtgtgtgtggaaaaaaggggctttaatcaagctataaatatctgtttctttgaagttttatgaccaacaattaatgttactggaaggcccataaaaagggctgtttcttgacttggtgggtctgagtgggccagggtcgggttaagatgctagcctcgtggggtgccatcctgacagattctactgtgtgcgtgtgtgtgtgtgtgtgtgtgtgtgtgtgtgtgtgtgtgatataatgtgttgcattggtgtctaaagccatgctcagtatatagttatatatttcattcattcatccgttcattcagttatctcacgtttctggagggccctctatgtgcaatacctagtgatacagcagtgaacaaaggaaatccctgccctcagggagctttcattctacttggggaaagagacgtgaaagaaatcaagacatgcaagcaaggataagtgctgtaaagataattcattcctgtttagagggctgaggacaggaagacgatgctgtatggctctagacagggttctgtgatgagtggcctgtggacagattcctgtccgaagaggtgcagggtgcaagggaggaggggacggcaagtatcaaggtcccgagtgaggcacatgctcggcggggcccaggcatgccaccaaggccaggaggagagactgaggaggcttggccatgccctgccttgttggtttttagaaagactctgttttggttattttgtttttctttttttgagacatctggagtgcagcggcatgatctcagctcactgcaacctttgcctcctgggttcaaacaattgtcctgcctcagcctcccaagaagttgggactacaggcattcatgccaccgcacccagctcaaatttttgtattttttgtagataccatgttggccagcctggtctcaacctcctgacctcaggtgatccacccacatcggcctcccaaagtactgggattataggcacaagccaccgctccaggcctagaaagactggattttaccctgattgagcgagggaggctctcgaggttttatttggttctgcccagtgaccagccaccataaccacatccttcccccagactttttcctcttcctataaaacaaaacaaacaatgtgaacaacaaaagcaaaaacaaaaaactaagtagtagttggggcatttttattttaatgctgcttttttttttctcaccttttgctatatgctgatcccagtgcatgaaatttttttgtaatctcattcctgtgttgaagctctttcactgctttcgtgagcacagatgaatttgaaggctgccaggcagtagcaacatataccagcttccccactgggtgttcattctacccaatttttgttcatgtggacttcaggaatctgggatttatgatcttcggatttggctcttggcttgaggcttagcctgtgcagtcatcttggagagagggtttactaagcaaagaacaccccagaacaatctgggggaactgtgccctttgcaagagagcagttttaaagtaccctcgggcaatttagaagctcctactgactcaaggatattcttacctcttcgttaaagcagctcgcctaaggactttgctagataaaagttggttttctcaagagggtttctgcacacacccgaccgcatctttttcttttcttttctttgttttttttttttttttttttgagacggagtctagctctgtcaccaggctggagagcagtggtattatctgggctcactgcaacctccacttcctgggttcaagtgattctcctgcctcagcctcctgagtagctgggaccacaggtgcatgccaccacgcccagctaatttttgtatttttagtagagacggagtttcaccatgttggccaagatggtctcgatctcttgacctcgtgatcttttctcgcctcggcctcccaaagtgctgggattacaggtgtgagccaccgcaccgggcctcacgtttttcttttaaagaaatgtgtaattcagatcagtcttgctttcaggtagtctgaattaggggagtttgcctgtgtgcaagagaaggcttcctacttcattttcttgtgtgcagggagccatttatgactaataggattcattacatgtgtgtttagcccaccgattattaaggctttaacaatattaaaacctaaagagataacagaggggaagcctttgggagctaggaatcaatcgtgctgggtggcttgaaaacagggcagtaaaatggcagccgcctagcctgtggtctttaatattaataaagccagaggcgatatcacttagttgttccaacatgattggttcctcatggatgtgcacccttgctcatcaccatctcaccaccaggctgaccctatacatcttccaggagcccagctctttcccctggaaatggttctctgagtttcagctgcagttcagggaaaaggccagcagccacgttccttgttttgtgtaattggtctttagcctgatctgattcatctggcgaaacccctttttccagtaaaagtcgttggcgaggagtgaattgtgatggaaacagagacagatgtatgtacctttcatggacataatttccccaagactgaacacaaaaatgagggtttttggagatctctctggaattaatgtaaacgttgttgaaaacatattattctatggctccttcataaaccctaggccatcccgaggctgtctcactcaggcccctcagccctcataaccccccagctccataggagtggagtttggatttcaactagataaggcccattttcatggatggacatgtgagttttcatctataatatagaatgctattttctagttaggttggagcaaaagtaatcgcggttttcaccattatattcaatagcaaaaaccgcaattacttttgcaccactactttttacctagcagttcaacagctgtaaagaaagatgctgagctgttggttacgtaactgtggtacagccatttcatagacaagtctacatcaatgaaaagaatgacacttctaaaggaaaaaaaatgggcaaaaattatgtgtttacatctatcagaaaaacaaaacaaatgtcacggtgtggttgggaggaggtggggagagaggcagattttggaggcgaaagatacacagaaacactaaatacctgtctattaatactgacagtagttgcgtttaggggatgagactctaaatttgtttatttaaattttctcattttaaaaaatgagtcctttcaattatgagatcaaaaagaaatgttcagtggcttattgtgacccaacatttttctgtttgatttagatagagcttttatttgcctaaaaattgtgcttgcaatatatatgatgatttttttttcttttattaaatgaaaaagagtcatttaacagtcacagtggctcagccaccacccgcagcaggcagtgggcccacttcaccttcccagcaggcctccagtgcccggtgcagggtggcccattggcacccacaacaaacatcacgacattacttttaccgcacacttcctgtcgaggcacaggcagtgcttcagcctttttggtaacttgaatgaacatcaaaaggataatcagatattagttaaacttgttcctcttctccaatcattgatacttttctctcttgcttcccctccccctgcccttcgacacagagtgacaggcctgaagtaaaaagggaaaaggggaaccgagtgactcagcccagagtgggcctcaccgcagcttcctggccactttctcgctctctccttccaagagagaaaggggaggaagcccagagccttctatcacttagtaccgtgtcatataccacttccacaaatgctagggaatgaacgaatacatgtatgaatgaatgaatgtccatggggtcactcagaagtagtggcataatttagccagataaagtgcccacctagcactcatcccacctcctcactcctctatcctgtgaatgcagaaatacaattcctcatttacaaacaactgtgcatgtagggttgcttgcaaaagttcgtcgtgtgccgatatttcattaccacttttgccagcgctctcgtctgcatttcctgaggtttttcttttttttttttttttctttttttctttgatacggggtctcgctctgtctcccaggctggagtgcaatggcacgatctcggctcgctgcaaactccaactggttcaagcaattcccctgccttagcctcccaggtagttgggattacaggcgcccgccaccatgtccagctaatttttttgtatttttagtggagactgggtttcaccatgttggccaaactggtccagaactcctgacctcaggcagtctgcccacctcggcctcccaaagtgctgggatgacgggtgtgagccaccgcaccaggccatttcctcagttttaaaaagcaaataagaaacaacaacaaactgcatcagagtaaccgtttcaaaaacccatctcaggtctgttttttcttttttttttaagttagcattttctagaagttttggtataaaatatgtacaaggatacatatataaacttagtgaccatctgaagataaacctggaatgaggaataacaacctctcatttaaaggagttttaaagagacaagagggaggaaacgagaagagaatgacagtgtttctttcattaaaaggagcccaatatttattgagccaacaggtttacactgtgtctaccccagagtgtcatcagcccaaaccagatcagcgtcgtgggcgatttttttcactttactgctgaggggatttgccaatcgcctggtcagcttctgaattcttcgggcacacaggaggggcgacatggttctggcttatttctaagtccctttgaggtgatttctggtccacaaattgaggcaaaataatcctcacaatttcttggatattctctgccccagccccgttctattgcaaaggaggcttctctaaaaggcttcccaatgccttagaatctacttaagggtatttttgctggagaaagagctgctgtctttgtccacctgtcgttttcctttctaccccaacagggctttctccctctggctgttttatttagcgggagaagacagaagagatggaaaaatggaccctgcatttatagctgttccttcaaggagctcaaactgctttcaggcatttccttattacctcattaatcctcataatggtcccttggcagaattattcttattttcagaatggagaaattgaggcacggacaaaataaatggcaggtggaaggtcagagagccaggcagcagaagaggtgggggcagcaggatggcttctggtttctgccctggtccatcagtcagaatgtcctcttcagatgaggagatgcagggtgaggcgcgggggagctgacattgcataaataataaaacaaatggagccacatttagttatcactcatctagcggaagtcgatcttcttgggacatgagtaggctctaacctggcaggtttttcaacatggaaccattatttgtcacatgtgttctgtgtgccagggactgagttcttctcaacggagtttacatgtgagaggagcaagggacaaacctcacaaataggaatacagacctcagaaagccgacttcacccttgcatactcctccaggttgccctcgcctcccgcctggatcactgctcaattctctctctctcttttttttttttttttttttttaagacagagtcttgctctgttgtttaggcatgatctagctcactgcaacctctgcctcccaggttcaagtgattttcccacctcagcctccctagtagctgggactacaggcatgcgctgccacacccggataattttttttttttttttttttttggtatttttggtaaagatggggtttcaccatgttgtcaaggctggtctaaaactcctgacctcaactgatccgcctgcctcggtctcccaaagtgctgggattacaggcatgagccacagagcctgaccacagtcctttcttttaagggcctcctggcacccagccatgttgggaccctttcagttctttctccacggagaaccagaatctcctttgaaaatatgttagatcacctctttctcctgctccgaactttctgaaggcgtcccctgttactcggagtgcaagccatgctctcgagctggccatggcatcctgcgtcctctcccttcccccattggctctgttcttcctgccagtgctcttccccctgctcactgggttccagctgtgcgggcctccctgctgttcaatggaatgagacccatgcccctcctggttatcccactcagagtgcccttcaacagctacagggctggcccatcctttctctgttaccttcggaggaagccttctctagataccatctttaaaacagcaatcttccttctccatccccagcagcacctctgacccccttcacctgctttatttttctccatattatcattgccatcaatccaagcacaatttccagttacttacccattttgctttctccccgctctttgagaatgctggctccaacagggcaggtatttcacctgttttgtttatgcctgcatccccatcactaggaacctcataggtgcttagcaaatttttgatcttaatacagaaattgactctcacagaataagaagaaggagcttgaagccgaggtttgtgcccagaagatctcactagattctttatactctggggagaagaaaggatcagggtcgggtggggacatctgtgggcatattggggagggggccaggaagaagccaggaagggggcatgctgtcattcgtgggttttgcaactttctgtggcatagaaggcatagaaggatctcttcatttaaaaggtcaggttggattttttttttttaacttcaacaccagttaacttacttgcttccatcataccctgtaggtactcgttatggacaggaatacatgtagggtgaaggctgctctgggtcagtggattcacagagaagtcagaattctcttttataaagagcctgcttttctcaataattgcataatgacgtctttgattcccaggccctcatgcctagctgtttccttaggcatttattcaagatccgagatgccattcgcaatccagcaggatgcatatttgtatctggctccaaaactttttttttttttttttggcccacatcactgcagcccatggcagaagagtctagcaattagcaggaactgaaagtgataatttattgcaaccaacgctgtgatctaatagtcacacattacaaaagcaaaatccatattttgttcgcagtggcaccgcagcgctatcatatgctccacatgctttctaatgtcttttgtttgtattaggaaaaaacataaccctctcctactgagaaccagagagagcccctcaggttctgagaatgacgacattcaacatcgtactccaaagggggttaggtttgtgtgctaggggtgaacgctgtgcaatttaattctgtttccaaaagatctttggaggataaaggatactttctgtcttttatttagggaaggcgatcatgttggcacagggcataagagagtagcggggctgagagtgggaactgaggagattcaagccttttgcccgtcgatcgcagttcagatctgttgattttgaccattgcatcttgcctcacatctgaacttcaggtgaagtttcaaaccaccaggcaacatgcattacaggcaaaatgataagtcaggtcctgccgggtgactaaggcagtgtggcaatgcttcaagcctttaaaaccatatcccagtggccccaaagcattaatatgtctggaacattgcctgtccaatatctagagaggcgcctgcagaatttgattcctaggtacatcaagtttttgagctggaagaaacttgagacgctctttagtccagcaaatttcaaacctgtctgctcatcagaatcacctgggagcttgaaaacacacagatgcctgggcctcaccatccagagagacattcatttgattgcagattgaatccagaagctctaagcagaggcacagtcacatttggggactccttttatttagtagaggaggaaactgagtctcagtgtctgagacagacagtggggattgaacacagacacctgactcccagtgggtggtattttctcctagagtgcatttctgcttcttaaccagcagaagaaagcccattaactaacccctcaggggtcaccatgggcaaaggagtgcatattaagaactgtctggaaagaaaagaaggtcattggaatcttcttcaccccttccctggtactgatggttgcatttcaatggatttctccaaaagcaattatcacagtgttcctgtgtgttgagcaaacttcccttgtaatcaccttagcgttttcttttgttaaagagtaagaagaatggtttcatagtgaatttttcctaaaatgtgcagggtgtagaagaaggaattgcacacaatacatgtctactaggcaggtcaacataaatgagtagaggcaggtaataacccagatacactttgttggaaagtggaatgcatagaaatggtcttcatttctgcaaagaaaaatgtacattctcctttttttccttgcaatatgttgccttctctgtatatcttttaaaatttctacttctgatagagtaaagggtatagttttgtccgttttgtgttgctataacaaaatacctgagactgggtaattcataaagaaaagaagtttgtttgattcacagttctcatgcctggaaagttcaagattaagcatctggggagggcctcaggctgctttcactcctggcagaaggcaaagagaagccagtgtgtgcagagatcacatgggcagagaggaagcaagagagaagggaagtgccaggctcttttaaacaaccagctcccgtgggaaatcacagagggagaactcactcactaccatgaggatggcatgaagcccttcatgagggatccgtccccatgacccaaacacctcccggtaggctccatctcctgacatcttcacacaagagatcaaatgtcaacatgagatttggtggggacaggcaaaccagatccaaaccatagtgactatgatatatctttcacatttctctttacaaaaagaaaaacaatgtaaggtcccgtgacaattagccttactgccggggagaccataaggagtggtggagactgtggtaaactgcagcgcgcacactctgttaacagaggaggtcactttccattctagctgactgttgtcatatgaggatacacaactatgctggccagtttctttaattttttttctcttctaacagaatctagaaatgtagattgtgtgtgcgtgtgtgtgtgtgtgtttgtgagagagagagagagagagagagagaaatctttaggagttttaaatattggcaactaattcaatttatttctgtttttaacatattgcaccaaatacatgggtatgggccgaaaataacatgaactttttgcagtgtacaaatctctaatttgagacttctaatgaaaagatatttggttacagtatgagagacaagggactaaaataaggttgtggatcattcagggttaaatcagagcaacagcatgagtaggagatatatagaaacagatttattgcaaggagttggcttatgcaatagtagggttgcctaggcaagtctgaaatccatacagtgggcagtcgagagaggcagacaggaactcttggcatatgctaaagctgctatccacaggcagaatttcttcttctccaggaaaagaaacagttcttctcttaaaatcttccaaatgattgactccgtcacactcagaccatctaagattatctcccttcctaaaaggcagctgaataagggcttcaatcacatctacaaaatactgtcccagcaacaccttgattcatgtttgactggataactggaaactatagcctagccagggtggcaaacaaaatggaccatcccagggtagatgttaaaaaaaagatacccaccaaagataaataagatcaagattagaatgtcttcttttgataggatgtctgatttttctgaatttttgttcctaaaacataagattatttttaaaagcctgagaaacgagacattagtgatccgattcagaaaagaagccctgggtttaagccaatacgagatgggtttgtatctttaagtggcctttattaccacagtaataaacagcaaacgggcccaaatcttacaggcttgtgttggctttgaccaatgaagtagaacaagacctctgaataccccgttagttccaggctgtgctttgatggctctgcacagacagctcttttcctatacaagtcaccagcctcacccgtgtctcttaacaaatgttgttgacaggccgcgttgcaatttttctgcatgttctgacagtttaattcagtacctcctagctaagcactcagcctaagggggtgcttcagcaccttggcgtcaccaggctgcaattaaaataattcagggactggggctgggcttgcagaaataggccttcttccctttggaacatacaatgcattttccagtctccccgtggagcacacgagatccttttagagcagagggcagtggaatgtattaacaagatgtccactggcaagaactagctccatttgtatgttgcacccaacggggttttctccataggggttaggcgtaacgtctttggtaaacttggcacctgtagaaaggtcttgtggtgggcaggggggtgtgaatgggggaatgagaactagggaacccaggacccaggacccaggacgagagttcagcaaagaccatttacagaagctatccttccaaaacggccactcagaaatggtgtcttttattttgcattctgtacaggaaggacaaatggagaaaagtctccagaaattggcctcgtttgaaaggacctcatgcaaagagagatctttggagacatttcagaaaggtttttattcaaacatattcgcagcttgtatgacagtggaatgttttgaaatgagcttgattctgtttacccatccttcttaatccaacaactctgctggtctctctgctgacacaagatcgttcgcaggttatagaaggatttaacacgtcaggtaaggtggaatttggtaaattccccaaatttacaaatagatgaaagttgggtaaattccccaaaattacttgatgacaaagatcatttgggagagattctttcaaaaatgcctactccctattcccatatcccagcctaagggaatgagtttaagtgggtctacagtgggtcctgggaatttgcttcttatctagcatccctggtgaatcttttcattcaagccaatgcaggaagtagtcctctgaaatacatgtccacagaacacgccgtgctttccagaagacgcaacagacagaaactttccaaagggaattacctgggatcatttctcatcctctctctctttctctgtattacttagccttaaaaaaaaaaaaaaaaggactaatacttcctgctttcacatctactttccagatagttttttctagaggtaggaggtacataagagaaacgtgttttatggctgtggttttcaagaagtacagcgttttggagagagtggaaggctttcatgcatgaaacactcagggaggtaggagatccatgagatccaagctaaacaattctggaagagttacctgaagttgacacttaattcaagctgcatcatcttcctcctcccagcagatgaagaccaaaggtggagggtggtgggggtggggggcagggagtaggggggagggggggagggggtgtggggagggtggggcgggggtgggcaggttcagggactgaggccggaagcaaaacaatgtactggagtgcttatagtttttgaggaatcagtgagaaatgtcatctgaatgtctcttctcaatctttctgaaagataacttgcctataaacataaaattaaaagcttgctgtctgcttagttcaggtattgggtcagcgtcttgtgactatggacaagaggtgtttgactctaggactcagctacctcatctgttaaatgggcaaactgggagggtgtttatctgcatgcaacatctccttccatttgaaaacttttatgaatgtatggaatattattgagctggtgtgtgctaatacactgctaggagccattggagatttgaaatgtgagagaatgcctgctgtctgtcgcatttaccaaacatcatgcttttcaagattgttaaaagttgctgaaacccttctttgaaggaaatcatactttgaagctcaatatatagcaaacgggtagaagagttgctaagagtttgaaaatgatctcattaaacaagaaacatatatacagtgcctacctaggaaagagccaggcatataatagccactgcataaagatgtcaagtcttttggacacaatcctaatatctcggaggttctgaagctaaagggtacatgtttaaattttatttgtttcattaaacacctaaagactctttctagctcactcctgccaaaggcagaacttgagagtggcattcttttctggtctttgaagacgacaggtgaagggcagaatgtcctgtgtacttgggcacgcacatgcaaccctggctggtggctcctcctctctgtcctcttcctccctctcttccttctcttccttttcttcctcatcctccttttcctcctcctcttctcctttctcctcatcctcttcttccctcttctttgtgtccttgtttccatttgcttcttgctttgggcaagttctcaccataaccctctggcaaaggcaaatattcacctaagtggttaagtctctgggcatatttgttgatctctgctgagtctctcagcccgttttcatccctcctctgcctctccctagccattagccaaggccttgacctattgactgcagtgttgccgaagcagctggactccgtgtttgaaaggttttctgaagaggcatctattaatttatgtatttaatttctgtatgaagtgactgttctcctcccagcacaggtattaaagtacctttaggggaatccagcagctgaaatcctcagtaaggaaaaatgcttagagtgtcacaaagcaaacgcattagtgggaaatgtttaggggctcaagcacaaccacaaggattcactccttccttggattttgtgcctcttcccctgttcctgaggcccccactgggaacccttagctggagaacacccgtttcattatggaacatggagaaaagggtgattgtcagctccaatttattccatactatctgattcaatctgtagtttgactttgctaaaggaattaatttttaagatcttaacaaatccagtaacatttaaaatgacctatccagtccatgcatattagctattcataaagggttttaaacattattattaatcctagatatgttacttaaactattaagtccgttcaaggcattcagtttctgagtcctcaaggatggtaaggagagctgcaaatgggctcccttctcaagcaaaggcatcttatgccatcatgcacgtttctacacatctgcctgtagatacactctgtaggacaaaccaggtggctctgtccttcaggcaaagagctccttaattgaaaatgatgtgtgaaatttcaagagagaagtctaggaatggggagatttatgtactatagtcagtaaccaatcctgagcaaaggtaggcacagctatgtggtggtgcccttttttgggggggggggggcgggtggtgggggtacttactaaggaccttgcctaagataatcaacaatttttctttttcagccctgggaggctctaaagctggaatcaaaaagattcacaaccccacaaataggtgaactactctaaagcaatggttttcaaaccttgaaatatcctaacattgaaaaaaaatgtggtaacatagggttgcctgtgtcttattttggtctgtaaggacattaataatgttttggtaaaacctcagttatcatctgctattactgttatttcataagacacatcattttccttcaaaattacaatgaaaactcataagcatacatcaaagttgaaagaattttacagcgaaccaccattaacattttgctataatggctttatcatatatccattcatccgtctatcatatttgtaaaacaaataatattttaatgccaaacatatacaaaggatagatcagtaatttccgagaaatattagttgacaacttgacatcaaattatgtacggttaagtattgatacaaaaatacgcacgaatattaagtgttgaggcagatagatgcacatatgtatgtcaccatgtacctttgtgtctccttgcatttaaaaatgcaggtcatgatgtgtaatccccgttcctctgttgatcagtgaacacaaatgctgggccccagcatgagtccttttcagagagtcatttggagacctacagaaaaaaatgccaagaatgcacgctgggaattcattaagagatttcaggacgttgaaatactgtgcgtacttgcaatccccacttgaccaaaggtgtccaaacctcgacagacagcggccagagaaggccccatcatagactctgcgcctggctaattactcaggagcaaagcaggtcgttaggggtcagggggagggtgcacctgtccgccaccccaatttcctcatgatactggaaggcagtctccggtcagcacggggctgggtctagagttttcagtttacaaaagtggaaaatgtgatatgacagactggaaccagcacagggacgcagcccctcacctgctgggggtctttgggtgggtcctgtagccccagagcctctcgatgagctatgaacaggaacagaaccagcaccccgagtggtgacagtgacaaaagggtcctcagtaacagcagtctgctattgttttgaatcattcaaaggaatttttttattttgatagtgaaaacaatttcttttagatgtagaaagggtagaaaatacagataagcgaaaataacaaaagcagaacggtcatcatctcaaaactcagagaaaagggcaccaactccatattcgtacccatgtacgtattcatacccatatctatacaccttcccttatccctgtccctgtctacacccacacccatacctaaaccaatatccacatttatatctatacctatacccatatcaatatctatatttaaatctgtgtatttagatatttctagaaatgcatatatagctatttttgcttttataaaaaaagtcacagaaacaattatattgtacacagtcctatataatctgctttcttttgtttatagaatactgtgaatgtctttttgttttttttttttttgtttgcgagacagggtctcactctgtcactcaggctggagtgcagtagtgcaatcttggctcactgcaacctccatctcctggatgccagcaatcctcccacctcatcctcccaaatacctgagactacaggcagtcaccaccacacccagctaaatttcttttgtgttgctatttttattagaaacggggtttcacctttttacacaagctggccttgaactcctggactcaagcgatctgcccttcttggcctcccgaagtgttggaattataggcatgagccactgcactgggccaggaatatctttctatgacagtaaatattattttacatcattttcagtgataccatagtatcccattatatgcttttcagtaataagttcgaagccaagttcctggatcagcagcatcagaatcacctgggaatttgttagaaatggaaattcttaggccactccccagacctactgcgtctgggggcagggcccagccgtctatatttcagcaagccttccaagagacttcagtgcctgctaaagtttgatgcctactgccttaaataaacttcttcatcccttgtcaaacttcctaggggagcacattttgaatttttgacctgagacctcaaaacttttacctgtgctcactcagttcaggtgaaagaatctttggcattcagaagcttgtgttcacactcacctacttctcatggcatgattcctcttacctctaaattctactgacttaatcaagattgagggattctgggatgaatctggggacactttttggtccctgaaataaaatacgcaaactttggagtatgagtgcgtatttggggaaagtatacctatcagattttcaagaacttcatgaccctaaaatgactctttcttaaaataatttttttttttttttttttttttttttttttttggagaacggtctggttctgtcacccaggttggaatgcagtgtcaggatcatagctccactgtgtgacctcaaactcttgggctcaagcaactctcctgcctcaagcaactctccagcctcagcctccgagtaactgagactacaggttgtgtgccaccatacccagataatttttttttaactttttttcttttttttttttttttttttgagatggagtcttgttcttatgccgaggctggagtgaagtggcaccatctctgctcactacaacatctgccccccgggttcaagcgattctcctgcctcagcctctcgagtagctgggattctgggtgccccccgcaaccatgtcccacgaatttttgtattgttagtagagttggggtttcaccatggtggccaggctggtctcgatctcctgacctcaggtgatgcacccaccttggtctcccaaagtgctgggattacaggcatgggccaccgctcccagcctttaactttttgtagaggcagaatcttactatgttgcccaggttggtcttcaactcctgagctcaagtgatccgcccttctccgcctcccaaagtgctgggatgacaggcacgaatcaccgcgcccagcccaaaatgactttttatttgttatttttgatctcatccttgctgttctgttttgcccaggttggtcttcaactcctgagctcaagtgatccgcccttctcggcctcccaaagtgctgggatgacaggcacgagtcaccgcgcccagcccaaaatgactttttatttgttatttttgttctcatccttgctgttctgtttttcccagttatatcaataacaaagaaaagaaaagaaatctactcagggtctgttgggcatactgcccaagcacagtgtgaaatgactgccttttcactttttatcttttggatagcccaaagaccagcctgacttagcagcctgatttttctttgctggaggcagatcacactctgcagatctccactgaaaccccaccctcacccttcgtaataggcgacatgcacattttcatgtcacatttaaaaatgaaatttttcttgaaaatgttcacatccttcccccagaaattctagatttataaatttctcccaaggaaatcattaggtgctacatgaaagtttatgtatcaggtaatgatcacaaaattataatcacaaattaaaatagccataatgtctaataattcgacattagtgacagagatgatactacagttataggatgaagtgtcataactggggattttggaaaatgattagggacatggtgaagtcgtcatagaataaaattaagtgaaaagagtcaggttgagtgtagaatatatttattcctattcagcatatgtattacaaaatatctgggataaatgagaactgcatgctgacatttacattttctccttgattgtcttatctattatcaggattttctacaatgaacatttgttggtttataattggggggaaacctaaattcataaaataggcactctgttggtggcaaggaagcccactagtccactgtctaagtgttaaatggattttagcttcataattctggctttgactagaccctcttacaagcaagactatatcctctgcaaaagcatcagcggggtcctgcagtgccttcttgacacacacatcagtgtatacccagagctcttgtttctaaatagctgagctgcgtattaagtatggctaaccacacatccatgcatttttctggtgtctacctgaccacccctccaggggagagataaactcaaaggggagaaaaaggtatgggagcgaaagattgcaaggtgcaggtatgtttgcagatgaagggattgtccaggctgagctgtgcagtcctggatgaaccaccatctgggcacttcatatgccattcatacttaagggtgattggctattttcatcatcaagaaaaacattgctttaaaattttccatagttattcgggcatggtggctcaagcctgtaatcctagcactttgagaggctgaggcaggaggattgcttgagcccaggagtttgagaccagcccgggcaacacagtgagaccccacctctacaaaaaataaaaaattagttaggtgtagtggcgtgtgcctgtaatcctagctacttgggaggctgtggcctgaggactgcttgagtcctggaggtcgagactgcagtgagccatgatcatgccgctgcactccagcatacgtgacagagcaagaccttgtctcaaaaaatttaaaaaaaaaagttttttttttttaatcgccataatcttgtgtgaaatacttggtcatctgagcaacattatccttcttctccccatcagcctggcatgagcttggcagatgcaagctcagatcatcacctgtgtgagtgtgttgtctttgtgtccgtgagcatgtgtgtgtgccctgggttcctctcccaggtactccagagctcttgacaataaatgagaacaatatagaggcagggggcacttttcatctcaggccagttccaggactctgtgtaaactgtactaagccgaaacgtattcctttgtcccttttgccgctgtcctcctaatccacatctgggcagtgtgcactgtggctgggagttgacacagatccttgtctcccagacccccagtttctatcgagctactgtaactttaaaaagatttaacaaagactacctccactagctaagctgaaataagaatgtctccggagtttaatggatcaagtagcggtgataggttttatggctcttttttactttagggcatagggaagagagagccgggcaggttggttttaaattcaaggatttatgttgttaatcctccgggctaattataatttatgggatcttggcaaattaatatgcagttgctattcaaaagtggagagcaatgtaaggcaggcataaacaagccttgttcatttttaatttatttccaccaatggagaatattaaataaaatgaacactggggtatttcgctccaagtttggtgttcattatttatctctaaattatgatattcatagaacaactccttgctttttcaccaagaatctagaatctagaattatctgagcgttcgcatcagataactaggaagaaatcagagtcattttctctctaaggcaggctcgatgatacctgcacagaagcagaggtttcccaagcatgcatgttactgcagtacaagatttggcattctgcatgttggggttgtttagaaacagaaactttggagtagtatgtgagcttaaaatgtcagttgcatggaaatgaaagtgccaaccctccaaatcaagagtccagcccgttatgtcgcaagggctttgggaaatctcaatttattgctagcctggtagatattgagcagggtgtgatcctgttattgggctttcagactttcgcttagcaacctcattgcacccaggacccccatttaatcagcgactcctatggctgtttgggggctctctttcaaataattcttctcacccatgaacatctgtcagaaaactttcactgattggcaaccaccaggcaggtaggtttgactcatgtgataattggttgcaccactagaaatgagaatgcccctcctacttccccgccacctcttctcctcttacctttttctccccgacatgcccctgccaacctccccccatcattccagctgggagaggccatcaaatgtagcttggagagctatagaaaccttgagctctgagcccaaggagcaagttggagtcctgcctccagctgtgtagctcagataacagctggagcagagaacatgctgttctctctgctagaatatctgacccaattctgactagtaaagagagttaatagtttgtacctcaagtcattcttgtccctgtgtgaaggaagagaagcagtcatttccctccacctccaacacacactccgtccccactctgtctctcttggctgtttttctcttcattgttgttaaactcacgttcatttctcttgtagtcagggaaatgaagagccactttcaacaattctgaagaagaaatatgggatgttttgcttcgggatggaggctggagcaggagtttctggagtctgccagtacccagtttgaatcccagctctgccttttatcagctgggtgttgggcaagttagctgacttttgtgagttttctcatcattaaaatgagaacactgttattggtctttcgggattgttttgagaaatgagatatcgagacatgcctggcacaaggccttaattcttcttcatggtcaagaaatggcagattttcccccttccattcccacccttgcacatagtaggttctcagcaagtatttgtagatgtaatcgaccagcagagatcatttgtacccttaacacccacagagagtcacagatgctttcactgaaggagggtgtcccaagactcaatggcagggaataaaaatgccaagtcatgtaagtattccacaaagttagaggggaggagtaagtatctcttattcgtgcatctttatggtatgaccaagggctcatgatttgtaagcagttcaggcactgagacccgggacacaggtgacactgtatctgcagattcctttttctcattgtttctctgtcatgtttaatttttggttttgaaaacagcagaaaatccaaccagtgtgttcacaggacttctggctttgcagcaattcctttttctggggtcttttgcctaatcgtttactggtttggagacactgttttctgtattgtttaggactgaaaatgtagacctaactgaaatcaagcactcgagtatcctaattattttaaattcataatgaatagtcatcatggtttcactttttttatgtactcttttgaaagagtacgatgggggaataaaagccagaaagttaaaaaataaaaatagaaaagagctgcaattgtcaagagaccaaaaagtcttgtaaaaagggcagtaggtaattctggaggcaaatcagcatgggtaatgtctaggcaaacaggatagaaaaagatcaggaggtcacagtgacaaaagtatttaggctcatcatattagaatttcatccaaagaacaattgattatgatttatagaccacaccatcccatgagcccagatgtgtgtccactgggcctggcaggggacaaatttatgtaacagactccatcctgaattccagtcctcaagctttgagggtaataaactcaagctttgcaactgggtcaagatcaggcctgtctccttcttgatgatgagttgtctcataggaccctgttaagcaccatccccaaactccattctttttggtgaatatcccaacaaactccccagccatacctcaatgtccagacttgcctgatccccagggctggacacagaacaggctcattctgagaatcttctctctctccctccttcccattttgctcctcctaccaacatgagaagctagggggtctcatctttaaataattaattcttctttctttgtaagtattatacatgccaaacagactcttggtttgtgtctactgacccaacaaaagggctgtccacttgacggacaggcaacagatcatcttgataagtacatgaggcactcagatgtcaagtcaccaaaccttcattctgaatatttttgaggctcatgacagaccaaaagagccagagagttggggaacataatttcctttgctcataccctggaccaagaactgttgccaggaatatccatccatctgggggcttccagcttccccagatgcctgcgtgccttttgacccttctccttcccccaccctgcgagttcttcaacaaatactcttctaaaccaacatccccggcaaacgggagcaagacaccagcttttcactgatgcagatatttctgatcttttcatctcggttttatttctcactctcccactgcataaaagattaagaaagcactcgcatgaatgtttgcacatcatttaaatattcattttcattaatttattcatagtcgtaaagtttattgcctagaatatagagtcgtagaattttagagctggaagacaggagagaaatcatctagtttcgccgcctcgttttacagatgaggaaactgaggtgaagacagctcaggagaccgtccaaggtcagattctgaagtgagccaagtgagacccaaactcaagtcttggacagtctagcctctgtgcagcgcagctcagcacagctgaaaaccacttttgctctctgctggcatagatggctgtgctttggttcattttcttgctcatcttcatgatctagcaagttcttgttgagtgccagcccagtgccaggtgctgaagaacaatggtgaacggcacagtcatggtaccagaactcggtctggtggaacagagagattaagcaatcagaaaaacatatgtgtgtgtaattacacgttgtgataagggttttgtggggaatatacaagctcaatgtggagactagtggtgggagggcagaggcattttcccaggaagtggagaaagggaaggggaagcaaaagccatcccagggtgcgttagggagcaggtactgctgtggatgacgggtgaagaattcacctgggaaacttggggagaccatgtggaacatgccgtctctgagttatgccccatcagggggcaaagaaactggagtacttacccaccagatcctcatctgtcgttggttgaggactgctctcaggacattcacatccaggcacttctggtccacaccttggtacaacatttgcaatattagggacatgctaatacaattattcattgtatatgttaattcaaattaaatggaatgtcctatattttatagggcaaacttaggcttacgcctgggtggaatgagcaatccctgtcgccaaagaaggtccccagcatagcagttggctggagaaggaagggctgaccataagttgcactaaactgctctcagcagggtgacctggaagatcttggagtgtagatgtcaattaaggcaagtcctgagggctcggatggagccaacttttcacccgaggaggggaagagggagggttaaggagggcaaaggagagatttccaggcaaagtgcacattaaacaccagatgcgaagagctagacccccttaatgacaatttgctttctgtaatcttgaaccagggtctctcagtgtgtggaaggaatgtttgaatcggagtagcagggctgagtggcagtcctaaggcccagccacaacgtgttcttgacaagccatgtctatgtctggcgatgtgctcgcatggcacatgatcctgtttgacttcctgacagccccaggtgctggcctaaggccttccaaatgaggaaggaaggctggaagaagttaagtcatttgctagtaagggttagagccaggatttgaacccagatgactacagagttcatgcttttaattgctgcttgttaagtgcatctattatgggttgaattgcatccccccagaagatatgttgaagtcccatcctgttacctgtgaatgtaacctcatttggaagtagggtctttgcagatgtcatcaaattaatgtgagatctggctggattaagatggagcctcaatccagtgactggtgtctttattagagaaaagagagggagatttggagagacacacgtgtgtgcacacatatctacgtatctacatgtatgcacatacctacatgcatgcacatacctacatgcacacacgtgtgcacacacacaagcagaaggccatgtgaagatggaggcagatactggagcgatgctgccataagccagggaacagcaagcattgccatccaccaccaggagctggaagtggcaaggatatgttctgccctagagccttcggagggagcgcagcgccagagacaccttgaattcagactctttgagttcctgaataaagagagaataaacttgtattgtttcaagccacctagtttgtggcactttgttatggcagccccaggaaaggaacacagcatcccctgtcaacaaaccaaggggagctaaagatataccctttagccaagtaaaccagctgccccgagcaggagcacagcttccagatcactcatcaaggggccgtgggtgacagggctggcctgctgctgcctttaatgggcgtagatgttgttgttcatgtttcccagcccattggtgatgacacagaggcaggagccggggctgcagactaaattatatacatctcaagggcagttagacaattagctcgcccacaggaacattgcaataagcacagtatctgctttcccagcaaagccaagtgcaagttcctgcctgctctgatgacctcttgtgcctccagtgtgggaagggaccaggtccctcaatgctgccgcctcccaccctgtgctgccacgtggatttaactccttcgtgttccccatgttcttagtcagtatggttgttgtgccatggattcaaatggggttgcttgatttgatttgccctttacttggctggaattctctctaacaatcaatggaaacacagctcatagggatgcatgtagcctgtctcatatgtgaaaaagaaactttcaatgtatacttcatctcattccaacaagaattggaaacagcaacatcaggacttatatggtgcagggtggtcagtaagtaggaaagaaactcggggcatggaagtgaacaggaagcccagagtgaagccaggacccaaaacccacaggtgctgctcttgttataagccagccacacatttgtctttgagccttttagcagctgccacaaactgggagaaaccatcagttatgcagtttacaatatctctaaactcaaaacaagccagtaattcagaaaaagcccagttcttctcacaaagaaagatctaagtgtgatatgagagtatatgcatggagaatattttctgagctggtgatgagctgcagggggcctctcccagcccccgcactggttgcacttttaaataagagaaaaaaacagtgataggactgacctgcgtgtagaagtttcaagttacaagaaaaacacttcacaggatccaaatccttaaagtcctgaaggaaacagagagcatatacaccagctttcgccacccaattcggatgtgttagaatgaagagtctcttattttttaatgaatttttctctatttaaaagtacagggatacctcagagatattgcagatcccgttccagaccaccacaataaagcaaatatctcaataaggcaagtcacatgaattttggagtttcccagtgcatacaaaagttgcttacacgatataatagactcttaagtgtacaatagcattgtaagaaaacaatgtacataccttaattttaaaatatttcattactaaaaaatgctaatgatcatctgagccttcagcaagttgtcatctttttgctggtggagggtcttgccttgatgttgatggctgctgatggatcaagttggcggttgctgaaggttggggtggctgtggcaatttcttaaaataagacaaggataaagcttgctgcatggattgactcttccttttacaaaaggattctctgtagcatgcactgccgtttgacatcattttactcacagcagaatttatctcaaaagtggaatcagttctctcaaactcgccactgctttatcagttaagtttatggaatattctaaatcctctgttgtcatttcaacaacattcatgacgttgttcatgacaatgttcagtgttcgccttcaggaagagcaagttccattgcaagaaatcactttctttgctcatctctaagaagcaagtgctcatccattcaagttttctcatgagattgcagcaatttagtcacatcatcaggctctacttctaactcgagttctcttgctatttctaccacatatgagtcttgaaggggctcaagacttacttcctccactaacttttgaacccctcagagtcacccaagaaggtggaataaacttcttccaaactcttgttattattaatttttgatcctttgccatgaatcacgaatgttcttaatggcatctagaatgctgaatcctttctagaagattttcaatttacttagcccagatccatcagaagaatacagtatctgtggcacctgtaggcttctaaaatgtatttctttaataataatacttgatagttgaaattactctttgatacataggctgcagactgggcattgtattagcaggcatggaaactacattaatcttgtacatctccatcagagctcttaggtacgaggtacattgtcaacaagtggaatatttttattttttttattgttattgttttgagacagcctggtctggaatgcactggcatgactgcagctcaaattatcctcctactccagccttcccagtagctgggactacaggcacatgccactaggctgggctatttttgtatttttagtagagacacaatttcaccgtgttgcccaggctggtcttgaacttgtggtgaatcaatctgcccaaatcagcctcccacagtgccacaattacaggtgtgagccaccacactggaccaagcagaatatttttaaaggaatacaaattttttcccaacagtaggtctcgacagtgggcataaattattcagtaaatcatgccataaatagacgtggtctcatccagggtttgttattccatttatagagcacagggagagtaggtttagcataattcttaaggaccctaggattttgggaatggtaaatgagcttggcttcaacttgaagtcaccagcagggaagagagtcagcctgtgcttcgcagctttgaagccaggcattgccttctcctccctagctctcaaagtcctagacagcatcttcttccaacagaaagctgttttgtctacattgaaaatctgttagtgtagccaccttagtggtcttatctagatcttctggaaaacttgctgcagcttctgcatcagcacttgctgcttcatgttgcacttttttgttatggagacggctttcttccttaaacctcatgaaccgacctctgctagcttccaagttttcttctgcagcttcctcacccctctcagccttcacacaattatagagagtgagggccttgctctggattagattttggcttcagggaatgttgtggctggtttgatcctgtatccaaaccactcaaacattcttcatatgggtgataacgctgttttggtttctatcatttgtgtgttcactagaatagcacttttaatttccttcaagaactttttctttgcattcacaacttgcctgtttggcacgagatctggctttcagcctatgtcagttttcgacatggctttctcgttaagcttaatcacttctagcttttgatttaaagtgagagacatgcaactctgactttctcttgggcactgaaaagccattgaagggttgtaagtttgcctaatttcaatactgttgtgtctcaggtaatagggaggcccaaggagggggaaagagaaggagaacagcaggttgctggagccagtgtggtattcataaatataacatttatcaattaagtttgccatctgatatgggtgcagtttgtggtgccccaaaaaatgacaatggggacatcaaagatcactgatcacagatcaccaaaactgatataataataatttaaaagcttgaaatattgtaagaattatcaaaatgtgatacagagacatgaagtgagcaggtaccattggaaaaatggtgccgatagtcttccttaatgcaaagttgccagaaaccttcgatttgtaaaaaacacagtatttgcaaagtgcaataaaaggaaatgcaataaaatgaggtatgccgataatacatacagctcagtgaagaatatcttaaaaatatttaaaaagaaggaagaaaatcactcataattctgctgcccatggcaaccacaattaacccatgcctgccttccagtctttttaccacgtgttgtgttgtgtggtgtttgtcccacatagagatcattgccatacgcccatttggcacattgcttatttttccctgtctttatacatttcatcatgttgttctaaatgcttcttaactgcaattcttagtggttgtgatagtccacagaggggaagcattgctgtttatttatccatttctatgttgttggtcatttatatggttttaaatacttttggtgtcataaggagtgttgtgataaacatctctgtgcataaagcagtttctatagttcccattatgtctttaggatagattcccagaaatggaattactaggtcaaaggttgggcacattttttaaaggtttgtgagacatattgccaaattgctctccaaaaggtttgtagcaatttaaatgatcagaagcagcactgaagtccagtttcgtctaaccagtattgagtgctcattaaaaaaaaaaaaatcattactaatatgataaacaaacaaatggtgtgttattgttgggttgaaagaagcaaatttggagaatccagagaaacacagcggaaattcaatttatgggctacattaacccagcattttggattggagggtttctaaagaggtttcgttatattaatggatgacaagtggatacttaagaaaaagtgtattttggagaaagttgcaataatacctactagagattgtgtcctccctcaaaatcggagtgccatccgcgctccatgagtctgacactttgtaggtgctttataaatatggattgaagcaaatgagtgacgttcatatgatgttttgcagttttttcaaagtgggttttacattgagaatctcatttttccaacaaggcaactaaggcatggattcaataatgtgccagcggcacacacatagcaaatggtccagccacgaagagaacgggactgtccagccgggaggacagtatgcttttcacctccctctgtacccttctctgagaactgtttggtttgaatcatgatggcagtggctggcttctccacgatgctgttgtgctgaaccctattaacctcatagggaagacactaggatcaagaggccagagaagagacccagagccagcaaacaagacatagggttttattaggggtttacctacaaaggagagagtttagtggcagtgggctgggcaggagaactgccttatgtacagaaatggttcaggggccgtggaatggacaagactccactttcctacagtccagtgtcagtggctggacaacataaccacacagcccagtggccgtggcctgggcagggaaaccgcaactgcctgcaggaagagtgcagtttatttagataacattttcacttaacatcctgccgttaatgacctccacctggcaacctttatttaatccaaaactcagggactggattttccatacggcctgtgaggccagggggctcagttgttcctcatagacagggaatgtatctcctgattggccactcccagattccctagctaggaacagacattcaggtacatatacccttcagagagtcattctcaaggtatgctcaagctattgctgtcaggcgcatttaccctacagagctgaactaccatttcctcaaaagtaggtacagatggggtaacagtgggcaatgtggccctttctgcacttccacagtacccgaagtttaggcgcccctcctgccaagagcccccattagcagcaaaatatatctcacatggtgcccagagcaaaggaccctgtgctagttttttgtggctgctgtaataacggcaaactgagtgacgtaaaacagcagagatacatttgctcacggtgttggagcccagacgtctgaaattgacactgcttctggggacactagaggagactttgttcttcgcccttcccggcttcaggtcgcggtaagcattccttaactggtggtcacattactctatctgtgcctccatggtcacttggacttcccttctgtctgtctgaaatttccctctgcgtttattttttgttgttgtttgtttctgagacacagtctcactctgttgccccggctggagtgcagtggcatgatcttggctcactgcatcctccatctcccaggcttaagtaattctcctgccgcagcctcctgagtagatgggattacaggcgtgcgccaccatgcccggtcaatttttgtatttttagtagagacgaggtttcaccatgttggccaggctggtttcgaactcgtgacctcaggtgatccacctgccttggcctcccaaagtgctgggattacaggcgtgagtcaccatgcctggctatctgcgtttcttctgtaaggatacttgtctttaaatgtaggacccacttggaatatccagaactatcgtatcaaaaaatgtttactcacacctgcgtataccctgtttccaaatagagtcacagttacaggttccggggagttgacatgggtatcctctggggcagggggcacttttctgcctaccacagatactgaggtgcattgctaattacatgagtacagcatttgtgaaaactcgctcatgatatcttctccatagtcgcagtcagtaccagctgctgtggaaaaaattttacgcattgtgtttacaacagaatatataacatggcttagagacaaagtgttttacttatggccagtagatggaattctaaggtccgatgtcggtttgccatgacttgggcattggtttctgttcggctctgtttacggggctgtgggatgggtacatagacactcgtctacttgaacttccagggactcgggaggcctgcagttgaataacaagagaccgtgctggtgagaggtggagtttgcagtaggatttcaaagactccatggagtccaaaaggtgggaggtgtgttttggggcatgcgccaagggaagctgggctttgggaagagaaaagaatccgaactggtggcttcccacaattgctgggagtctgagatagattcaattgggaaaactaggttagtgccagataaggtccattactctttaaaagtggccactcatccctaataataaataaaccaaacattgggatattaaaacaattcgttctcagcatcagaaaagaggtcgtgtgtgtgtttgtgtttttttaatatcccatccagcccccagccccagtaaccctaagattgaacaaaaccctacttacgtgctacggatttaatatagcgtcaggctcctctaggtacaataaaataccaagttaagagcattaattccttacaaccctgatgggtcccagctgtgcacacgcatgtagggtgtgagggtgtgtgctcagcgggcacaggtgctgacggggctgttccacctcggagcgcgtgggccgggaacacagctgtttctcaaatcatccgccacttgcttctaaacctctgtgaagttgtaccgcctctgggcacaattaaaagctgtatactacatttcatcaggtagtgttagaaatttaggctgagccaaaaaagaaaagggaggaggtgggagggaggaagcaacgagtcccttgttcaggcggcattaacccccttaccctggctattggaacaatagcgcttctaaaagccgcacaaaatcctccaatattaagaacggagaaaaggagtgtggaaaaggtgtgggcaagcacggcatctcttctttctttttcttctttttctgtttctttccttctcttgctatttcctttctttctttttccttcccttccttccttccttctctctatccttcctttttgtcccttccttcccctcattctttctttccctctctctttctccgtctttctttcctccctcccatactctctacttttcttcttcccttccctttgttttcacgctaattccttaatttgtttttgggtctgctcgcaggaaataaccgtaagctaggataactgaggtaaaatttgtacagctaagctgaatggtgaaaggcccagatttagttctcattgtaggaaaaagggccagaataccttgcccatttttgccttgggaagtgagctcaatgaaatacatcttcatatgcccattttacagaagcagcaactgagggctgttgtactgaggcttgcaatggccacctcaacttttaggtctctgaggcagcaatgggacccttgccggggcctcgccatccacatggtcattgcctcaaaatttgggattccagttgcccttttccttcttctctcttgaacaatgtgaacgcaaggtgaggatgggccttctccgccttcaaaagttgctgccttccaaggggaaaaggtctggtcttgtaatttctggtctgtgcgtgctgtataaggaagaaggtttgggtagggaagcaacagagtacccactagtgagagggaggacaccgctggtctgtgctcaacagccaggccagcaccacatgaataaagcatgatggcaattgcctgactctgtcctcggtggggacaggagagctgagcataaggatctaagtttagacgccctcctaggattaccaacgtaggcgtgatcaggcccataaaatactgcacatcttggcatcttacctataaaaataatgcagatacattcgtaactccccaggttttcgggagtggaaatgagggcagctggggagtgaatctgtcgtttgttgagactctttttcctgcttgccagacactgatctaggctcattcatacaccagttcattcatcctcataacagttctgtgcctgagtagattcttgtccttatgtaaggattaaggacgttgagacccagaagggtctcatctaacaggcagtagtagagccagcagtcaaaatagtttgaccccaaggctccaggctttttccctatttctttctcacccacagccaattgcaatctggaccctttacctgtcagctgtaggaacatgaaataatgtgagtggggtgaaataatgccatttaaaagcaggcacattataaagaattatgtcaacctgatttcttgaatcccaggacaattcatatccccgtgccatccgattagtgaatcaagagaaactgattgatatacagcaacaatagttaagaaacaggcagcatcgatggaggtttgattaaaccgataccctgggtctcctgctgtatcaaatcatgggcgaattggtaccattaggataaattactacaagaggcactgcaaagccaagctaaataaactctgccttctcgagcccctgattgtcttattaaataatttctttgcctcttaagtgtggactcggagcactcgtgctctgaaagccctcctgattaactatagccttggcctcaagttgattttataaacttcggatggtgccccagagggtgaagcttcctgttgtcaattctgcccgttgctatagataccaaactccacaatcagtaattagagcgtgccccctgccccagaactggtcaaacggtgcagagcgctcggcaaatggtcttaaaagcatccgcgcttgcatggaaatgcatttccaatggtgacggggtttgttttattcatggactttttgaaaaaaaaatcactggtttattggaaaccatagagaagtataagtaattattatgctttttaaaatacaaccgaggttcctcatcatgatacgttaagggaaaggaagacagggcaggagggtggtgtggcacaaaggcggctctgtctgacctgtcacgttaggactgagttcattcttgttcagattcagcatcttttgttatacccgaagtgcattccatggccctgtcccagccatagaaagaaatgcctttatttttaagcgagacttcttgtggaatgatgaatatgttcagggaggctgttgatggcaagaaaagaagggtgatgggttgggcttatattgtttagtggagcaaaacagatgtgaaacatttgtgtcttaaagtgttttggtcaagagaaactaaattggttagaaagtgtgcaattttgcaagctttataaaagtataaaccaatgagtctggactctgttccctaaaggggatgaggaatgaaaatgaaggtttgcaaagacatcttgccagacccttacatattttaatttaaggtggtattactgtcctcattttcaagctgaagaaccaagctctgagagagttaatgattttctccagatcattcacattcatttctgttacacagctgggattataatccatgcctgtctgactctgaaacctattttcccatctttttttttttttttagggataaatttctcccaaactatatgcagatcctgctagagactgcccatccctctatccatttctcagtttgaaaagaaatcctggaattcagaatgatgaatattcattttaacatcatcttaaaatgtccttatagatgtatattacagctgtagtctgccaggccaagaattcgattggcatttccagagtactgttgattgtattttagaatcttccaaacctccgtaattgtcttgttgatttcaaacaccctgagaacatttcctaaatgctcatagcgtccaatagcatgggaaagtaaatggtttatgaggagaatttgggatgtgcaaaataagcctttgaagagagtgcattatctgaagcctgacattgtaacagcttcttaattacgctttctttcatgtggcatttttatgggatccagtacgcccaggctcaaatgatagacatttcaactcctacatccaagtgtagggagtcccaactttttgaatccatccgtgtggcaaatgtagctggacccttgggatgaagacccttcctgcatcctcccaaggagacaagttctgggccataactctagagcaaccccaacccccaggccatggaccaagtgtcaacaatgttgacattgtgaatccctgatctggaggaacatagctttggggcagtgccaggatttaatatgggttctttggacttcagagccccttgtgctaaattgaaacattatggtgttgctttgagcaaacaattagcatttttgccatagctttttacttctccatgttgaaattatcaaagattatcgtcgaaggcgtggtttctttactatctgtcttctccaggagactgtcatctctgtgagtgcaggaatccggctggtggtgtttttactctaacacctctttcagtacatacatacagtaggtgcttagtagatgtttactgaatgaatggataaacatgtacaaaattatgatcccttgtgttaaatatggtagggaagcaacataatgtgccctggagtttcacagaagaaggggctttcttccagcttggggatggaggtgagctgtcattctggatgatgtgatggggaaagaggatgtgagctgaggcttggaaccaagcagagcttgggctttggggtgctgggaggacagaatgctggaaacagaggtaagaagggtaagcacctagtcaacatgagtgatttagctttgggagctgatcaagtgatatgatttggctctgtgtcccaactcaaatgtcatctcgaattgtaatccccacgtgtcaaaggagggaccaggtggaggtaatttgatcatgggggtggttttccccatgctgttctcatgctagtgagtgagttgtcatgagatctgatggctttgtaagtgtttggtagttcgttctgtgttcattctccctcctgccgccttgtgaagaaggttcttgcttccccttcgtcttctgccatggtggtaagtttcctgaggcctccccagtcatgtgaaacggtgagtcaattaaacctctttcctttataaactacccagtctcaggtatttctgtgtagcagtgtaagaacagactaatacagcaagggagcagtgatggagcacaggctggaaaactgagttgaggggtcagtggtggaccctgaaggttagactaagaaatttagactccagcctacataaatttagactccatgcagaatgactggatgtcctataggacatgcaaagccacagggaattttggaacaggaaattgtgctcaaagctgaattttgaggaggtaaatacagcctctgtgtgtaagacagagaaaaggagagagtgggaagtaatttatgtatcacagttgcctagagaagacagaaaataggtgcctggcttatgtggccactgctttttttttaaacttatttctttaattttatttttttttaaattaggattaaaaaatgtacatatacacataaaatatttatttttgaataggtaatacttttatatggttcaaaaatcaaaagtagaagataaaaacaaggtgtatatgtatatatatttatatacctatgtgcatatataaaatccttgtatacatatacacacacacacctatgtttttctttatgtgtgttaaaatctccctctacccctttcctttagcacctaattcctcttctgaaccgatgttatttcctggtgcatccttctagacattattatgcatttacaaggcaatatgtttgtatattcttctgccctccccttcactttgctatacacaccttgctctttttgcttgacaatatatcttagagatggttctaaatcagcatataaattatttcttcattttttaacaactgctgagtattacactgtgtggatgtttcataattcattgaaccaattccctattgatagacatttgggttgttcccagccttttgctattgcaaattgtgccgcaacgtgtaaccttgcaccgacatcgcttcccacgtgcatgcatgtatttgcaggattgagtcttagaaatagcagcatcggctgagagagtatgcactccggtcgttttcatagatattgccaaattgccctctacggaggttgttctgatttacattcccactaagcaacatacgacagttagggtggcatttcctgactccatgctttgtagctgggtggaggggtggactgagagtacatgtggatgggaaggtgcaagtgaatgctctcaaaatgtgctttaaggagaaatattttgttgggacacagaagttagactgcaagaaggagaagattggattcagggcaggaaatcagtacaacttgcagtagtccacatgacagttacgcaaaggcctggtctgatagaggaacaagagagagagaaagtgcatggcaaagacccatcattgatgagtgactggatgtgaggaatggagcaggggagatgctgatgatttggttacccccttctccatcccccaccacccactgatgttattatccagtaaggaccaggagagaagaagagatttaagaagaagacaatggctgtggtttgatgaagataaaacgccctgccagaatcatttgagcaaaagcttaatgttgtttgtggcaatgtcacttactcctgatcccattggagaaatctttcctatcacttccaatccacgtgtgttcagacaaacactaattttgttagtacaacgtcccctaatagctaagagttaaaaaaaaaataggtcttagaagtgtgaaaaacaaaaaacaaaaaacaaaaaaaaaaacactaaaccccaaatttgtccttttaacactttcagcaaccctgtaaagtcattatcatccccctgttacaggtaagaaaattaaggctcagagaggttaaataacttggccaaggtcacacagctattaaggaatggtaccatgtcttggacccaggttaactttaaatcctgagctttataacggtttgatttcagtagcaaatgcagtggcacagaagggtctgggcatttatttccaaagaatgatttcactcaactgaggaattctaatgttttaacagcatcctacttatttctaaagtgttggggtgaatttgccaaggtttgaaaagtgcatttgtaagccagtaggattcaatctgaagtcagggataacagagccgggggcggaggctaggtctccttacatattttgttcacaatgggactagaacactctgcagagtatgaaggttgtgattcagttgcccaagcagtaaggcctgactggtgtcacgatcccacaacccgcacaaaggtgccattgttgcccagtgtgaagggagctgaggcatcaccaaagggggccaagcgtcccttctctgggttagaaatgttgttttccatttgctggtaaacaacagtccaagttcattgtcctgacacagaactctgtttcttcttttatgctgagagtttgcaagtatggatcttgataggaatgcttgcaaacaacggtagttataaaatgttgcctcctgtatctcagtaggcactgttcaagcatttgaacttcatcaagtatcaagacaagtctaagagaaggtggggagagaccatcagggcctaggattggaaaacctccaacgcaaaatagagatgtagttttagcgtgctgcccaatattaaaagattgtataaatgaggggggcacacttcctgatatgttcgttatgcacatagtcacacacctctcagtgccttaaaatttgttatgatgcagtctatctcgtatggaacgatcttgatgtatctatcaaacacgggagaaaaaccacttaaaatgtgtaaaaagtttattaataaaggagtacatgattgtgttttaaaagctacatacattaggtttaagctgcagaaaatggcggtttattccgaaagactgctgtatttatgcttaaataattaggattacctctacctggtatatttgcagggacaagcaaagcatacactgaaaataaattctcaaatgaaattcatttcacattagttgcatcccaacattcctttatggactgcattccatgcctggcactgtgcctatgatttattaaaatctaaagccattaataaataaattattcaatccatgcattgaattatctagctcattcaaagacagtcacagtccatccctcaaagagctcatggaccagtcgaaggagggtgacagcctgggtcaaattggtgctgagcacacaggcaggggtcaggctccctggagtgaagtgtaagcgtcgctgttcactggctgagtcatctttggtaggtccctttaccactttgccactttaagtctccgtttcctcatctgtaaaatagaggtaataaaaacagctaatatttacagagagcttactccttgttagcagttttcattaattaatgggtgtatttattggaataaccgtgtaaggttgccatttttatttccatctgtgtgttacagatgagatgtgtaatagaaagggaatttgcccaagctcacagtcacaggctggtggagttgggatttcaaacccagagtgtctgattcctgaacctgtgctcttgtctcttccttcagtaccacatacaacagaggggacaaaataatttctatataaagtgcttagcatagtgcctgccacttagacctcaaaatatattgttttcattggataattaaatataaaataacatacagcatgatgattaatacaactaataaatagtgcattagtattataggcacaaaagacagtatgaagtacagcacagatcatgaggagggtagggtcagttctacgtaaaaacagggttagtaaaggcctcagagagaagatgtcctttgagctgagtcttgagactccagagatcaggactcaaggactgtggaacctgtacattcacatcctggtaatcttacattgctcagaagactccagggacattgaggttgcccccatggagttgaaactcctatgctgatcacttaggaagccaagaacaaattaacccagggcaacaagaaacaatgactaattagaccctaatgaagtgctgcggtactggcgtccttccagatttgacttgtaatcgccacaatgtattacagatgcagagtcttcatcttgttgggctgtgatcaagtacatatgctccccagcagttctttgagatttccatgttctccgcacagtgcggagctactgcgggtgtgtgagccaagggggccctgtgacccttgaaatagaaaagggggaaatggctgcatgccaaccgaagagaccactgcattgttggccataagtgaaactagtgagatgtgtgggatatcataaaaagaacattgacataatccttttttggatgaagttatatcacaaccagaacacacaatgaccagcaggcttctctttttttgtttgatttcactcctgaaaagtgggctttctgtgagagttggacagactccatgctgcccctgcctcccgggccttccttcccaagcagggatgagctctcctctgcatgtaacaagcaaggtgattcagcaagaagactgctggtctctcccttcctccagggccatttgtgagagtgagacacaaaatattagaagcaaaagaagaagctgtactcccaagaggcatggatccttgagtgagttatgtgcttggaaaaaattagtttgcacatgaggacacaaagagagcctgaaaagcaggaggctttgaggtctttttttccctcctgattcggagggaaaaaaaatgttgtttgtgttcatttatggaaattagatctatcacatactcttatgcaatttatgaaatgttaagcaatacccctgaatgtcctagtcccaggaaagttgagagttgagtgcaagacggggacacccaggagccagtaaatcaactcttgaatgatggtgtattaagtgataaccttgtcatagttaaagtcacactggaaggatatatattgaggctttatctctgccatggtgtcagcatcagtgaattaacacagggtgtcttaacttttcaaaaacaggacatgggtgatcaagcagcagtatatctctttactccttgtattagtccattttcacactgcttgataaaaacataccctagcctgggaagaaaaatcggtttaatggacttacagttccatattgctggggaagccttacaatcatggtggaaggcaaggaggagcaagtcacgtcttacacggatggcagcaggcaaagagagtgagcttgttcagggaaacccctgtttttaaaaccatcagatctcacgagacttattcactatcatgagaatagtacaggaaagacccacccccatgattcagttgtctccctccaggtcccttccataacacatgggaattatgggagatacaagatgagatttgggtggggacacagagtcaaaccgtatcactctcccacccaacacttgcagaaacacacacacacacacacacacacacacacacacacacaccccttcctacgtcctacatccctgtacttggaaagcaatcatatttaaatcattgctgctggaactttagttgactttataagttacattttacataaaaaggcagcagtggtgaagctggaagagggcacctaggctttgatttcaggcaagattttgttaggtcccagtattgggacttccggttggtggattttgctcaagaatagttttctctttgtctaacgcttcatgagagacaacctaaataaagccacagccagtgttacagaaatagtgtttcgtgattaaaataatggtacttatttgggagagttacttgccacgtttcagatgattgggaggtagtcttttcaggaatattctgagtttgtttcttgatctcgatagcagcaacctttccatttgctctctgtctggtttctctgtgtctctctttttccctcaaacatcgcttttctttttttaaaacaagaataaatcccttaggaccttgctaagttattacttatattgtcgcttaaaaaaaactttggaaagaggctctggcatactttaaaaaagttaagcacactcaagcctctttaattctaaattcagttttgaatatgcttgtactgatgtcaatgacttttcaaaagagagtgtcccaattatttaggtggccaagagaaacagctttaattctttatcacataaatatgcttcaaaccacgatttaaaccagatggatggagcactggattagtggtggggcttcttggctgatctgagtttcgcctcctcgatcttgcctgggtctgttctgtcacttggatcttaccagtcctggcaggcacacagctctgtgagattttccttctggctttgcatgaagcttttgaaaagaaaacacatacatgcaagtgacctttctagggttgtttctagtttcttcgtcttacataaagcccctgctaatttagcatggtgtgtgcccgagtttattttctttttaacaactttatttatgtaattaagcgagtgaagtcatacattttattgatctaatgaaacgcatttcatggttcctcctgcccttcatcttctgaccttccccttcagatcacagccctttactttcgtcaatgagacgccacttaacaattttccaccttgccaaatttgaggtccccctcaacattaacggggaacccaatatcagttccttaaatgggagcaaagattgatgtcaatataaactatgacacacattcatattgcagaaagggtaagaaatccttacacagaacgagtacggtctctaacagtaaagtacagaacaggtggttctcattttagtatatttaaacttcaggtccttaaatgttcttttctttttccttcattctgtttctttattattttaatggagtgcaaggtgcagtctttttgaagatgtagaatgtggccttataaaagctaagtgctactttatatttctgctgtccttgccggtggcctgcactggggagttgtatattgtatcagtaattttaaaagccagcaagtgttctaccagctgaagaagttttcctaatggtggctggtcaaacgtattacttaactaggcgtatagaattgaggggaaatgcaggatgtaatgaaatgacattggtcaatcctcagtaaatgtttttttcaaaggcttggcacaaaaaatgtgcaaaatcttggaggtagatttttttgggggcatttgtcagggaagagattaatataatactcagtgaattcaggcaagtcctcaagaagaaaaatttaaggagcaaatatgtgagccaggatctcatgctggactatctaagcaagcatgtaggaagagtttgtttcttcctgctatggccatagaggtttggttgtcactatgaagaatgggcctgtgtttttttttaaaaatatgctgatctgggtgaggtcacattttgctattctcagtggagggaataattgggattatcttatgatttttttttctctttaattttcttacaaaggaaaaagaaagaatccaatttgttataaataactgctgagggcagtacatgttgcaggtagtcactatctgggactggtggcacaggcagtaaaggattcaccaagacagttgtaggtaaagaaaggtggatttattggagaagataagaaagtacactgtaaggttgcaacaggcagcccagcatggaaggggctgtctgcaaagaggcaggggctggagggactgaagttatacagggtcctgttggagggagctatgtgcagaatgaggtcgaggtcattgtgcctgcggattgtttgttgttcttccctacccggggcccactcctacctggggcctcttcctcattgctgcttacttattagaactccacagtagattttttataaatgcagacacatacagacacccacacccacacatacagacacacacagaaacatatacacatttaggtcgcgatttcttcacaaggacattcttatagacatgtcatgaagggacttggggctcagagaaatgaagtaactcagctaagtctgtacagtacttagccaggggatttagaaatccacccagggatggctccagttgcctgtttcttttcatttgacacgggatggcctaatgggtccccaccaggggtggcttggaaaggagaaagcaactgcattcccactggaaggtgttctgtagcaaagtggagtgaatgccaccaataatgagttccaaacagggtatgtgtttgcagacaggagctacatacatttgaaaattaggatgatttgaaattgaaatgagggcttatgctgttcattggattaatttttctctcttataaataaaaaatatatacaaataatacataaacattgtttttcactgtggcttgaattttctaacaatttttttcttcttctcaggaaatgttttcttcttatacctccaaaataaccactgttgacagtgtattgttaaccttgctagaaaaaaatatttatttttgatccatacacgtaaatatgcatactcataaatatgcattcatattttgtgtatgagtacacttgttaatttacatgtatgtcttgatttatatacattgttctatacctttccttttcccataattttatggattacatttattttcatttctgtatatttagttaattcttttaaaaggctgcctgttatcccattgtctgtcttcaccatcatttacttatgtaataaatctgttaaataattttaatataaatctattcatctatccatctattaaaagagatttaagttatttctaatctttgcatattataagttgcatttcagcttataccttgactttctttgacatatacatcaataggtagagtatattcctagaaattcaattgtggaccaatgagatgtacttcaaatttttaacagatatttcagtattgacctcccaaaatgtattcacacacccaccaaatctaagtgtctgtgtaacacacagatgctgatttggagtattaccattttaaaaaaataatatagctatcagtcgtgtaaaaaaaatcctcaccattatttcttaattttacattgtaattgtgagtgatgttgggtagatttttgtacttttattgaccattcacatttcttcttttctgaactgcctttccatattctcggtccagctttctataagattgctctcatttactggtgagagctctgtgtaaattaaggaaaccatcaccaccttcgaatggctgactattgtaaatattttaatgtttgtcgtttgtttgcaaccttgtaattttttcctgtgcagcaattttaactttctatattcaaatatactctgaatgcacagtgaatttggcagaataccatttaagtcttgtattttccaaagctagtcaacgtccaactgccaatgttgcctgaacaggaaatatttatacctgaaagcgtccaggtgagagtcaggaaagccatgaaggtgcaactggcatactgatgtcacttcttctttttttttttttttaagacggagtcttgctcttttgccaggctggagtgcagtggtgcaatctcggctcactgcaacatttgactccctggttcaagcgattctcctgcctccgcctcccaagtagctgggattacaggcatgcaccatcacacccagctaatttttgtatttttagtagagacgggattttaccatgttggccaggatggtcttgatctcctgacctcatgatccacccgcctcggcctcccaaagtgctgggattacaggcgtgagctaccatgcctggccctgatgtcacttcttaggctaatttctgtgaaattgtgattgggaggaaaaagtgaacaggaacttaaagccagcagaggaaagctacctgcccttcactggtggtcagtgcatggattccagagacagggtgggcaccagttcctcaccgggtcctttctagttgcatgacctggggcaggtgactttatgtggctaagcctcagcttcctgacatatggcaggagtaataatatcccttgaagccaacaaaattcaataggcacatgccatgtacatgcctgtgttatgccgggaacttcttaacatttccagaatatgtgtaatcatatttgttacatgcaatatgaaattatgtgtaaactgtccaacctgcaggaggcagtagatcaatcaattacatgtgattaatcctccccctatcttacagagaataggagagaaaatagagctccaaggtggaggaaaagacaactgagaggaggctattgtgatgttttattaccataaactgccaagggttagtcgtagccctccatctgccagctaattccggtttcattaatatgaatattctcacgcttccagaaggaaattcttggaatgttatggatctctgtagcaggcacatgcaacgtccagtgcttccctgctggtaatgtggcggttttattatgcatgccatacccatgctctctatttcctcgatagaccttatagaaatcaccatgcttccttttagaagaaaatgatggtatcacatggagaacgagctgaggagcttgacaatcttggcaaggcttatcaaaagaaaattcatgtgttagccttaagttaacactacttttattaaattcagtttttatcacagctgataacttggagatgtaagcatttagagacagaattcacttatgaatgttctaaaatgtcagaaagtttaggattctcttcaggtagtttcctttctctcacttggagtgacatgttggacccgtggcattgtcccgaggcaacgttgtggaatttttagagagtgtttgtctgttagctgtttgttttgaacatgttcacctttggctctgacctgccatcatggaaaaaaagtgtcaatgtgttgggaaagaaatgggctgcttctcttttctcctccctcctccgtctccttcccccgaccctcctccatccccttcctgcccccactcctcctgctctccagcctggcctctgtcccctctgtgttcctccccttcttccttgtatccttaatgacttccaggtgtgcctgctgggtcaggcttctggccccgtcctggggaggctgggtctgtgcctccacaaacacaagaccaaagttagggggtgggggactccagaagtacaacatcagaggaagaaaaaaaaaactttgaagttttgaggatgaaattggtaaaaataattctagatgaagatagacccgtttacattccaaggaagggaaatgttttacccaaactgtttccatggaccctgtgggttcttgttaatactgttcaaccttgtgattgaaagcccaagccctgtgatccacagcaggggccacagccagaaataattccccgagaatactgcgtgtgccttcaaatggtccttgatcatttttcttggatgccccactttccaaaggccagaaattgtttcagggagtcattccagttggggaaggttttatgttctaagagcaaggtgctgtactcataggaaaatgtgtaattcgtcatgatccttttgtgtggagaggatggcggtggtccacttctcaacttgggagtcccttagtgactcatgatgtatccttcagtacgctgcccagtgccttccccatttgacttagattttctgccacagtttaagtatcacctcctctatgaagtcttgccagacacattcctcgtctctttcctgttggaacaactgcctcactcctgtggccccactgtgccatagacaggttagagaacatgggccctggcatcagacctggcaggcagtcttgattaggcccgttattagggtgctctgggcaagtaagtttacctgtgccagggatgcacctttttaacccaacacttagaggggtcctccatgtacagccatgatcacaactctctaacgtggtcacttgcttgcacacacttgtttagatgtctctgccctgctgttaattagactgtgagtctccagagggtgagactgacatctcatttctctttgcagtcacagcagagatgcaggcccacagtagggactcaccagatgtggcagggtgagggaattgtccatagatgccttaaagatatgctatccacaggagcagagagcacagcaggctggatgccaaggagaattcgaccagggtaaggcttacaggcaatccattcactgcagagtcttcccccatccacacatataactccctttagtattgatgacctttctctcctgaaatattacagaaactgccctgaacgaagatagatggtcccccctcagcgttcacacatggttccgtctcatccaccagcttccccggccccattccctctgtctcaggaaagtaataatagtaactcataataatagttcaaaataataataatcatacctgggatttatatttcagcgtgcctcctaagagggcaaataaaccattttacacaatgcagagagaaggacagattttctttgtgctgctgctgatcacgttaagccaggagagatttacagtcaaattccagctacagaagcaaagtgttggtgccccgttggcatgtggggatccactttaatgttgttctcttggttttgcttaaactgccaagtgaattactgtaacacactttgcctgcagttaatttgacatctagtgccagagagctgctttatatttttcaaggcaagccagggtgaaatttttgcaaaaagatttgtccatcatttttactgatgtccaaacacgatgtctttagcttctttggaatcgagctgtggaagtcacgtgggctttttcttttttcttttctttttctttctttctttcttttctttttttaaggatcacagaagaaaagcaggccgatcttgttgaaatgtttttaaaatctccaaataataaaataggtttagggtgtttgcttatgaaagctgactttcaccagaatgatttatatgcatcatgggcagaggggcagtccaataaaagaggcagaaagggctcttgaaaaatgtccctgggcacttgcccgaatgactttagtgacagtatctactaaaactgatactaattctgttacgtgttatggcgcatacccaagaccctccccataaactatttgaaagaagcaaagttgtaattctccaaatacggacttgtacatttctgatcattttagcaccaacattggttcaaactctggcagccgaccacagttccagctgagctttgctgcgctgtcagcaccatggggcctgataaagcatttttggatttttcctactcacagtgcccccatggtctcaatgctgttgagaacattaagctccttacctgtgttttgtggttgttgttattgtttttctttctggtaaaggactttatctgcagtcctaacaaattgacttacgttaacattctaactcgtggctaaaccaaaaataaacttgcagaccctgccctgaaatgcacgctctgagcagtctattggatgcggtggtgtggccgatttcttggacttgctacattcttaggcaagtgacatctcccttcatttgtacagagggagttagaattgaatcgaacttccaccgcagcatccgccagctcttataatcacttgccctttgctgatggtgagtttttagctgctttctctcctaccatacagcactgacacctgagaagtccagtccttttggagttcagtagattccttgtctctggaaaatcagcagaaaacaatgcagcctcctcttgatctcccctgaactttgcaaacctctctcagcattgaccgcatgaagggtgggtgccctgaggcaggcaagccaccaggtggtaattaagaagcaagaagcgctgctcccaattctctagatctggatttagaggccagttggcttcagaaaacatctcattcacacaaaatgggacatggtcttttgtctgttaaacataagctttcaaggtgagttgtgcagaggcaagtctgcttgtttcatcaagctgacgtttatacttctgagtaagtagggggatccggagagtcttcttgtcactcaaacagtttccgtacgtcagtttcacacctctgttctgcatgtctctgttgggaaggatgctgatgtctgggatttgaaatagagatggttggacctctgactttcaacaggaggaaatcaaaattaaaggaagaatataggcgtacgcttagaaaggacctgtgaaaggaagataaatcttgggcccccaaatcactaagctaaagggaaaagtcaagctgggaactgcttagggccaacctgcctcccattctactcgaagtcacccctctgttcactgagataaatacatatcggattgcctcctttggagaggctattcagaaactcaaaagaatgcaaacatttgtctcttatctacctatgacctggaagccccctcctcatttcaagtcttcctacctttgctctgagttgtcccacctttccagaccgaacgagtgttcatcttgcatatgttgattgatgtctcatgtctccctagaatgtgtacaaccaaactgtgctctgaccactttgggcatgtgtcatcaggccctcctgaggctgtgtcacaggtgcacatcctcaaccttggcaaaataaactttctaaattagctgagacctggctcagattttcagggttcacagacctgtcaacatgaactgtcagtggtgatagcacccgttttcaagtctcattttaatcggaaggaagttttaccagctctttggctttgtagaaggtcgagttctccaaatttaagagattcaaaaatgtcctccaaagaagtttggggtgaaaacacatgacagtttcttgttcatatttggccagaaggaagcagtgtccattaggttgactctccagtgcttcttggtgttgtgataagcccgtctagcacggagggccagaaggaagcagtgtccattaggatgactctccattgcttcttggtgttgtgataagcccgtctagcacggagggccagaaggaagcagtgtccattaggatgactcttcagtgcttcttggcgttgtgattagcccgtctaacagggcgggccagaaggaagcagtgtccgttagtatgactctccagtgcttcttggctattgtgataagcccgtctagcagggaggagatgtctacacggtgttctccaaactgctcagaaaagagcagtaaggacaggatggggcccagttaagaggtatatatcttaccttctctttttctccttcttctccatctcctgcccttacttcttcctgcctgtcatttatttattcttttcacagatatttagtgagtccttgctctgtgtcaggccacagtgtagatattccagggatggaggtgaccaagcagacatggccatagtgacaggctaaggaagcacaaatcacaaatacagaagataattcctggtagtgacgggtgcctccaagcatataaaacagggtagtgagatgggaagttagagtagaaatggctcaattttgtgctggaactggctgcaccagcaggagccaatgattacccatctcccatgtttagtgacatcatgttgatagcttgatttcagccatagtgagaatattttcaccacggaaattggcacatgctacacatcagggctccctcctccccaccaaagctgatcattaaacattttctagaacatacctggaaggcatctgggaagaggtaacattgatcttaattgttattagagagaattttcaatttcagttgtagcatgaaaaatcacagagtccatttatttctcctcttcgagtcagtatatctcaaaacattttttcaacgttaatagaaatataagaagtgcctggatcagtttttgtttttgttttgtttctttttgagatagggtctcattccgttccctaggcgggactgcagtggcaccattatggtttactgcagccttgacctcccaggcccaactgatcctcctgcctcagtctcccaagtagctgggactacagggacacaccatcatgctgagctaatttttatatatatttttttacagagacaagttctcgccttattgcccaggctgatcttgaactcctgggctcaagccaccagcctgcctcagcctcccaaagagcagagattacaggcgtgagctaccacacccagccatttatctgttttttaaatagcattttggagatgacagaaaaaaaaataaaggaaagagaacgctcatagaagtttaaggttcagaagtatttggctttgaaaaaaaagtttaagggactgtttgtcatggggtctggtcttccaaatttaatgcctcattccaggtagctgcagattttatagtttctctcaaagaatgtcaatcctattgtctttccctgcttccccctcctggatgaagtctttctctacactcttttttgggaagttcccaaatctgtcagtatatattacaaaaactgttaccgcctaacacattaaatgtatttaaattatttgttctattaaaatgtcagtgtatttcttgaattttaactgtgcctgaagatcaatcattgtaacagctgcagggaaggctttatgacttacctgaacggtggtgtattctgtggctcggctaagtggattcttcgactttaatagattttactagctaggacaaaccatttgagtggcttctgttggagttttattcttgatacataccaatgatttactcagatccgttagaaaaaatagttttagggatgataaaaattatgataataatattgacaataaatagagtattcgccaatatgtatagagtgcccattatgtttcacaccctatgtcttgtgtgtggtgactcatttgaaccttatagcagccctgagggataggtgccggtttgtctctatgcgcccatgggaaactggggcacagaggtgttaagtaagtgacccaagaacacacagctggtaggagttttagccaatattccagtctcgatctgctgatatgaagccgatgcagctagccaccatgttatacccacccatagtcatgaaaataagatgagcttaatttttttcttttgagactgggtcttgctatgttaccctgggtggagtgcagtggcacagtcatagctcactgcaatcttgaactcctgggctccagtgattttcagcttactgagtagctgtgactacaggcacaggcctccatacccagctaagtttattattttttggtagagatggagtattgctatgttgcccaggcttgtcttgaactcctggcctcaaagcgatcctcctgtctcagcctcccaaagtgtggagattacaggcatgagccactgcacacagccaaggtcagctttttcacttcagcacaccaggattttcatcccagctctccaatcccccagctgtgtgggcctggtcaacctgtttagcctgtcaagacttcagtcccttcaactgatagatgggagaaattaatagcacctgcctgagaaggccagctttttgggggacccaggagttacgaatgcccagcacttctcaggtgatagctgctgcttatctccttgtacagagagaactggaacattctgaagatgaaatgggataataatgtccatgaaaagacctggcttcacgcttgcctcctgctagttccttttctactctatttcagcttcctgtttgtaacatgatttaagcactaagctattgaattttggagtgcattaaaaaaaatatcgagtggaaaaaggaatatttcttagggaggaaaaacccgacttttgactttataatattaagttcgttcatatctctcttagattcttatataaattttattgacctaatgttctgtacagtagtccttaattacagttttggtttccaaggtttcagttatacattgtcaactgtggtacaaatatattacttacaatatgatattttgagagagagagaccacatttatgtaacttttattacaatttattgttataattgttctattattgttgctcatctcttactgtgcctaatttataagtatactttattgtaggtatgtatgtataggaagaaatgaaatatatgtagggtttggaaccatctgaggctttaggcatctactgggggtcttggagtatatcccctgtgcagaagcggaggctactgtacataaatttgcctgtaagtgagcgcgttcttggattttgttgaatggtgccactgattatgggtcagagcttgttgaaagggtattaatccattatttactaaaactaattaaattttcatgtcatttctttacttattgtttttattctctatcagtgtaatttattacagcaaccaattaaagaacaattttatggttctatcagtgatgccaaaaaagcatttgctcaaattcagaagtcgtgataaagccaaccaaccaacgaaacagcaatacttgtaactaaaattgggagaaaggaaaacactttcagtagagtcaaggatttttttgttaattatttttatttttagagatggtctcactatgttgcccaggctggtctcgatctcctaggctcaagcagtcctcccatctcaacctcccaaagtgttgagattacagttatgagccaccgcatccagcccacaaatattattccaaactgtaaaatcgtgaaatgttttccattagaatcagaaactagacaagaatattcatgatagctgtcaattgtcacattattttagaagttttaacaaatacagtaagacaaaaaaagtcttaagtaatgggatgaaaccaaaatgttctttgttttaaacttctgtaattataatcctagagaagctaaaatattcagtaaaaattactagcaatgaaataatttgaagagttggctagatgtaaggtaaatatatacaaattagctggtatatactagttataatttaagatggagatagaaaaaaaccccattcaaaatattaacacaactatcagatatttaagaataaatgtataagagtgatcaaatacctgtattaaaattatataatttattgaaaggaattttttgaaagtcacccataaaatgatataattttaccataaaatatcagctaaaaagggggcagtcagcaaaagctcagctgtgaattaagattattttctaacccttagttctttgataacataaataccggtagaacttggaatatttcaagtaaagtaacatgctgtgttttatctgtattcctggtaacttgcatttttcaaggaaggaagtgtatgatatgaagtaggcttataatttagtcagatgagctcttggattatgttaccttgaatataatgcagaggagaaaacaaaaagagtcttttgcatttttatttcttatcaataggtccctttttcttggaatgtcagcctgaccctgaaggtattctcctaccagcagagccttctttgatgccccgtcttcaacctgccatgttttcccatctctgaggcttctattttagagacttttcctccagaactggcttatatcatcctgtgttgctgcatccgatcacaggtctgtggctgacctgggcagcgtagtagaagggtcttgagatttggagtcgtaacgagttttcaaaactcataactatattacagtttgcgcaagtcatttaacctatctgaagcttcatttcctctcccacacaggataaaataaggataataacagccattttagagttcgtattaatatttaagtgggagaatgcagccagtaccctgagaattaaggttcattcactcagcaagtgcttactaagcatctggtttatattatgggaagttttgagaattaggtggtcagaaaggtgtggtcctcgccttcaaggagcttacattctaggaagcgaagactactgaacaagagattttagtgctaggattggagaccccagcagaagtagcaaatactgtgtgaggtttaaggaggttggaggcaccttcgcttgtacttctacatgtgtcccttcatgtctagttcactgattttttaattgaaattttaattgaagactcacatgtagttgtaagaaataatatacaatgattcctcatattcttagctcagtttcccccagtgatagcttttgcaaaacaattgtgcaatatcacagtgttgacacttacagaatctatggatcttattcagatttctcattttacctgtactcaagtgtgtatatgtgtgtctgtgtctacatatgtagttttatacagtgtcatcaaatgtgtagcttcctttatacacaactacatcaagacagtgaacagtgcatcaccacaaaattcccttgcgttgccttgcaaaccacacccaccttccttctgcgcctgcctcatccctgacccctggcaaccactaaactgttctccacttttaaaatgttgttttttcaaaattattatataagcagaatagcatagtatgtaatcttttggggactgacttttttcactcggtacaattccgtggagattcttcccagttgttgcacgtgtcggtagcttgtttaatttcattgctcagtagtattccatggtattgtacatataagtgatcgtatgtttaatcactctcccgctgaaggaaatctagtcttggctattgaaagtaatgctattataaacatttgtacacaagtgtttgtgtaaatagaagttttcttttctctgggataaatgcccatgaatgcaattggtgggttgtagggtaatgacatgattagtttgtataagaaactgtcaagctgtttccatgctattttacatttccaccagcatttggtgatctagtttcactatatcttcaccagcatttggtggtgttgcagttttttattttagccattctggtaaacatgtagtgatatttcactgtggttttaattaaattgccctgatagctaataattttaaacatattttcatttgtttgtcatctatatatcctcttcggtgaaatgtctattaatgtttttttctcattttctatttgaattgttgtattattgttgcattttgaaaattctttatatattctagttattggttctttgttggatatgtggtttgcaaatatcttctctcaatctacagcttgtcttttcatcatctttacatggacatttgcaaaataaaagtatttagttttaatgaggtccaatttatcaatttttcctttcatcaactgagcttttgttgccaaatctaataattctttgggtaaccatatatcccaaataatttctaatatttttttcctaaaagtcatatatttttgcattttgcatgtatgcccatgataaattttgagttaatttttgtataagatgtgaggttaaggtcaagtctaataaattttgcctaggaacatctcattgttttagcaccatttgctgaaaatgatcttcctccagagaatttttttacctttattcaaaatgaattgagcatgtttgtgtgggtatctttctggcttctttattccactgatctatgtgtctgtctctctgacaattatacgctgtcttcattactatagctatgtagtaagcctcatgtcaggtagagtgattcttctcactgtattcttttttattaagattattttagcttcctaagacctgtgctttttcatataaattgtacaatatggttgtctatgtctaccagaagccttgctgcagttttaatggggtttaaatctataggtctaacattaaacctatagatcaattcgggagaattgacatctttactatgttgagtcttccagtttgtggacatggtatgtaattctatttatttagtataaacccactggagtgtgtacctaagcatttcattttctttggagcgattgtaaatggcattgtgtttttaattccaacttctacatatatctagaaatatgattgagttttgtgtgttgatcttgatcctatgagcttgctgattgcatttattataaagttccaggagttttttatttttgtttgtatttgttagtttttttgagatttcttgggattttctatctagcctgtcatgtcatatgcaaatagagaattttatttcttcctttataatatgtgtgccctttttttattgccttattgtagtggctagaacttcctgtgctatgttgaacaagagtagtgagaacatccttgccttgctcctgatcttagggagggggaagttatttaccatttcaccactaaatttgatgctagctgtaaattttttgtagatgttctttatcaagttgaagtgattcttctcaattcctaaattactaagaaacttttgaaaatgataatgggtgtgtactttttatcaactgctttttgtatgccaatctatatgatcatatgattttcctttagctttttgatatggtggactatattgattttaaatattgaaccagccttgaagacctggaataaatcccacttggtcatggcatatatgtttttttatacattgttggatacagtttgctaacattttgtggatagctcaccaacttttattcagaaaacatccgtctcagtttagtgcccaacaaggaaagcatactgtttgttgggtgggttccatttttgtggttaggagaagaatatagctcccttcctagggacggtctcaaatgagtccccatcagccaccagggagctcagctttagttgcataagaaccaatgagcatttagtttcatgtctcataaataatctgcctgcttatattttcatctgtacttctctcagctggcattctgccacagactacatttaggaccgcagccagtgggttacagcaggagaccagactccaagttctggcctcacgttgcttggtatacatcactcagttctgttggcatggatgctcctcctataccccatcagccatcttgcagtatgggtttggtggatcacacagggattcagataagagggttcagatccttctatccatcaacccacccatccacatcactgaaaaagggactctcagatgccgatgaccagtaagaccacatctgtgggcacaaaagagcccatttatgttttttatgggaacctaagaaggaaatgcttttctggtcaaatacgttcttctctgattaggcctctcattttaaggcagttgagaagactcacagatgtgattcactggcaatggctctggttcaccaagcttagctctgctcagtctacctttagcagaagattaaaaatgaaaactcttcttgttagaggtagaagagatcctttcccaaaccatagattcatggaactgtcaaagagcagcactgaactttgtactcaatgccttaatttttccagttgaggataattcacactaaacaagggatttcacctctctgactcatgcatcaggaacttggagataaagccctgttaataattcataattatatagcatagcatagggcagtttcagatgcttcaactaccaggtaggtagaataaaggaatgaagttgctgtgtatacgatgataaatggtgctaaatctatgtccccaatatagggaagacaggagaaagtgccaaagatagtgtgcatgcctcatctctaaggggcagccattattgacgtccagctgaatgttgccacgtggaaattagctataaacttgccagaacctccagtttttctggagagattagattagaaattcatatatttttaaatattaaatcatccctttttcttgagatggtgtcacgtcgttgcccaggccaccgtttatgttgtccaggccaccctggaactcctggactcaagtgactttacccctttggcctcctgggtagccgggactacaggcgtgtgtcactgcatccagcttaagttatccgatttgtaaatggtggcaatgaaatcattgcgtaggccacttggagtgagccaaataaaatacatccgcagtccagattcaacctgcaggccatcattctgctgtcactggtgtagaagactttttcagcctagtttattctaggctcttttcatttctccctgatttgaggctttgtaggacgttgcacaggaattatttcccttttaaacgttagttttcattttaccagtgcaactctgctattggcacatctatgaaatacgtaaagctatcattttaatactaaagaggaaacacaaatttgactcatttccccagaaaattcccctcctgctttccatatgttatatagttaactgtaaaagtggcaccacctcttaaacagccagctattctgatcatttgaaatctggaacattctttcctacggtggttgacttttcactgcctttgaggttctttccaagtaaaggcgttattctttgtggtgtgctcctggaggtcactaacaaaacgtctccagcaggtgttgtgtggattcccccaaatccgtaggctcttatttcctagacatgaagagtatgtgcgccttctttttggttaccctggaccagacattcctcagcactggcttgcattggcaggaggtggcagagggagaggacagtaaccaataccgctccttctacatgatcagtgttcaggttgaagacaaacagggctccaattatgttgtgatttagaaggcgacagagctgagacctcaccctctgcttatgggctgcatgcctttctcagtgaaataacgcagaatgcagaggccatgcctgcagatcaggggtgctagaggataggcaagaagtaagtggccaccctatctcgtgttgagagcatgctagtctccgaacggcctgccagggtgcctgacagccagagccacctaatgggcctatttgatcctggagttgctgtaatggcaagaaaatccatggcctccagccccagtgttgaagttttgacgctaatgtgatgataattctcttttctttgactggggacttgcctttgtttatctttttttgttgttttagccatgaaatatcacatgtaaatagccgaggatatctgggctctgagtctttaaaaggcaacagaaaggtctctgttacgaagggggaactagttttcattgtcactgtattaagcagaagttgggaatcatagaagaccttgatcttaccatatcccttgttaaatttcctctaatactattgagaagtttatcctctactttttcctgtagagtaaaagatatcgattttgtttctgtcggcactgccttggaacttgcttgcatccctcccccacgcgaggcgaggccctgaggagcgggattcgctgacccatgctggcagaacgggtgatggatgaggcagagaagggtacaggctggctggaccatgcgatggggaatgcaggtggaacaggcttcctcctgaatcaggagtggaagaggagtctggggtgaagccaaggggaagacagttaagctttaaaaaaccaactgcccagccgggcgcagtgtctcatgcctgtaatcccagcactttgggacgatgaggcgggcggatcacgaggtcaagagatccagatcattctggccaacatggtgaaaccctgtctctactaaaaaatacaaaaattagctgggcgtggtggcgtgttcctgtagtctcagctactcgggaggttgaggcaggagaatcgcttgaacccgggaggcagaggttgcagtgagccgagatcacgccactgcactccagcttggcgacagagtgagtctccatctcaaagaaaaaaaaaaaaaaacaaaaacctgccctgcccagccatgcccaaacagagtggccagcagtcagcttagtgtgggcagagctcagggaattattctgcagtgcagctaacatctagcaccttctttgtgtcaggtgggccagcactggggtggaggccgagacagcttgtgagctcactccctgggagatagaacggagtacccagttgcactgagggaagagcagggatagaagtgggctccgggtctaggagacggtggaaagagaggactgctcctagcgtgagagtgtcagggaagcttgctgggggaaatacaaggaaggaagagaatgcaggcagctcaaaagagccgggcaaggagacctgcagagcgagcggaggcctggtttctgtgaagcacagggcaggaaaatccaaactcacttgagtacacgctcagggtcatgggcttgctatatttttcattcaaccgccaagaaatcttgagaggcagctttatcatctccatgtgaggaggaggagattcaggcccagcgtagtggcttgcgaaaagattccagcactaaagtttgaccccagtcctacctgacttcctttctccagctgtgagactcccctgtacaatttttctggagggtctagagtcacatgagtcacgccaagccgccctttcagtgcgaaggaatccaagcagagccctcctctgctgtgggtacttacttagggaactgtggaggtgtcctcaggtagccactggtgtgtggggtcataccaagtcatttggtttacatcgggaatgccttttgtcgttatgtctagacccctggagaacagcccacggcaatgcacttgtggaaattcggactgtggattacactgagtaacaatcctaataatacctgcacacaatcagttgcctgtccaaaaagcaataaagaacctctagattttgtggtcaccatattaatcataaattggggatcatagaaggccttaatctcattgtacatacttttctattcctcccagtaccatttaaaggttagtgaaagcaacctttagtatcatctgttttttggggggggttttttgttgttgttgtttagctgtttatgggtaggagaatgcgtgctcttttagggacatctcttcaaataagaacaggttgtaacctacactcaaaagagatgctcttggcaaggtatggcccctaaggtttgaaagcgttttccaggcctgctgtcaggccaggctggactgtccacaatttcttgtcctgcctcccgtgatgctagccatggatgcaccccagaagcatttagaatttgggagaaaaaggagcaaggcatactgcccaaatccaaaacaactttggctccctttggcctccattctaacatgctgagtggatgcatcatggatagtcttttaaaaacaagttctcatctattcaatgtcagagccctaaatggtatgaaaaataggcaacttgggtcatgccactacagatcgacacccactaaatccttttaatttagtctagtgcaacaagtatttgtgtaagtgtcctctgccctggacaccggtgaggtcaccgtgggaatggctgggcaggaacaaagccttttgtttccagctgagtttccttttctgaagattgcctgtcctagacaccagttctctgttctctgtgactctgattcctgtctcctcttctttcactctcatccattttcaatactggcccctcatttcacttcctcagctaaatctacctctcaaagatagacatggacatataaataattttttaaaatcctcttttgcaaaaaaaaaaaaaaaaagaggtgaatttagttgaaaggatatagccactcttttctgaagtgatggggatattcgatggcaattttgtgttttcttcacttggaaaaactaaaaagtttgcaacatttaaaaaaaatacaacccttatgctgatggatgtacactgtaaaacaaccacgtttggtaaactgttaatcactttcatagtgtatgtggatggagccagttaaaccagttttcatgtcttttgggtccttttgagtctgaagataaccattttttaggtcctcatgaacctctgagcatgaaccatgaaattcctattacacctgtgcttttataaacttgatccaaggtttaggctctcagtgcctgtttcctgtttaatacatatcatggttttggaaaaaatgaaagaaagaaagaagaggaagagctgtcattcctctgacaagtattttcagtggaattagggtcatgatgtcatgcttatttcaaaagatagcttcatctgtgccttcacccagacttagggttctagattcttctagattctacagcaggcactggcaagcttttgcttaagaaggcaagccgggaatggtggctcacgcctgtaatcccagcactttgggaggccgaggcaggcagatcatgaagtcaagagatggaaaccattctggccaacatggtgaaaccccatctctcctaaaaatacaaaaattagctgggcatggtggcgtgtgcctgtagttccagctactcgggaggccgaggcaggagaatcacttgaaccagggaggaagaggttgcagtgagctgagatcacgccattgcactccagcctggcgacagagggagactctgtttcaacaacaacaacaaaaaaggtgggggggtgggcagagagtaaaatattttagactttgaagtctaagagacaaaattgaggttattatgtaggtattcatatagcatttaaaatgtaatcattttaaaatgtagaaatcacttttagatcgtagaccataaaaaaacagcaggaaaaactacatggttggctggatttggccaagttgacatagagagccaatccctcatctccagcagggcttttactcaatgatacagtgcgcatgaattgcttgggggattgtgtacaaagtgcagatttggttataggaggtcagggaggggcctcaattctacattcctaagaagctcctaacaggctgataatccatggatcgcattttgaatagaaaggattatgcaaaaagccagagtttttttttcccttgtcttataccagtggtgcctagcatggtgtcaggtttatagaggactaatacatataagaaggagaaagggagggaggaggaattccagttgttttttttttaatctaggtacaagtctctctgttgatttctaaacatcgaatgaagatgaaggaaatacttaaagcacctaagcactcataactcacttagtcatttcactattaaaagagaaaaatagttagtttacaatttccaggaaatcagacaggtcaccaccacctcttcaacgactggaatttgcacagtctcactactcataggcccatctgttactactaacagtgctaatgtgattgtctgtaggtctagcaattggaggttgttcgtttctttgagacaaggtctcactctgttgcccaggctggagtgcagtggtacaatttcagctcactgcaacctttgcatcctgggctcaagcaatcctcccacgtcaacctccagaatagctaagacccaggtgcgcaccaacacacttggctaatttttgtgcattttgtagagatggggttttgccatgctgctcaagctattctcgaactcctgacctcaagtgattcacccgcctcagcctcccaaagtgctgggataacaggcgtgagccaccgctcccagcaacaattgcagtttttaaaggcagaaaatattacacaggtgggttcaaatttgccacaccaagtagaaggtgttggaaggaaaattaggaattcttaagcttcagaagattagtagtcagagttaaaaaccagacaattaacaagttaaaaaaaaattgtgaagcacacacagctgttatcttccagaaacactgcttacagaggtaattgctcacagattttagggtttacagcaggtatcacaggatttcaaatttaagaggggggtgggggcctgtgttcaaagtcttaagaatatccaagggatgtatgatgtatgcataattacctgaaattgaaactactgtagtttaaacacttgctgaaagaagaccttttatttcatcttctctacaggctgaaggaaagaaaaaacaaaactaacaactaacagaaaaacttttcatgtcgaatatgtagatttacaatatgtgaattatcatcagaagaatgaggttctttgatgattgttgcagataccctgaagaactggcccttgttgtagaagaatggcacagggcacatggtaaaatggccctggccattcctttagacattttgtttgtacttatattaacttgagagaaagtattaggaaaaacagagtaattctgtagaaatattcctgatgatacactaggcaaagcagggagaagagaaaaagtgagcaagaaattgtgactatgaattccaaaccagtttggctggatgagccaaaaagacaaaacaagagcattcaagagtctgtcaggaagtggtggcctttagttcattttagtagcaagaaaactgatctttttctgattttaagaactataccatctctattctgggcttcactcttagctctcacagttagaaaacagtgagccttggtcaagtctcataaactgtgtctcagttttttcatttatacaatggccaaaaaaaaaaaaaagaaagaaaccacaaaaccataccttctttgcagggttgtgtaaaggaaggttgaactagaataggttgaagtcaatcacatctctaaggcatttggcatgtagtggaacctcagtaatcagtagtttttattatttggtgcacgatgaaactggctatctggagatgttttaaaatacaggttttattattatttaggtatgctaagaccagcagatcaggagacaatgaccactgaaaagacagtttgtgagagttgtgatgattgtgatctgtgtcctttacagtttgcaagggaaggggacatgctatgtcagagtggagggacatggggaggcaccaggactggtcaagaggcagagggagagggtcaaaccgtgggttctgtggggaggactgaacgaggcagggtaagtagactagggtttgagtaagttcagcaggctctggggaagaggggctgtccctatttttctggtacctggccctgggtgattagaaagggtggatggtggcctggggcatgagaaataaaggaggtggtggggtgtaagttctggattggttgggttgcattcaaaaggggtgcccccaagtgagttgtttgctgcctctaggaatttattgaccctgggaggggagatcccagatgtcaaagcatgggaggacagaaaagaaacagcatggttcccacaagagagaagtagacagagacctctggaagtttaaaaatatatatgttgggatttcatagatgaggtgagcaaaaaattggccgggaagaactattaaggaggagatgatcagaaacattttcaaaatacctggaacaaacaaagaaccacatttcaagaaaaagacagagaaacaagactagcaaatagagttttcaggtggaaaaatcacacgttggacaggagactgaaggtaagggaaaccaagtcaggctttaacaccattctgaattgcagctgcaggatcacttgctttagatggaatcacccagcggatggcgtttaactctgctttaaaccccttcatggcttcccaccacacttacaaatacaactccttatcctgtcagcaggggcttgcttaatctgaccctttccacatatgctggatcacttcacgcctccctgttctttcaattccttgaacacaccaagttcctgcattcccgcctcagggccttcaccttcagcctctctgtccccacctgctatcctccccagctttgcacacctgattgctttttgtaagtcagatctcagattaattgtcgcctttacagacagatttttcttaactctccagtctaaagaagccacctcctccagttctcagcactgtgcttctcactctcgtttattttgttgtttattcatttgcttgtcatctgtattttcccactagaactcaagtttgtgacaacaaggacctaggtcattttcactgctgtagtcccagttcctacaacagtgcccaggacacaccaggaacgtgacatttattgaatagatgaaagaacagtgtaaaaaccacattgctcttcactctgcctgcagccaactcaagaacaatttcctaaagcagctctgaaaattacgaaagaaatagtgcatggattccagccccagtaggcttctgggcttggtgtttctttaatttcatgtaaatttctctaagtaaatatgccttaaaagtgaataaaattttatttcgctttaacaagagaatataaaagttaaaaaggtcactgtagtaatagactaatctcaattaccagggcagcctctgaaaccctcactcccacctaatctcattcggtgcatacgcagctcaccgtgtgatttccaacacagctaaatgaaattataaagcagtgttaaatttattaatcatttaattagctaaatgttcctgcaagtactggctagatgaatggcatgtcattttctaatgcaatttgcctctcaggcagccagggtcagaaagggaagctcctggcatctcgaatgagctctttatatcacaccttctactgggagacggttgttataccactgattatatttgagacttgtacacaagaccagggcactcagatgctggaattggaaaatgctctctttcttacctgggttacaaagaggaggctcagggtagctgatgagtcccccagagattgtctctccccgtgtccccttgcaggacaaatcttttcatatttaacaagccactgagcagaacagggggaaagatagcaggcagtattaaacgcatgctcaatctagttttatttcttcaaatttactcagtcgagaaaaatttgtggagtgcgaattctcctcatgctaggtgactttctaatccttctagttgagtcaggatttatttctccattctcgccttctagcctgggcttgtcagcttggggtgtatgccgcacctcctctttgaagaggatcttcatttggaggggtgatctgactcccaaccctccccaggtgaaagcaccgggattcatacctagggggctttgggatttggggctgactttgacccgtcattatttctgactgcaaaattcctgacaaatgtctgctgctgggtgctctgtgaatctgttcccatttgcagtgagagtgctggcatcaagcacattgtctaaattcactcggcaagaagccgttggagtgggtgccacgtgaggccgagaacatccaaatgaacactggtctgtttgttcaagatgggagctgtcagttgtgagagctcctatgggaagagtgttttgatgtatagacatccctggtccacagagccaccaagcaaggcagactatttcgtgagaaagaaggaagatagactccatgcaacacagtgggtgtggcaccaagcgggaggtggagggttgctacctagtcccggctccacctactgtcacctgcattcccctagacaaatcacagcacctcaggatccttgatctcatcatctgtaaaacagagatcagatgaaccctcgatattaatatcaataagagccgatcataggactgctctaaggattaaatacaatgatgtaacctacttgaaagtgtcatataaattctgaggtgaagtggaggcattatggatgcattttattttgttttattttatttcatttattctttttttgaagaggtatgggtcaagcagatctgcagcccacactcggctcactgatcacgtcccatacaatcttggcagatacttagctgaattccatcgatttagtgataaaatgggaacagtagtaatggtgcagattagagaaaaaaatgtgatttgtgcattcatatgtctgtgtgtacatatatgtatatgttctgtgtatatgtagacatgtatagatgcatgtgtgtacgtatacacgcacacatacataaattgtgtacatacacatatacatatacacatacaatacatatattctgatacacatatgtacatatatgtgtatacatgctatatataatgtagcacgtttcctggcaccttgtttggttcaataatgttgctgggattatactacaatttccattactctgactatggcaacactgctgatataggagatcacttttccgcacaaacacctctaggtattgtttaacacagacctcatgaaataggtttgccatggattagataaggcaattctggactcacttccaggatagaaggcaaagacaagtaccaatatatttggtaaaaatatgacatgacatttgagtgcacacaggcaagtgaaggtggtttcaaatcctccctctgtcttttcccagctaaatgaccttgtgctggctcctcacctcctaagcctcagcttatctctaggatggacgtcattgtactcccttcatcccacctaaggttgttgttaaggatgaaatgaaaagtccacagcataagcttgacacataaaataagcacccgatgaatactgactaaagagagaggaggagtaggggagagaaggagagaagagaggaaatgaaaatgtttctgaataagttatgtctaagttttttcactttttattttttattgttttcaggacagggtcttgttccattgcccaggctggagtgcagtggcgtgatcttggctcactgtagctgctgtctcccggattcaagcgattcccctgcctcagcttcccgagtagctgggattacacccaccaccatgcccggctagtttttgtatttttagtagagatggggtttcaccatgttggccaggctggtctcaaactcgtgacctcaagcaatccacccgccttggcctgccaaagtgctgggattacagacatgagccacctcacgtggttgagattttttcactttaagaaatgctttttctgtcacctccctggactgtcttggatttgtttctttgaggggaaatatgaggctttaattttccctcccaggccttggaaaggccaagagaagcctggagataggaatccacctacacagagtgtctcagtaaattggcagtggccaggaccagaaccaggacacctgtctcccagatctgtccttttcttggatagcttgaagttacgggtagttattgaattggtcactggctaccccctgaatcattacctgattttttactgagtgttcctacctgtgagtaaagggtgcctggttttgcacaagtgttttcttggcccaagagatatttttatatttgcctttgggttgatgagatgctggtatgtatcattcgttcagccattctttcagtaagtcatcacggaagtctgcctctgtgacagattctggggctctaaggcggaatttacttcttcaaagtacagtttcctgccttgcaagtttggagttaaggccacgcagaccagagttacgtgcacaggttgtaatactctctcttgtccctggttgcctgattcaagttaggggcttcttctggattccgtaggtaggatgctgactctcagctgtcctgatgccactggtgttcctctagtaggcaacattgatggtaaacatagaaagtcatggaaggcctcagttacctctagccctgaagacacagggatacccttggggcggagaccttagggacaggacaataaagatcaggccttgggagatgcaaacagtttgcccttggaccatgtcttctgctttcatccttatgctctcaacagatcatgccaaggtcctgtgttcaccgccttcctgagtccccattcagaggctcaagaattgagacaaaagggcatcctgcaaatttgctgccctggaagctgtgctgggggagccagtagagacttcaggtggatctggaggtccttccccaaccttctgcaaaccatgtcttcccagagagcttctaagccaaagcaaaggtgttgctctctgcctcctgttgctctgtaattcatctcagcaaccatctttcccatctctgggaagagaatgttgtcccccagaaaaagtccttatggatagatttagttattgcttatggtttagagaaagcgcctttcaacagtcacatgcaagtattctttcaggcatttatccaaacacacaggatgaggcctctttgtcaaaccagtgtttgttgacaagcgacatttgtgtgcaggagatggctcattgtgtgtgtttacttggagctgttatatatgctgggggagacactgtgtatacaaacctaggagggagagattgggaggagggaagaaagtgaggaataggcttagtgagaaagagaccagagaaagagaaaagaaataaacattagcagggtggttaaacatccaagcattgaaaactgcgtggtggagctatgtactaactggggggtcttgaggaagcccattagtctccctgagcctcagtttagtagaagtaggaatcgtcattaaggcgcctaatttatgaagttactctgagctctataagagataagcatacagaaaactttggacagtgccttgcacacagtcagtaatcaatgcatattcatcatgatgttagagaaaggccgggcatggtggctcacacctgtaatcccagcactttgggaggccgaagggggtggatcacctgaagccaggagttcaagactagcctgcccaaaatggagaaacgccatctctactaaacatacaaaattagcctggcatagtggtgcatgcctgtaatcccagccacttttgaggctgaggcaggagaatcactggaactgggaggcggaggttgcagtgagctgagatcgtgccattgcactctggcctgggcaacgagcaaaactccacctcaaaaaaaaaaaaaaaaaaaaaagagagagagaataaggtcagagggggaaaagagagaaagtgaaagcaacagtaaggaagagaattggaaaaaaaaaaaaaggaactgatctggctgtatctgtcgagttgcttctgccgtttctagcccagcccacggttttccctctgcagggtgtctgtgggcatggtttgcaaataaacagtgagaagtataagctaaacatagactttaggcatatacataataggcaggcgtgatcgcgttcacccattcagtttgccatataaaagcttttcctcggtgccactttatggcccagaaacaaggctacaaaaactttaatactgctttttattttatagaaaaatataaatcaatactttcatgtctgtttgacgtgtttgggagctacagcaattgaggcttgccagtgtctggatgccccaccactaccacgccacttagctcagagtttgtttttttccttccaccatgtgaaatgttgctggttaaccagttaaaacggggagatggccatgattgcttttagattgccacttccacattgagtgaattttataataagaagccattttttccccgacaggctgcccttgtgcccgcctctctgactttgaggtcctcattattgtgggtttaaatgaaggatgttcattcaggcagggatggggggatggggggaggccaccaggcatcagcgctgttatcaggaccttctatcaggccaagtgacaggcgtccagagcaagaatgcagagctcatggtggagacctccggctgacaccaaaggtgactcccctcactctaaccttgaaagggaaagttcccactttattaaaatgaatttcgaaagggccgctctgacagctgcataattaaatactggagtgtcagcgataatttattccactcgcatgtggtggtcagatccttttcactagagggtcagcaaactcagtgacagaggcaaggagacaagggattcagggccctttgtcatttatgtagcaccagccctgaaatcggagactcataaaacctacaaatacacacacaaacacaaaccaggcaaacccacacaccacagagaagaggcaaagtgtgcataaagataccctgttgttattcacccagtacaactctctaattcatgtataaacagtaagtgtaaaatgttccacacccttatgtatagacttttaacctctatttgagggtctctgggaggaccatagttgtttctgaagtatcacttatcctacgttccatgtaagatctctttcctagggtaaacttgatatggaaggtcttcacagattaaaacgaaggaaaaaaaaaaaaaaaactagataaatctccctggacatgaacttttgtagaagtagttacaatgctagtgacctcatatactcatggtaacggcttccggcatccaatgaccttgccattgcggaggtcaatttcatgtgtgtgtgcacacatgggtgcgtatatgttacagagggaaacttgcctgtttgaagcaggtgtcgtggaaacaacatgggctttagagccagacatggaatcctttcttatgattaatgcagctaaatttcccactgcagccggtagcatattgcttcataaatgtctataaaaaaatacgaaaaatagaatcagagcaaattcagcatagacctccttgggatgtttattctttgtttatgttggtgttttgttttgtgttgtttcagctggggtgcagttgtattctgttccctctttgctagttcagaggcagtgaaagcgtgcttctcaggactcattgtccagaagattctgcctacagctggttttacgcagagaagtagcacacaaacccagtccatgatttcttatttgactctgtcctgtttactctgtcagggtgaaaagcacaggccaagctcggctagtcaaagcattactttgtcacaggcaggcttggcttctccgagtcagcctgaacaaattacatccctcactcggtcgccgaaccgggaacagggttataactcagtctaagcacccgtccctcttctattaccttcataaccaaggtcatactaatcaactcaattaccagccctctcagacattttcataatgttttctggtagttgctctcctgtgaaaatctttcggtctaagcaaattaatgtcattttcataactatctgcatttcaggtacagtgatctcctttaaaaaggctgcgtcccagcagcatagaccagctttacctcccagcgtagtcttcagacaagttggggtattgccgaagtccattcttgactttttttaatagtgcaaacaaatcatcttgtttttaggaaaacatgaaattataaagaaattgacttcaatcacttctggaggcagagcactgagttgcctccccacctcattcccctcactcccaactcagcaacctgggtgtttcagccagggcttttccaggccttaatttctctgacacaggaggatggaattacattatttccaccacaaagattgtgttttaaatccttcttagtttgcagcttttcttcccttttgcctcctctttagttcattccaatgataaatcctccctcctttgtcacagagccactgtgtactttcatagaccatcctatttttcaacgagagttcagaaccacaccatacgggcagtagtccgcattttcaacatttcctaacagcacaattgttaggtagctaacaattgaattgactatgtcaggtagacttatttttcgagttgtgctggttaactgcaatccaagtttaggaagcaaactaccaatttcatttaatagaatgagctaaccaaggcacatggtgactactgtccctcaagaccgctgaactaccacttccagcacctgctcagattattcattacaatgaagctctttaacactgtgtttgcattctttagtatatatcttgttaatagtaggccctgaataaagaccagttgaacaaataaactatttttccatgtattaattctttagtgaacttgcttatttgttcagaagagacattaagctaagtatacaacactcggtaaatttcaacttcatcatatatataataattatttttttttgagacagagccttgctgtgtcatccaggctggagtgcatggcctgatctctactctctgcaacctccacctcccaggttcaaacaattctcatgcgtcagcctcctgagtagctgtgattacaggtgtgtgctaccacggccggctaatttttttgtattttattagagacggggttttgccatgttggccaagctgatctggaactcatgtgctcgagcaatccacccacctcggcctcccaaaatgctgggataacaggcatgaaccaccatgcccggccatcagaaatattttatttcactattttaaaaaattagcaaagaagcaaatatgacaaaatgctaacaattccaaaatgctaataacttctgagtggtgagtataagtgtgattattatattattcttagtatttggtttttttctgtagtgtgtagtttccctccatgacactgagggctcagatggctctgaccttggagacagggagacatttagtgaaggaatgggaggtaaggagctggcatctctggtgtgtccatcatgcactgacctgcactagatgttttgcttccagagtctcctggaatgctccatggcctccacgcatcgtaattcccatcagcttaaggcagcgaagcgaatgcccacagtgcccaagtcacttgcccaaggttatccaagtcaaataagacagagatgagattcaaattcaggccacaatgacttcaaaaacccttgtatccttgttttgtttcgtttccctgcaaacattgttttagttgagatgaaattcacgtaatatacagttaaccattttaaagtgtacacttcagtggcatttagtgaactcagtgttatgccaccgtcacctctttttagtttcaaaactttgtcatcaccccagaaaagcatacacataaagtcatcactgccccattcccttcttccaacttctctgcttttggtctctgtggatttgcctattctgggtataccacataaaaggaatcaaagaatatgtgaccttttgtgtctagctccgttcacttagcatgctgtttccaaggcttgtctaagttgtggcatgtgtcagtactttattcttttttatggctgcatagtattccactgcatggatataccacatcttgtttatctgttcatccattgatggacatttgggttgtttccgccttctaggtataatgacttgtgttgccataaacatttgtatacaagtttctgtgtggacatgttctcacttttcttgggtatatacttaggggtggaattgctgggtcatatgatcagtctaggtttaactttttgatgaactgacaaactgctatccacagtggctgcctgtaccattttacagaaaatctctgcttttaatacttctggatgtgttctaaggcactaggcttttcattaagttcatttctgcagaaagagttaaggagtgttctcaggtaactataatcaacccccagggacttactcaagttgtgcatgtgcaactgaaatatctggcaggcatccagtccctgttatttcagtctctccccgcctccctgcccacacctctgaagctccatattacccaggaagggacaatggggggcctagaaatgtggagggaggcaagagagtgataattatgccatctacacttgtcgactagaatttccaggtactttcacctctaggctcttacctggcttttgtgaagcccctcagggaagaggaggaaagctgggcaagggggaggggtaaaccaagtcccaggaaagtcattccagtttcccaagatcccggagcttgtttgtatccagctgagatccagttgagaccagaattcactctctccacacctccatcagctgtggcctcgagttccttaacattttttaaaacaaaaaacttttgcatgggaaaaatccctttagaaagttaaaggttttccttatacaaactatctcactttgaaaactggcccactgtaaaaatcttgattccggagcttccttaaaaatcttttcacccctttaaagtgaaagttatggagaatctattagatacaaattaatacgggcaaggcgtgtgctagctgttttataaacatgatcccacttaatcctccacttcacaattctgaaaagtcaacaaatttggcccatggtagagaggaggaaaccaagacttgaaacattaaataacatgtccaaagtctcccatttcagagacaggggcatttggctccaggtttttctgactctagacagtagtttgtttttagcacatcaaatgtctgagacttgtgatgtgttagaaagcacaaaggactttgatcacaagatcaagccccagagggccatgactgcataaaccacaacaactgcgtggctgcctgtcacgtcttcatctgcaagttggaggaacttggagaaatgcagtgcttccctgcagctgcagagggtctcactgagcactattcttggaattcttaaaagctgggcctgtaagccttttttgcatttcctttcagccacctcctggctgtccttttaaagccagggtaaagtccccagcacccagaatcaaggatggggaagaggaattttgagaatgtgcttcctgcttcacacaaatagctaaagacagaaatgatggcacaagccctaaccaacaactaggaaggtaggttgtccaagacaaattgcagtttagaatggacctgccaaatgggtgggtgggcaggatggctgggatcgccagtgcccaaccttgccacagcctccttttgtcactctagggactacccttttcctccccagacgtttttcctgactctaaatagtgggaaaagtctggtttgagattgctgtattgcagggaagttcttacagcgggcttgatgggcccagaaatcaagatggaaaaaaacaaccctctatgttgatggccatgcacagtggctcagcagaactggctctgttgaccaggcttgggtgctctcctgcagggcattgcaatctttaggacaccttcattacccctcctaaaaggagattttataatgagcgccaaccagctcaaacaagttaggatctcctaacatgtctggtgaaaatacaggagtatttttcatcatctctggaaaagttgctatcatgtccttcaataacccagtctaaccatgtttttccagtggaaatgattcccggtagaatgtcctatgttccttttgcacatttctccttacaaacatcatctcatttaatcctcaccacaaaactgatagtgtcatctccaatttatagttgaggaaatagaggatcagagaagctacgtgatctatgcaaggtcccccagctaggaagtagcaaagatggaatttgacccaggtctgactccagaagcactttcctcttttgcctcctaatacattttcttatagggagcatcctgcaatacaactgttaagaccacttaatgttatctttggattaaaaatggtaccactctcataaatcaatgagtttcataccctaaattatgccagattaagaaaatgaaatctgactgtaaattacttctctaggagcaaatgattgcttgattctattgtagaaaataaaaattttttacttaaaccacacaaattaaaaaatggaactcactttcacagtcaagagttacttctatttttttttacagtaaatgcgctctttaagatgttgcaagctcaattcatgatttttttttctttttctgtatgtttctaaatttagaagttacatttacaaggaggtaatttgcaaggtcatccttttttaaagaaatttaagcaggagatgaggtctttccaggtttgagggtgatagctcgtgattcttcatcaactttggccaaaccttcgtggattcctgtgtgctgattattagtgccttgcctacaaatttttaatacattgacttatctaaatattcctgcatgcacactccccaatctaagaaaaatgtgagatgttgggaaatgtttccaagaatagaccaaaggattagtcagcctagagaagtgaactttaagaggaactatgtttattcagtggtgattatttgctgacccagtgctaggcacgtgagagtgagagggatggaatgcttgcaggagttgccttggatatcacacactgacttgggagacacacatagcgacagataattacaacatagggacacccggggaaaatgtagacgaggtttaggggttgctcagaggaggaattaactctataaggaagtattctgataatggctttcaattataggacatatctaataacatgattacatactctcttaatagtgtagcactatagttgttatttatttcccacactgaacaaatataattatcatatacaccctttccattattagctctctccatttttaatgaaaacagtggttggtggtttataagaagttttttgtcggtgtcatctttcacatcagtttgctacccagaatttaaacattccttttttgctgctgttttaatttgaaataagaatggtagcccccaggtcccctaacagtgggtgctgatttcacagtgggcttacaaatgctcttcaagagtatctcagtgttgagtccagccacccaagggagactggttcttcactgtgcatcatggccttttaatgccattttgcttttttatcatccaatcagcagatgttctttcttcattcacgttgaaagcacttcgctatggaaacgagtaaagttcattgtcttattttttgtttgttttgttttctgatgtcctgacagcagaatcaatcttcggaatccttttcaataaaaaaaaaaattaccaaaacaaatatgatcacagaagcttttaaaatctgaaatcccaggaagctaattagtgcatccttttaagatggcttcctgcatttcgatatacgcataagcttgggtttcagatgcagttggcagtttgccatgagtcagacaggtcatcctgactctcaggaacacggagctcctgcagaagcctgtggagcgagggcaagttgggatcctcccctgtgttagcacgtgactgtcctctgtcaccatgtagcaggtggaggccaggaactacattttcttgggttcctggtggttagttgtacgccccatgaacttctctcatttccttaattatatccaaaataatgcccttgttttatttccccacttggcactgagccttagggagcaggaactgtgtatatcccacagctttgcatggcacttggcacgtaggaatgtattaaatgcagctgctttcgtgcaggaagcgcggacttcagatttggtcaaagatccatgatttcagagcaggcagcccttttaaacctgtatctgagtcacttcaatgccttgtgtttctgctctgggctgcaaactcaagagcagcaaccacttatcttggtacctgtagtcccgagccctgtgtctggctcagagtaggccctacataaatgtttgctcctcctcactgagtggctgcatgaattgcatccagcatgtctactctgggaaagaacctgtggagcctctttaggagtgtgtttttgccctccctcggaatctggtgatctcactaccaatggcaaagacaaactgtgaggtgtttttttgtttgtgtgcacgcgcacgtatgtgtgtgtgtaaaaaggccatggaaatataaaattgtaacctaaatgccttcacggccagttatggtggctcacgcctgtaattccagcactctgggaggccaagatgagaggatcacttgagcctagaagtttgagaccagtcagggcaatatagactacctgcaaaaagaaaaaaaaaaaaatgccaggtgtagtggtgtgcgcctgtagtcccagctactcagggggctgaggcaggaagattgcttgagcctgggacgtcaaggctgcagtgaaccatgatggtgccactgcactccaggctgtgtgacagagcaagaccccatctctaaataagtaaataaatgcctctgtgaatccatttcattgcattggaaagacctccaggattctctgcagaagaatctttcccaacataaaatccattgttaatcacatttgacacacatgtgtgcccatgtctctgggcctgtgtccataggcatctacgtcactgcagagtgaaccctttcggttcacatcacctgctcccctcctgggcctcctgaggggtgtgagagtggcacattccacaggaagggaaccctgcatgtccatgtgccatgtgccatgtgccatcttagagacgtaaaaacactttgtatgtttggggtacaactcagtaacccattggtgcagatatgtgattcttaggatggcccacatgggtctctttcacacacccacgtgcatgacccaagtgagcaaacaggcagagactgggaccagaagctcactgtggttctaagcaagcagttgaactggtggcttctgatggcctgagaagcagtttcccttgataagtcttcagccacacaaaaagagactgtagctcacaacactcacagtcaaagccactggaaataactatttcctatcaaataaagcctttctcttgaaaaatttgaagaaaaaaaaaaaacccacctagtgaaaccttagaatcaacctgaaggttcaacagcaggtgaatgattccataaatcatagtatattcacttaatggaatactaggtagccactaaaataaaatgacagttggaaaaaatacttatgataaaaggtttaatgacaaagtggggttcaaaatgagagatactctctgactagaactatattaaaagaaagatggatgggggagaggacggtgggtgatatattatctacatagatactttttttcacttttcaaagtgtttaatgtgttgcacagcctttagaatttgaaaatgtctaacttaaaatgcctccctagtgaaatctgtggcagcttataaactggcaggatactgtattttcaagatacgcaattgtaagtggtgctcacatacagtcagaatgtttatttgaccttgatcttgtgagggcttggttcccatggctttgtagagtgaaaggtcctgagaggcaggttagtgacgataccgggacacgtattgtagacaggttgataaagcaagcttccctcagcccagttttcagtggcaaatgcctcttggccaccaatgctgtacactttgtttctgtttccttacctgtcaggcagttactgaaaaattatcttttcccccaaatacaataattagtgccttggccagacaagttacagcaaatccttcaagattaagaagggactagccgggtgtggtggctcacgcctgtaatcccagctctttgggaggctgaggcaggtggatcacctgaggtcaggagtttgagattagcttgaccaacatagtgaaaccccgtctctactaaaaatacaaaaattagccaggcgtggtggcgcatgcctataatcccagctactctgggcctgaggcaggaaaatcacttgaacctgggagacagaggtttcagtgagccgagatcgcaccattgcactccagcctgggcaacaagagtgaaactccatctcaaaaacaaaaattaagagggactgatgtccagtgaatttctatgtccgccctaagcactgaggtgaaatgaagcctagatggttcttttagaatatgagtgagcagtactcatggttaattttagaagctaataagtatatatttgataactttaacagaaatattaatactaattaagagtaaaaagatgatgaataaagtagcttcacttattgagcctttactagatgccatcttgcataaatggttgtcattttgcaaaatgtattccatctaatattagcagtaaccctgaggacttggtattcttacctggatgtgtcttatatcaacatgcacgcgttctctccctcagcataccgtgtcttattaacttctaacctccctctcattatcccaccaatctctgccagtacaaccacatcaactgtgcagatcacttctctagtgtttgggatttggggcaacctactgggtctagctatgaccccataaaagttgaacaactctgccttaatggcgctaatttttaatatgcctcattctagttgcttgaattgaacgaaggcatttgaaaattgctgaagtgcttctcagtgatgaaatgttacagatcagtttgaaatccaactttattcaacataagaaagcctatatactctggagcttaaagactgaccttttcacttactgtaaggtatctaagacttctgggtgtgggttttaaatatattttggatgagctttgttcatgtttacacatggccaccaggtcggccacaaagctgtggctctggtcagtctgactctctttagcaggaatcacgtgacaatctgtgtctgtgattagctccgtggatattactaggtagatttctcacttgtccttgttttgatcttcattcctgggtgaaagaatcccagggagtggaaaatgtaggtagttcatagggctcctgaccttccatggactgtgtctaactcagctgtgatgaggacgtgctctgattctgatgaaggatgttagcattagaggcaggcctgtgtgcctgttctgtgtcctggcaccgatgtttaacaaaaaagatcctttcagagttactcatacgacttacacattcccatgggagctccaactctgtttggtcccaatgtgccctttttgtctcactccttcctcccacacatcctgctccccactcccctaattactcatgattgcactaacagccacatcctttcacacctctgagcttttggtcatgctgtaatctctacctgagttccattcctgcctccacccttgcctgtcaaattccttagcttcatgcctttgaattttagcagaaatgttacctgctctatgaaactggattttccctttgtctccattccctaagctgcacattagagcagctgttacagtttgaagtgacccctatatggattgtttgcacacctgtgttgcaaatgtattagttaggataggctgagctacagtaagaaatagcccccaaaatgcattatagctgaaacccccaaagggggatttctaacacagaaagcaacataagtgggtagtcctggccaatggcagctacgttccacaaagtgactcagggatccaggctgcagccacttagtggttccattctccctgctgatatctgcatccagtcatctggtatttcttaccagccttaacctcattctattggtaagcactagtcacatggctatctcccactgaaaagtaggatgtcaaatatcctctagccctttgctcaggaagaagagcaaatggatttttgttaagaagctggcagtctgtcacaggagctacttgaggatacacacagttttctccccattagcatctgcagtctctggtataaacttgagtcttctctttggtccctgataaatatacatagaatgtatggatgtgagaaagttaaactgatgtctgtgtgtcttcatgtcattaaactttgaatctatggacatgtctttttctttctggcatagtttggaggtcttcattttatgatagaatacaaaacaccgagggctttaaggaggcatagtggtatgttcagctgtattttctcataatatagagtcataggaaacctgagccttggcatttgtaaggcaaaaagacccctggaaaagagtaatatagtaattcatctttatttgaaaagtatatcatcatccatttatttccccactggcataatccaggccgactttggctccccttcctgtgaaatgcaccctttccctctcatcagtttccacccctcctgctgaaaatggagtacaatgaatagatgtataataaaatcttttaattgtcttagcatatgttgcttttattaggtgggcataattgcattcatgggatcacctacaaagtcctttcgaatataaaattgaaatggcttcacactcagtgcacaagtccttctgaggcactgttttccccttcgctgcctccggttccccttttgctgtgaagttcacattgaagtgtgaaaagagagacgtggcaactgacacatgctggatcttatcagccgcgagtgccgttgtggccgactgaaaagcgactgtcatttctacaccatttattcctcgcctggcctcattgctcgcttcgtttcggaggaaattttccctgttaaagtactgtacttgtcatttatttcccttttttccactctccctccgtggctgggtttggatatgcatttatccaaaaggcaaggcttttacacacttccgctaacctcttatggtcaggctcataaaagcaacccaacaaagcttttatggggtcattacagatccctcaaatccctctccttccagctttcaataattctcttgtctctaatcaattcaccggctcttttatttgaaaatgggtgatggagtgggggaaaaaagtgggagcatcagctgaaaacccactttatttggactaaggtttctcaatgtgtgttcagttctggctcatgcttggcacttacatttgagccatattcagtagtcccagccttacttattcttttacaaaaagggtcagcagactttctgaaaagggacagatagtaaatattttaggctttgtggaccatagggcctgtgtcaaaagtactaaatgttaccattttccttactttgttcaggctgctataacagataccataaactaggtagcttataaataacagaaatgtaattcttaaagttctggagcctgggaagtccaagagcaaagcaacggcagattcagcttctgttgagggctcgttccctggctcatagatgatgacttcttgctgtgtcaacttagtgggaggggataaagcagctctctggggcttcttttagaaaggcacaaatccactcttgtgatctaatcacctttcaaaggccctatcttctaatattatcacattggagattccttttcaacgcttgaattttttgaggatgcaaaccttcagaccatagcactatcatagtgcaaaacaaccatggacaatacacaaatgaacaagtgactatttgctaatagttttatttacaaaaaacaaaaaacagtgggcaggatttgacccatgggctgcagtttgctgatccctgttttattaattagttaatattattgattgagatagggtctcactgtgtcacccaggctggagtgcagtggtgcggtcacagctcactacagcttcaacctcctgggatcaagcagtcttcttgccttagccacccgagtagctggatgacaggtgagcaccaccatgcctggctaattttctaaattttttgtagagacaaggtctcactgtgttgtccaggctggtctcaaactcctgagctcaagtgatcctcccgcctcgacctctcaaagtgctagaattacagttgagagccaccacacccagcctgattcctgttttacatattaaaaatttcatctctccaatcttcgaagaatccgtagtccatttttaagtagctcttgtcttccaaaggtatgggatgtgcctacctaatgctcttcctggatgggagaatattaccaaaaacgtttggtcgactaattttatgacagtttccaactacaatttttttcctctttgctttcttttgaataatagaaacaattttttttgtttaatatatcttgaagtacttcacttaagaaataacttcatggtggcacagagagctgtttagttagaagactgagtattatatttcccattgactatgcaggaccttctagggaaatgtgagtttatcatactcctgcaaggtaaatgcagcagtgagaagaatcagtctactgtgctaaacctggccctgcctcagcaatattctgtgagcctggaggtcaagagttaggggaccaaggtcctgctaaggacacatgggggaactaccagaaactcatcatctcatttaaactcacaaaacctggaagggacataattaaaagtcctgtcttccaaaagtgtagcattaaactcagagatgtaaaacaacgtgtctaaatgccaggtaagcaatgcttacttgacttggaccagggtggtgaatgaacataaaaaccgattacaacatttttccatttttatgtttcctctgaaaccagccatgagaggtactcttagcaaatcacgccttattcctaggcagacttcttgggtacactttccaccctccccagcagtaatgcctgaccaactaatggaatcctaactaatgcagtatgtgacgcctggcagctccagtccgaaccaagggaaaacctgcaaacatgcaatccttcatgcttttgtttttgtttttccttcagcctagctaaaatgaaggcaacattcagaatgatgttagaatctaggtgtggaaagcaatgtagcttctggctggttccttgagtgaccatgtggagcagagcttcccttccattgtatttgagccactggaaatctattacctgatctttctttaccagatccttctttagttgggtatggccaggctcagtgaatccagtagatgtttgaatgggaaaggactgaaagatctcaaccttgaatcccttaactccttgggatgtgtaatggagatgtataagctgtttttaaacatttcagcagctgtcatggaacttaaccaaatgagtctaagtaccctatgaacacatttgatttaggttggaattacagcatagatgtgaagtgacttgtccaaggacacacaggtgatgaagtttacatacaagacttaagtccatgttactggattcctagaccaggttttttttttccccttatcccatagaagatggttgttgtcttgaggtttccactgagttgctttttgagagattctattgtgcacttttgcccagttcaacaagaaagaatctttgctatgttagaagagactctggggaatccagagtcttggtcacgggtacatcaaaacgacgctggtgcctaacttctagttccagacaaagaaggagagagagagagatcagtaatttataggctgacattttccttgggtccttataatacttgtttattacagataatttgcttaagtgtgcacaaggtggaaggtcacgcaaggaagctttttattagttgtgtactgaatggatcaatagtgatttgaatactataaatctatccgttaacaggtttatttcttcatcagatattaattccagagggtttcacccattataaaatggacataaagcctggggtggtgatggtgctgcctctgtaaccaggctcagctgtgtgtcttcgtgagcctccttgtggaccctcaaatgtgggaaggagataggggcaggaggaattggggaaataggaaccttagaaaccctgaagaagtggaaagagaaaaggaaggtcagtcattcattcaattgcttaatttgcttctttctttttctcttcttctttctctctcttctctctctctttctccctccctccctccatttcttcattcctttcttgtctccctgtctatctgtctgtgtatatctattcatctatccatccatccatccattcatcaatccatttatccactctgaatagaaacctaatatagatatacaaaatgaaaaactaggaaaatgcaagaaaccttgacaaaattgctactgtttctaattccaatacttaataataaccactgctacatacaaggacatttgtgtctggtctttttccctattccaggcacatgcattttaatacagttgagatcatattgtatgtctgattttttagcgtattagattttttacattattaagttaatacatgctcatttaaataagtcaaacaatatgaatatataagaagaaaacgctcgtaatttatgctctacctcttccctttgctaagtggcaattttggaccttctgtgaccgtgcaaacatgcagattatacatgcactataggagtggaatgtatgtgacttaatagcgtaatattttgtccattattttaaaacttgctttatttggtcaagacatacggaacacgtatagatcaaacaaaaatttttaaaaatgcttgcatactgctctgtgctgtggagtagccctaattaaatcaatcattcctctgtttatgggcattccatttcttttcaattttgatattattgttgttttagcccttatgaatactacagcaatatatgttattatatactgctggttttaattttgtaggacagatgggatttctgagtcaaaggtcaggtgacataattttgtatcctgtggttttacttaacactatgcagaacgatttcctcgtattgttgaaaactcttggtaggggttttttttttaattggctggaagcacttcatcatatagttgtaccaaagtttgcttaacatcccccttattactcagcctttgggtggtatccagttctttgctttgataaataatgctgagatgaacatctttctgcatggctctttttccttcttttgacatacttggagttctagaagtggaattactgggtcggaggtcacaaatggagaggtcttttaaatctcagcctgcaaacaatcccactgcaggtttaggctgcatgtttcatccatttgcagctgtagcattttacaaaccacagcataaaccctaggaataattctgttccccactgggatagagcattgttattaatataattttacaaacatcattcgtttgaaagctttatccagcctcaccacagctcattagtgaaccttctgacaatcccggggcagtttgtggattctgcagcagacaggttatcgtgtgctgaagggtaccgcaggggaaccttccaacatccccaccctacccaaaggatgattcctgctcacaccagccagctggagacattagagcattacttctcggtggcaagggagggactcttgttctttctggtggttcgttttcatcttcaggtcatgccctgtgtcacctgactcaggcaccattagcatctggggctgtacacgtctttgtactgcacactgtagggtatccaggattcctggccctgccccatgatataccagcgccatgttgtcatcaaaacgaccggaaatgccttttgtgtctccctacttccctttttaacatgtcagcccttggtctcgatattcacatctatatttttccttatcccgttaatatatgttatctaaatatgtgccatctttgtttatgggcttttggtgtaagaactctctgagaatgcagtgattcttcactgggattggaagggatcagaaggagggaaagtaattagcggggcctgttataatggggttggtggggttatttgtgcttttaaagtagaatatcagggtgtttaaaagccaagattctggagtcagaaggcctgggttcaaatcctgacccctcctcttgcaagcttgtgacaccgggcaagttattaacctctttatgcctttattttactataaatatgggataattatagtttttactgcatagttttgttatgaggagtaaatgagtcactatttctgagacacttcgtgcctggcacagaacgagcactgtgtgtgtgttacagaaatatatgtgggtgggtgtgtttctgttttccgtaattccagctaggcaaagacatatttaacaaaagccttctgggctgatgagcatcctcagaaagtaggctgagggagctcttttaaggcagcaggactaagaaggtaaagacatgtactaggcgggtcagcatagtggtggccctcgtctgacacacatatttcaggaggggtcacccctgccgtcttccatgttggggtgctcttctctggcaacccactatgggtactccactgctggccttcatgcaggtggaaccacaccgggaagacccaagccgaggggagaaggcgtgagcagagcaggtggcaggcaccatgaggcagggctagccttgcccactgtctgtggctgaccagctagactcttttccttttcttgcaaacctaatgtaggtacaaggtcaaggctccctgtgaggcttgcatagcaccttcaaccttctagtctttgtcctcccagaaggaaaaaaatgagaggagggagggacacaagaaaagaagatgcattttgtcagccaccgtgctatgaaatgctagcgcagatgacgttcagaactgccctgtgagcagacataaaagcttaggctcaaagagattaaatgtcttatttctgcttttggaagatacacattttatttttttctgtgtctctgaattggcatccaaccataatcattgtgctaatttactgtattcttactctccctctccagtgctgtgagtaaatcagtgtgttccttatacttaataacatactaagtggcaataataattattataacaaatgtatcaaataactatgtgtgaactctgcatgtttcagcccatttaatacccattacctacggaggtggtttctactattgcacccactctacagatgagaaaatggaggcacaaaaagttaaatcatctgccctaggtcccagagctggaatttgaaccaaaggttctgtgcctcccaaatttgtattcttatctctgcatcacactaacactgtcactcagtccttttctcactgctctggtctctatacttagagcttcgagacctgccactcagatgactccagaagaaaacacgctttggtgtcgtgcttgcctttgcccttgtcactttctcaactctcctcacctctgtgactgcatctttataactctcctttattagtgcttttgctggaggaggcaagcatgaacattgtcaaaaggactcaaaatggggaaaagtggcagcaattgccagcacaatcactgaaaaatcttctgaatggattgtaaattaaaccctcccccaaatgctcagaactgttgaattgactaattcaaattcattgagtcagatgcagttagtgtaacagtctatagtaacagtgtagactattagtttgtagagtccacacagaagagtccaattttctttgcacaaagagcctaccattcatttattcaacaaatgcttttgaacacccatcactgtgacagacagtggcaatgcatgtaggaacaaagtgtgtccatgggggcagagacctggaataatcagtcaccatgtaaggaaattcaccagaccaccaatttccacgccttgtatgtttctgttgtctttgctgcagactgaccaaaagcacaagacaaactcttgtccacttggattttagcatctttccctgaccctgcctctgactctggtgttgtgcacccactctgcaactctccaagctccagccctgtagtgccagcctgtacctgcctctcctgagggtcaatatggcatccagccttggtgaagtctcccaccccgtggtgattcatatctgaccctgagaattttccacctttcccagaagagtgggagtctaggaagacaaatagccaagataggagtttgaagaggaggcaccaatggcaatttgggttgttaattcctccagctaatttagttctgatttccccatgctcttggcagtgagacagttggctccagaggaaggtgataaaaaggaatcagtcaaggaacaatcaagaacgtgttacttttttggataatcattggctgtagggattctcctttacattttaaagagggatgaggttgagtctgtccctagcactgacaatgaaacatttatgctgtttataaaaatcaggaaacacacaaataatttgattaacgctcaccttctggtccttttgtgatttgagaggtcttgagataagaaaaactgtggatgaattttactgaactattgaattgagaatggctgagggggagaggccccttccctctgtgaaatatagggaaaagttgtttttcttttctcctagtttcagaatacttggacttacagtcccaaatagcatcatttcctggtgaagccccctgaaccagacaggaaactgcctctcttcaataagagcagaggcagtctcaataaaaaacaaaatttcaacccatcctccgctttggtggcaggcagttcatcttctcacctctacttatttacagtttgaggggaaaaaagaggtaatacttgaaagtgtatttgaccatattttctaactgggagacaatttttttctttaacaattacttttggacatattacttgttagttaaaggagatgtgacacctcctgccccctggccagccaagatccatttgtcatccaggtagcctcagaacggattgagagctcgccgcacagatctcatgtcaaagacaggcgcgtctgtctttcacggcttgggttgtcaggatgcagggagggccttttgtcaaacacctgccgatgagcgtttggcagagcctgtgctaagacatcatagatttccttctgtgttgtcttgagagcagagaaggtggcaggttaaagggaatcaggaaagaaatgagagtgaggataaacgagagggtgtggttctcagggtagaatgcatcggacactgcctagtgtgagaagggactcatctgttttctaggaagtactataaaaaagataaatttagtgctcagatatctgaggcctgatattaggaaaaatacggtaaggcatacatttagaacagatgccatgtctgtgtgtgtgtgtgtgtgcatgcgtgtgtgtgtgtgtgtattattaatatgtctgctggccttgagaaggtacattcagagaattttctgaagtctttttcacatggcctgtattgtcaaaaaatgatgttgggtgttttctgcctgtggctgtgggcctctgtgttcacacagatggtcatatgttcctaaaggatacatccaggactgtgctgacttatttggggtggctgagaagagacatgagccagatgataacaggaataattcagtgtgtgcttcccatggctgctgtaacaaactgcacagcctagagggcttcaaacaacaggaatattatctcacagtcctagaagccagacgtctgagaccacagtgtggacagggccatgctccttctctagagaactctccttgctcctctcgcttccggtggttcagtggcaacgcttggtgtttcctggcttgcagctgcaactatctgacctctgcgtctgtcctcccacggccttctccctgtgtgtttctggatctcttctcctttgttatcaggacactggtcacattggattaagggcctaccctattccagtctgactgcatcttaactgtttaactctgtattccaatctaattacatgtctatttccaagtaacgtcacattctgaggcaatggcggttgggacttgaacatatattcttcgggacatgattcaacctataacaagtaatactagtaatcatctcactcctgtaaacagtacagttgccatacctcaagtatctagtatacttgggacattagtctgggaatttttctccaatcctcacgctagcatttctagtaatgaggaaactgggggtcagggaagcttagtccacatttctcaccttttctccttttctcccatcccccagccagtttttcaacatattggtttttcaccacatgctcactgcagtgaatgttcactcccaagcccaaaagtagacatgtggagtgacaggtgtcactatatcataatatgaagaatttcaaaagccagaagtgcttgagaaaatataaattgtgcagtaaaagaaaacaccctaaatgtgcagagcaggaagtagaatgactctttgggtattgtgtttgttaggggggtcattagaaaatcatagacactgagccgaaccccctgggttcaaatcccagctccaccacttacgaattgaatgactttgagaaagttacttaaatgctgcgtacttcattttcctcccctgtaaaacgggttaatatcagcacttatcacatagtttttgagaaagctaaacgtgcttatctatagtggttattattactagaaagaatatcgtggtgcccccaaacatggatttaacaagcattgatcaaatacctcctatgcccctacgaaccaggtactagaaatccactcctttcacttgcttttgttctgttgtgtttttgagacagagtatcgctctgtcacccaggctggagtgcagcggcgtgatctctgctgactgcattctccatttcccaggttcaagcgattctcctgcctcagcctcccaagtagctgggactacaggcccctccacaccgcacaccgccaccacgcccagctgatttttagtggagacagggtttcaccatgttggccaggctggtcttgaactcctgacctcaagtgatcggcctgcctcagcctcccacagtgatgggattacaggcatgcgccaccatgcctggctaatttttgtatttttagtagagatggggtttcactatgttggccaggctggtctcgaactcctgggctcaagcaatgcactggccttggcctcccacattgctgggattacaggcgtgagccaccatgcctggccccctttcacttgtattttttgagaagagaaagaaagaattatgaatgaattcttctgagctgtgagtccttcctgtgcaccaggcatggatggcaaggcacgattgataatgttccctcttatctcgaaatgtccactctctctcccatgcacggggagtcaagctgtgctcttcaaacacaaattccttctcccacttcctgggtagttatgctcttttcttccctgaggttgctaattgtgggcagtacagtgtagagtcactttgatttttctcatctccttcctggaatgtgccacagaagaaaacccacgaagtcttgagctaaacgaagcagagatgggagaagggacaaggtgggaggcggtagtggtgctgcatgggataaaaatggaaacacacacttttgccctctgtacccaaaaggaaatgtcggtggaggcaggcgttcaagctggcctcgtgtttgtggttttagacacagctttgagtcgtgaccggtgtggccaagacctatttcccttgcaaatgctctctctcttttttcggtaactgtgttactaaagttctcttagatactttacatttcctttcacggatttccaaaatttctttctttgagaatgtcaggaccagtaggaggttcagcacgcattgccagagaaatcacagatgactaattggaatgcctcagaatcattctccttttgtttcacctaatttccacacttacgaagtcaaactctcagttaaatgtttatctagcaattcatttcttctgagccatctgttgctaggcaggatctgcagacctcttggttgcatgtgctgggttgggtcctccaagtctcttagcacaaagtcctgatgtttaaatcctgcaagcgaattgccacctttatttccaagttctcctcgaaatccacattcttccctacagacaacggtggggttcagtgtttgcttttcctggggctgctcggttctctcaccttgcatttctgtggcgccaaggtaagctgaaggcattagtattcacacttgtgtgtgagcagctgagctaacatgcaccagagggaaaatattacttctcataaatgctcaataattatagtctttattgcatgcaaatctatattgtgacacatagtggaaagcttttggattctgtgtggaagagttgacagagatttgcaggtgaaaaagaaaagaaaaaaaatacagatacgtgtatatatagagaaagacaaaaacttgtctgctagaaacctagggagagagatggtattgcccctgggacattggactttctgtttccagcatggtctgtcgtcttccataatggcatttaattttggaaaaattgcctgagcatttggaacaggcatctattaggaaagcctatttcttttttttttctttttgttttttctgagacaggatctcactttgtcacccaggctggagtacagtgtcaccattgtggctcactgcagcctcgacttcccaggcttaggtgatcctcctgtctcagcctcccgagtagctgggactacaggcatgcaccaccactcccagctttgtgtgtgtgtgtgtgtgtgtgtgtgtgtgtgtgtgtgtgtgtgtgtgtgtgtgttttgtagagacagggtctcactgtgttggccaggccggtctcaaactcctagcttcaagcgatcctcctaccttggcctctcaaagtgctaggattacctgcatgagccactgtgcccagcctaggaaagcatatttttgaggaataattatttctagtaatttctgttctaatctaaggggtttgaggttatcttttgacaatagatgttagctaggagagataagaaatggagcaagggaggggtttcatcccgccgtgttcatttgcttggctgtcctgaaattgcgaatacacagttgttacctgctcccggtgggaggggggggatatttatttggcatcttgcaattgataggagctgagtgattttagtaggtagtttaactccttaaaaacttccagtggtttcatattctacctagttttaggtgacagctggtatggggtggggaaggggggggggataaagatattaatttggaagcatttgattgctccattattttatcatcttcccatggaaatgttttcataacgccttgttttttaattattattattattttttgagacagagtctcactgagtcgcccagggcggcggtgtgatctcggctcactgcaacctcagtctcccaggttaaagcaattcttctgcctcagcctcccgagtagctgggattttaggtgtgcaacaccacgcctggctaacttttgtatttttagtaaagacagggtttcaccgtgttggccaggctggtctcgaactcctgacctcaagtgatctgcctgcctcagcctctcacagtgctgggattacaggcgtgagccaccgtgcccggcctcatatccttttttatggaaaaaaaaaatcgggaattagcgtgtagctattaggcgtagattcctgcctaaggtctggatatgaattccaaagaccactggactttggaatattcgtaggtctctgaaaattcagacccacagaggccttaccccgctacagagaggccccaagagagaggcctcacaccctctggctccactgaaattcacttcacgtttccaacttggattaaactggcacgacagttcagtcaaatgtcaagtccattttgtcaagggagggaactcattcagaagatgaactagttggtgttacttagatgattaactacttggcattaggtagaagagggctctgccaactacagttcatggaccaaatcctgcctgctgtttgtttttgtaaataaagttttattggaacacagccaggtgcatttgtttacctattgtctatggctgcttttgcactacagtagcaaagttgagtacttataaatgtagagcctgcaaagtctaaaatatttactatctgcccttttgcaggtaaatttgaggactcttgagttagacagctaattagttggtgttacctaaattttgtgaattgtggctaaatctctcatttgtctacacattcaaataaaatcatgtatcaaaggtgatgtgtgtataataagatgctgggaagatgagcaaagcatgacttcttttttttgttgtttgtttgtttttaagagacggggtctcgctctgttgcagtgtcgcccaggctggagtgcagtggcacaaccttggctcagtgcagcctccgcctctcgggttcaagcgattcttctgcctcagcttcccgagtagctgggactacaggcacctgccaccacacctggctaattttttttgtattttagcagagacagggtttcaccgtgttgcccaggctggtctcgaactcctgagctcaggcaatctgcccgcctctgcctcccaaagtgctgggatcacaggcgtgagccagcgcgcccagcccatgacttctctttatgggagagaaaggccaccgagatagtaagtggacatcaggacatggattctattaaatctaacacctttatctttgcatttccatacattttgcttatttcaaagtagctacaactgcacaaagaatgggctgtcctctcctgctactttataaaagccaagtttttgcttctagctggtcgaaggtcctgtgggagctcacgtttttctcaattactgatgatcatttgagacataatttggagaaggtttctatcaaatcctagctggactgcagtgaaatgttttcaaactagagaagcaccaaataggccatgataaagaataaataccacctaccccaacctggcaaatgtgtgctcacccaaaagtagtggagcctcaagctcagggagatgtgactggaaaatccactgaataaatgtctatttaaaaaaatcatagcgtctaggggatatacacttctaagcccattcttcaatggagaattacttatgcgcataagtagtttaaacaaaattagtggaaaaacagggagtttaagggagcaagagatcaggtcttctgggctcaccacacatcaggtgatttaagctaaaaatggcttaaaataccgcaatcacttgaaacgccttacataaactgaccaggaatctggggcattcgcgttagagacaattttcttctcctcaagataagggatggggaattagtcatagggtatttccagataatgtagttaacacctcgtgtaatattaggtgggcagggagctctgctctcaggaccaaaattgctcctgccagctctaatagggaatgtgtgtatttttaaagtctgggtaagcactgtgagtcatttccacaatacgcctccctttggcgtgaaatggggcagaaagtgccccaaacagctgttattttcgcagtgattcattcattcattcattcattcattcattcattcatccacccatccattcattcattcactcatcacatggcaactcatcacccctgtataccagacccagtgccaaatactggggagatgtgtgtgaacaaaatctcattttcaaggagcttattgcctgctgcacattttagcctcatctcgttagtgcaagaaataatttaacaactgaaaaagatgtgaggttgtacctggtaaggtctctattggtcaaggaaaggtttagcatggagagatttctcttaaggtgcctaggtattcagaagcacccctaaaactgatttgtgtggccctatgcttacaagtggagcctttccctcatttttgctttatttcttttgcctctcactttttatttcctttgtggagtccagcccctttgcttattctcagcacaaaagaggcagtagagtgagaagaacgtgaacttcagagcccacccatcccgtttcacatttgaatcgcaactctgtcattcaccagctgtgcatccttgggaaagtcacttagcctctctgagctctaatttcctcacagggccgcaggactgaggttaaggacctgctgtcactggtacagtggttgaagaaaaggtgaatgaaggaagggcctcgttttactccttgtctcacattcctttctgctacttctctttggctcaccaaaaggagacagaagtttgtgtccatggctgtgaactgccaaagagttgccaattctctacgatctttgacctctgtgatcccaggggcaaggccagcactttccattccattagacttcattctcttgtgggtgctttctgctggaatctcccaatacagaacagaaagcacaggttatggaatcagatagaccaaagttcatctccaaatttgattccctctgcatacaagttgcttacccttgggggccctgtaaaatgaccataatagtaagcacctctgaggctcactggaagaactctttgttgtctgcacagaagatctcagcactaagcctggaacagaggagacttcagtcgatgtagggcatctccccaaactgcttttattctttatgcctcactgaaacttgaatcaaaaagcggctggaggaaaaagagctttgccaccgggcagtactgctgggtcttgcgtcacagagatgccttctgctcccttcttcagggagacctcagagtatgaaagtgctgcttacccagcagatgagatttagtccagtcatccatctgcgtggtctctgtggataaagtaagcgtttcattcaacttttaaaaatattgcaaattgaccctcgcacatcttttcttactgccggtcacctagccagcaaagaccccaggtgagatcccactggtttggaggaaggagaggaaagtccccacttgggcaaaaacaatttaggatacctgaagattgcaaagcccagctcctcacaaagggggtggcagctggggagaagctgaatcagtagacagacaagattgtggtttaacgagttcagggacaagagaaggccccagtaacctacagaagcaactagctccttgccttctgtacaacatggcctttggagtcacaggacgtgagtttggatcccagctctgccacttagtaattgtgtagatttgcacatgttgctggacctctctttgtctcagttttctgtaaactggggaaaatcttagtaaatctagctaacgtggttgttatgaagattctgtgtgtgtgtgtctgtgtgtgtgtatgtgtacaaagaaagtttagagcagcgtgtggcacgtaatgcatattatgtaagtgtagctccaatgtgagttgttacttgtagagaacagctatgtcaaaaccacaccaaaaacgatttggaaaggaaataatttgactggtcattttgtttatccatcaactgagttggattgatatatttttcctttggccttcaaaggaaatttgagcattcattcattcatccttttagagaaatattctctaagcacctaccgtgcgccaagctttgggttggatacctggaacccctctcagtgagatcacagtctaacagcacacacccaactatgaaatatagatggactgtgaagatgaagaaaggttctggttatgaactcacagaggaagtgacggctgaactttgtaaggacacaagtggtttaacaagtttcctggcccatatgagatctcggctccgacgttacaggcagcagtgtggggcctcaccttaccttttcccacttccatccttctccacccccgttcagttcccaggctccccttgtgtgaactggctcatttctcactgcctttctgttctacagcccccgctctgctgagtcaggaggtgctactttctccatctgctttccatcgtccaaaatttttgttgatgtttcttgatcactgagttaaataatttttccccgtattatacattcagtagagtttctggagagagtgcatacaaaaacgcctaactgaatctaccacgtctaagcagatgctcccagagtctatgcttttttcccccatgccatactccccaaactaaaggatgagaaagaaccatgcaggcagaatgagatgagtagatgctactgctaatgctgtcagttctactactaccgccactgctgtcttctgctgagtatggattatatgcctgttccatatgagaacattatgcatatggtgtgatttggtcattccggatggctaaagtgtgagcatacccgtatctcagatttacagaggagaaaacagaggctcagactggttatgtatatttctctaagtcccccagctattgtttgttgtaggttgggtaccccaggaagtagattctgcaactgagattggcatgtaggaagattactggggagtgttctaggatccacacctgtaggggaacgtagcaagcaggatggggtggagggaggattgagctgtgctgtgggagatgcgaatgctccagtcaatcccaaggaaactctgaagctggattattcttcagagatgcaaggaggtcaggaagtcattgatgtgggctccctcctggagtgcgtgttgctttggtagggagctcgctttggctgtgggcagttcctgaggagggactcataggacagcctagcatctgaggaaatgagtgcctcctggcccagaatgggggatctcagcagcacactacaatatccactacagtttcttgggcttgctctgaagccatgcctctctaacttcagggtatattcatgtaagtgaggtgcagggatgggggaaagggagaaggtaaagctacaaaggtaagccagcttgtctagaccgggagctagctccttgtgaaggaatggcaatgataatggttaagtcagattcaagaagtgtgttttggggaaacactccaggtagtggtacatagaatcctagcacaagatcagtgactgggtgagtttgacattgtagatgcaaatgtgtgaggaattatagttgaaaggggaaagaacatttcagtttttcatttcctgcgtcactgtttttcttatttggagatgctgttcctctcaagtgggaaaaatttggttatctcaggtggtaaagatgcctttgtttaaaatattcttctgttagtggggacaataatactactaatttctagtactgacgcttctcatgcaatttaatcagtaggaacctgtttgcatgttcatttgaggaagtaccaaagccaaaagtagcttcgaggtttggcacctctgataaagttacagaagtgcagtgtgagcaaaaatcatcctcttctctgttcttcacctgttggtgaacagtgagagaccaaggtgagagactcggaaattacacatgtacattgtatattacatgtatacaacatacattgtgtattacacatatacaaattacttgtcataacgtgcagatttcacaatgagagaccaagttgaaaaatgcttaaaattcacaagtctatatcattctgtcctccaggtaccccaagctggtttgggtttataccagtttgaaccgagggaccttcagctgaggaacatgtgctctgtgtgctggaagctcctggaggccccagggttatctctgctcacttaggtttgtgatgttgggcaaaaggagaaaatgctgagtctattcggacccaacttccattaatgcctgagaaataatttaaatcgcaagatttccaatcccataagcagccctagcctctcttctcctgatactccacatacccagtctccattccttcttcccccaccctccagttctcatcctgtacactacctccagacccccagggattcagatcctgtctcccccaatgagagacttttttttttagggggagccaaattatttgttacaacatgtagatttcacttgttgtagagatgttctattttcaaggatacagagctcaaagggagcacaattccctggagagctagggaaataatgaagtctaaggtctggcagatctggatctgaatcctggcaatgcatttcgggagttcggtgtcaccctgagcatctttcaattccttgaacttcagtctcctcatctctgaaatggggttattatctacctgcagaggtgctgcagtattaactgaggcaacgttgcaacgtttctagaatgatatttagggctcatattgacccagtaggaagtatagttaccttgggccaggggagctacctgagtggagtcaacttttaggttatagggaccaagttgaaacatgcttaaaattcacaagtctgtaccattctgtccttcaggtaccctaagctggtttgggtttatacattcccacagtgcctaccacatcccaatggctttatgaccttgaggtcctgatctgttttatcatagctcttgatcttcctcaaaaattcttacagctgtattccacaggtcatcaccaagggactgctagaactggatcatagcagcttccaagagctgagtgtgtacatttcctcccaactctgcattcagtttaaattgcttgtggtgagagtattcataccatgggaattggcagacactgtgaatcaaacccaccccctgcactgcccccctccagtgagcgagttcttgaacacttactggtacaccactgtcaccaaccctgctttttgtagacatgtcctttaagcaaagcaattcatgggaaagtaaatttaattatcagaccatttcattagattcctcactgccacaaacaggtggttgtggtgataatctgggcttttttgatcgctttagaaaggcagttctgtaatgacatgaaaaacatattgcttggtaatttatttatttgttcccaatgtttgctacggattgtggtgaaaacacaaacacccaggacaaagggcaaggttcatcccaccatgacgatgggaggcagtttcatcccaccatgatgatgggaagtccttatatcaggactccagggatcttgtgtcctgatataaggctctcactttccaatcagcaggaagttatgcttcccagcctctaggaaagcataggagttaaggagaactgaaatctggggcagttataaatcttcccttatgtgtacaacagtttaaatcaattggtcatctaccaaaatctgaggaacaagagcagctttagaaaatgggctgggcatggtggctcatgcctataatcccagcacttggggaggccaagacaggtggatcacctgaggacaggagttggagaccagcctggccaacatggtgaaaccccgtctctactaaaaaaaaaaacaaaaaccacaaaaattagctgggcatggtggcatgtgcctgcaatcccagctactcgggaggctgaggcaggagaatcgcttgaacctgggaggcggaggttgatgtaagccgagattgcgccactgtactccagcctgagtgagagacagactgtctcaaaaaaagagaaaagtaaagaaaagaaaagagtaagattaaaaacaagtaaagaaaataaatcctcccgctttttttgctccttcatgggtatggctgcatcctctgctcactggtttgagttattattttcccatgggcaattaaagccctggcctccactgcagttttcacatcaaacctaagagtctcaggtgccccttggtggagcaacctaactagagacattaatcatactacgggataattgacaaatgcattgtgagtgtctgatttctgtggctcaggatgcttagtagcagtggggtcaagggcacagatgacacaggtccaaatttccccacccctacgtagtagctgtgtgacctggggcaggttgcttaacttttctggacttttgattccacattggttagatggaaataccatattattataaatattgtaaatagtacccatcaaacacttaatgtgaaccagaaaccctcataaaatgtttgctagtctttgttgttgaaaggtcactatgatgatggctcaaaatcctgacctgaaggtgtgctatgttcctgcttcacttgtgctgtggacatgttcctatttatcatagtgcagttgttgagactgggtgtctagagccatgtgatttggttcagctcctaactctgtcacttgctctttgacctaggcagaaaactttgcctctttgggcttcagtccccggtgtttttattttattttatttttcaagatggagtctcattctgtcacccaagctggagtgcagtggtgcaatcttggctcactgcaacctctgcctcctggcttcaagccatcctcccgcctcagcctcccaagtaagtgggactacaggtgtgcgccaccacgcctggctaatttttgtatttttagtagagatgaggtttcaccatgttggccaggctggtctcgaactcctgacctcaagtgatccacctgccttggcctcccaaagtgttgagatcacaggtgtgagccatggtgccaggcctctcctgtctttaactggggataatgtgtgcagaattccccctaaaggatctatcatgcgtaaggtggaccctcacagaaagcgtcaaagacacacgaatctcttagcaggaggccgccaggtggcacaaaatcaaaactgcatcattgagaattatgttatgaagtcatttactgacttgagcctcagttttcctattaatacaatgagactgtagtaacttcatagggctcttgcaagagttcagctaaaattctccaccttgccacctagaacatgtcacagaaggtatcctggcccctgtatgggattcatacatgaagaggactgccttgtaaagtcatttgattagggatccagagggtgtactggtagaggacagattttcaaccccttgacagttcgaaggtcagctacacaactggcttgtgttcctcgctgacacctccctgagtagcaatgtgcatttgtgtgccttccctttgccaggcatttctaagaggatgaatcctaacaggtatggcagccagagggcaggggcagggagaagaataagatgttccttggtgtaccccattgtcatgagttcatcatttctgttaactgtgggggcagagagttccaattgcaactggcttgttgtgagactgccccggtggttgctgccagatgatccacaaatgccaagctcctcacctgagccctgccagccttcaggacctcctttgcacgaagagcaatttgcagaagagaacactgcaggggaggcaccatagaccccttctggtctgtactgttcaaaatcacatgacatccgccagaggcctggtgggaagccagggttttaggcactagaaatggagctcagaaaggaggagaaaggtccctgctggtctgtggagagggccttggccaccagagggatcaaatggcccaggcaggaaataagtatcccgctctcagatctgaggccagattttcaagtgtatgcatgattctggggtgctacaaagggtatagagtatggagttagaacattacacgtcaacaagaatatgggttttgaacccagacctcagtttgaatctgagttccagcactgccccgttgcttggccgtgagttacttcacctcctttagcctctgtctcccctccactacaataacacctgcctggtggggagtgaggatattgtgcgaatcagaagtaataacaggtcgttggcacctaagagactctcagtaaccagcagtcatcaccaccgtcgtcgtctttttttttggccattacagttgggattagactaaccctccctaagcagctattgagcctcacactccctggacaaagacatgaaaaactctggatgatttggaagggagatctagaaatggtgaaaggactggcaagtgcctctgtgctgatattgtacctgggctcagtggtctggctaaaggagaggtgctggggccaggtgacaggcgagtctctatacggcaggcccaaaaaatggaggtgcaggcttcatctatactttgatgtgtatgcttccttctttaaacttgtgataatcagagttatagctgctttaaacttgtaaaaatcagagttatagctgcttttgaactagtacttgttgtgtgcccaggaaatggccaaatgttatcactcatccttccaagaaacacatgaaggttatattattatgtcgactttccagatgaggagactgaggctcagtggcttgtcataggtgtcaaagacaggagtccaatgtaaggacttctggcttcagcacaggggattttcctaccatcccatattgccaccccatctgcaaaaatacctggatctatcttcctcctgctgattctcagctccctccaggactgaagagatgatattgattctcacttgatagaggttagaaagggcctctcccttccctagctgaatagagagggtttcctttttcttttctttttttttttttttttttaaatgggaaacttacagggaataagatctgtttcttcatttgctttgcaagagagttggatttgtacacgatgcctgagctggctcggttttctaaagacctaactttgcagcattcttcaagggctccagagagtcccttgtgccatcaaattaagtttggaaacttcaataaaaaagtcccgaaggaaactgtcaattaatgcatttacactgaagcatcatatttgggaaaaacatcttcaaacgcaaacgctgttttccaaccattaaaaagtttatgcgctgcttggtttccatggatacctgaggtaatagcctccttcctctcattgaagagtgaatgttgctcagttacttttttcctgttttttttcacttttgtcttcctgacttttttcttccatccctatttatgaaaacaaaaagataactaaattgaaacctgacaatgtaatttgtcagaggaaggcagcctgttttataagctcaggtgatttcatttttgttcacctgtttatttcatgacacttgcaggaaaaagaagaattttcatttgatcaaatcatttccatgatccatcaaacacacaagttaaaaagggaaatgctctcagtctttaataacagtcttaatcgtgtgtagagcagagattgacaaactatggcctgccggctaaatctggcccagtgcctttttttttataaataaagttttattggaatacagacacgttcatttgggtagacgttgtcgatggccgctttcacaacaatagcagagttgagtgatcgtgccagacattatatgggccacagagcctaaattacttaatctctggccctttgcagaagtagtttactgacctattatatacaggaaagaatgagggcttgggtggcacttagtagtgttgtcacttttgtcattggccttgacctgactcagtctccgtattgttgagatgggaatgacgggaccctcagtagtgttttgggatataaggcacacggtaaaggaacaacaaataggaattacattccgtcgagattcttttgctagaaagatccaaagaaacctaccttgtgattctagatgttttttaggaaacccaaagaaagtatgaaaaagcccaagccaagtccttccactgttgttcccgggcctgtgtgtgctgtgtgtctttcctgggagaaggtcagagctggagtggggcactcgattccggcaagagaaggcaaacaaaagaagccacaacagtctaggaagaaatctttaatttctattcagctttaaagagtttgagagagttttttcccctctgttaacaaacgagttcaagtacatgccttcatattataaaagtacctgaaattgcctagaatagcagcatgcatagcttgttagtatttacatatatttacatagggaaacaagagaaagatctacagttatttacagtctacataggggaagagaaaggcagcctaattgtatttcctaaaatacagtagatgagtagtcagcacatgcatatttagataatatttgcatgatagaatgcaaactttaaaaaagacatacctttgtaactttctatgctaaggtgttgcataatcaaggttaatttttgtttgtttctagtctattggcatcaagtgctttaaaatgctcactaacaccgaggcagaattatttacccgggcaattaaagcaacagcacacacgatcatttcctactaactagcaacacgctgctggtgaatgaaatatctattgtttctcattacccatcgaccactgtgaagagatctctctgtgtaaaggcagtgcctaagctatcaccattaattatggaagtaatataaatgagacactctccacagtatgttctaaatgaaatattaacaaggccagcgtcttggaacctgagaaatggtctgttccagtgagctctgtatggaaatccacacacctaactcagacatgcccgatttgaaatagcggggctggacattgggggcctacctgtgagatctgaattattgcaaagtacatcctcttaatttgtttctggaaggcagagttaagagttaattccttcccatgatgtggccccagcggagaccttgtgtttttttttttttttttcttcagtgctttttcaggactatgttatagaatacttatggggcatacgtgtaaatgaactgtcaaccttaaaatctaaacaaacagcttgtttgtggttcgtcctgaaatcctccctgctcacaaaacagccagctacttggttttctaaaagacgtaattttgcaggcagacttcgtagagccattctgtgcagaagaagggaagggagaagctgtttgttttacctgtagtatgaagatattctttgcgctgttagaactgagctcattaattctgcctggcaataatttcaaaggtttattttggtgtagatggcgaatacagatgcatacatttatacgcagtacacgagctagctataaccataacagaggttaaagaagtagagtaaaaatgtaaaatgtttcaaataaacacacactaaatatcttcttttatatcttataaacacccagcagtcctttagcacgggcatcaaggtggcccagttggaaaatttcagtgacatgccatcagatttgttccatgtagaaggacgacactatcagttagatgcttattttgttggcaaatttctatggcacttctgcttggctatttcaaaccaaccatggaagaatagataccccaatgcgatgtttcatccctattcataaagaaactgtactttgagcaatgtaggtatcccaggcagcatcagagggaatgcccagggaattcttccatggatataagacatcatcaacaataccttctcttagttctaatgagacagcctctcaggtccggtcagttctagaacgctttgggcaggcacaaatggaagatggaacaagtgtgcatgtaatgacccacatggattgccttgaagccgtttctttttccttccctcgttaggagtaccctcaccctaaccccagcaaagcatgtctagggtctcacaataatagcaggtctcagaaagataaaataattctgaatgttacaactcgtcccatttaaggctagacataaatctatcacagatcctttggaacatcgatggcaagaattctggaacacgaaggaggtatgaaaagggcttcactcgtttcatggaaaagctcagaacagtttgtcgacttggaaacacaggccctgagagcgtaccaaggtcaccctgcccttcaatcctgctgatagcccaagttaacatcctcccatgccttggccttcccagaacaaacatggctttggacgcctttgggtggttgggactggctgcctatttttctctaaaacttaagttttaggaaagaattctttccagctttccatcctgaacctgctggtctccaggctcgttcctgcaaatatttcacagaggagtaagagccacattcttgctggctttccaattcattctcctctcttcgagtccacctcttaaaacttcttagtgctcttgcaagaaactcatgtcttttgtcagggagaatggcatggcctttgtatgacacttccttctagccagactcggatttgggggcatcatatttgggatggctgcaccgtaaacaggaaaggccacaggacagctcacaggttctctctgaacagaagcctgtgagcacgtgcctgtcatttaaaagctgcatggcactcttccccctgcatgcgtttctctcaaggtgtcccttgtaatttgtggttgtggtctgtgcttgaacctgttgcatttatggtgatggactggcactttactctctctgagccacggccatcaagcccctgtcatagacactgtccctagtgtcacctggggaatgacactcttcacctgtcatgggagaggcaactgaaaaggagcctgaggtttttctacctttgtgaacctgttgctagcaaagaaatatttttccttgtggcaaaagatcaacatctaaacacattgtccacgtctaatttgttagggagggcatgttctcttctggagggctaagagttggcatgggatctaaatggattctccagaacactttctcacacttctaaagcctgaaaacaaatatttgctttcctgatcatcttcattgtttctttttgggaaattgagtgcattcctcttctataataaaggttaagaatagcctgtgagttagcaaaactcccaaaggtttatgaagaaagttacatttcaatacctacaggaagtatttgcatgtgtctaaggctggattgttgaaggcctttgtgggagtcagttgtcaggaatttgtaggaatgactgtgttaggaatcattggaggagagggagtcagagggatggatcagtattttctctgcaaacctgatgaaacactccagagcccgcacctacatgcgtgggaactgataagatgggggttgtgtccacttcacttgtatgggatgtcggtgctttgaaaaaattctatcatcaaagagtaggtttcttagttctgcaaatctggcacctggagatggcattttgaatcggacgacctttttagtaagggtcacttgctgttggatcatcgaagggggtgctgagtcttcatttttgttcatccaaatggatatcatttcaatttagctccatgagtaaatcaatggaaaaaaaaatctccttttaacatttctcgggtgaacacacgacagcccccacatttcattttaggccatgttagggcatcacctcatggccagacatggcctggctgagaaggcggcagagcaggcagagaggcataggaagccggagccccgtggaagacatagatgaggaaatgggccacgtgcaaatatttgtgtcacatatttggggagcaggtttcatgtaccaacggacacggagtctgaagtcactcactctacgtaattatctgtatggctttggacgagttgcttttgatctctgatatcaggtaggcttctctctaaataaatggaaatactaactgtccctggctcatagagctctgtgagggttaggcaacaatgcttacaaagctctccatgcagagcctggcaaatcgtaacctctcaataaatgctagtcattgatgtcacttgaatagtactcgttggctacaactcactgaaaaagccgggcagtttgcagggctgaggactttggagtagacatctctgttctcgtctgctgcttcccatcattttggtggaagttggtgtgttcgttggttagcacttattccaaattgaattgtataatttcattatagaagtatcacggtggaagaagagggtgacttactggtgtggtcacctagccagggaggcctatgagcctcattcctgtataggctgcattactttatgaacaaatgcaatttgtggcaaatgtgtcccctaaaagattgctcttggatagtgagtagggaacaagtggccttttggagcagtttgctttcatttgtgtttccaatgagagattgaagctgtaattgtttgtgaggaatggctgtatcccaagcaccgaggtatctggagatgacctctgcactgttctgggagagtggttatagcctctcctgggggagtgttactgggagacagggaaagacagggcgtgtagacggccatctattccacctgtgacatgagggctcaccccctcatctccaccgcagcagctctctgataaatgtagctctctgataaatgattctgttcctagtggtgtattcacagagtcaatggataaggtggctggctttgcatttgagaagtatttgctttgtccaacagacaccagatgagtaacaatggaagtaggcagggtttgaagaggtatgtgtctttccttttagccaaacctgctcacttcagatcaccactttgtcctgggacgttagtcatgggaacactgccgtcttcaaaagggctgttctccttccctgctcttggtgttccaagcctaatctaacttccagggttcattcctttcataactctactttttgcataagtggattaattcagcatttgctgtgcaatgtccctgtaagaaagcaatcttagaacatctactctctcacaatcattgaatatatagatatgccatgatattgtgtctattttttatatatctcatagttaagtctactttaagacaggaatctcctctttcttttaaatgagcatgcattttaaaatagaaaaacctgaaagcaaaacacggtgtaacatgtgtccctgtgagtattatattagagtactaaccaatgcattacaaatatcaatatgtgggtgctttttttttctttaccatatattgtttatcagaaacctctgtaccctttcctttaaaggagtcaatatgcatttgtattctgtgctgacaactataaattgatggctagcagttatcaaatgaatgttgatgaaaagcagctacttaacattttcatcccaacaccgagttttggaaggatggataatttagatctgagggcctcaactataaataaacagcaactgctttctaaatcccacctttctgtagttgaagattgtgctgcaaatctgacagatgatttttgaaagagaatgatgaatccttattaccaagatactcttaatcccaaacaagagtcctgggtaattttacatatactctcaagattgattgcacagttctcctctggcagctcacaaatgtttgactagatcggaaatggcattcgggcatgattaaaaagattcttctgggcttcccagaaattctcagtcctgtgtcgtcaacaacctaactcattgccattgctgcgggatagacacctcccccgtttcccatgattagcaaccatatacaacctacaggcttctgataaatgattgattctcaaaaaaaaaaaatcgtttaggggaacccatagctccagccagtgtttgtatgtcaaggtattattatttatcacaatggatcagtaagcattgatgacaactggcaaggtattgcttcagatattttataacggagttgttaacattatttcctttagatggctctttcatcttttctgcattatgaactgatgccccaaaaggtggtatgaatgaaagtcatctgatggtgattaaagtgctctttaaattttttttttaatcagtttaagaatgctttctcttttattggcagtacctgcttgtttactattgagatttcactaatgtgcctcagtcttattctgatgatatgtaggccgaaaagctggtgagccaaaaatgagaacctgttactaaactgtcatcacatctgatcatattaagatgtcactcagaggttgccattggtacggctgaaaattctccaagagaccaaaggtgtggtgtgtatgggaccaacaagatattgttactgcttaattgtccagcaagggaggaaagtagagtgagtacccatgagcaccaagcatgaatctgagaaggagaatttgccaaaggtggacgattgatttttggagtagagaaggtcgtctttgctttcgggtgcccctcctgtgtactgtgttctacaaagccagagccacttgtgatggaatttagatggtaaatcaccccaagcctagtggcaaaggaatcaaagccatctcctgataaaaagttaggcttttcaaaaaggtatggctctcagcattgtagccaaatgtaggttggcatgaaatgaagccagttgtaattgcctttagattccgtggaaggaaaaggtaggtccccagctcctgcaacaatggcattctgaatcaatgggactgcagaatttcttagcaaaaataccattccagtaatgcaagagtgcaacgtggtatcattacagtaggtcatagtggcaaaatattttatcaggttaggaagaattctgctttttgctttcccaaacggactgctttggtctttcctcacgcttggcagaacagtgaaaggccagtctgtcatgacgtttgaatgctgaatagtataaccattgtggcatagagggcgggaggctggacttgaaatgggtgagctggattctcccaccactcgggagttaatggcaagtcacttggccactctggtcgttttggcagctgcaaggtaaaatgaaaatatatgacagatatctggaagttgatacaaaacaccatctccaccagaactctaagattccaggccaaaataatacttggcttgagttagctggatgagcatctcaattctccaatttgtctttagaggcacttctgcttcccttttccccacatgggatgcagaagagccagataaaccccttgaagttgtttagataaatgtgccaggtgctaagctcagggttattaggaataataattcagtgaaaggaaatttggatgacatgaactcatttccattagacttgagccacacaaatcaatgggaaaagaaacagctgaatccaggataatatctggctatttggagtgggcatgataatggagggagattggggaggtaacaaaccagctactattaagttcaagtcatgtcagttattcaaattcaggaccagtggaacttgtccagtatcatcaagcagccagttattatcaaaacccaagtctttgtctcactcacggtccacaccccgcccagagtcgtatcacttgactgcatttgaccattcagttttcagaccaactccattgttactagatatcctgacactgaagaagctaaaaccaaacaacaatgacaacaacaaacccaagtctgccttatggcagattcttcacgtcgtaacaccttccttgggaccctatttctcagtatggacctgactctcccagggatcctagaatgcaagcatagtgattgcaaaccagaccatttgagggaaactcctccagtaagcaccctgcatggtcacaatgtaaaccctgcaggggcagaaaaatgataagctttgggtcgggtcggaaagccatttcccccacaatcaaagttccttagtgttttccttgtgggggcgagcttatcttcagttaccttttccggtcctctcttgcaacccctctccctctcatcagctgaaaattagtggatgcagctagggctctgaaacacataaataatcataagatgccagataaactgtattggttttaaattagagacgtgccgaccatgtctccctctgaacagcagcctattatttttaattatggcttgcaaagcaaagtgatttcttgccctctttatagcatccctgacagtattctgtcagtttggatgatatgatgcctcatcactgcacacgtccctagccacagccgcaactgttactcaaaaggtgaatgaaagtgatcagctgcactctttgcaacttacattttgaagtgggctgggaggaaatgtacccccttacctgtggtcccattgtaaatctgggtcaaatatgacatttagaaaaaggttttcatgggatctggatgaattaatgtgttatgtgtttgtgctaagtatgaatgtatggtgaggagtgtgtgtgtgtgtgtgtgtgtgcattaaatgttttaacacaacattgccaacccttcccctagcagcaccgtgggcaaagcataaagggatgatctggcagcagccccacttgggttttctacctgatggaccacaattaagagtggttggtttgtcagacagaaggttctacaaacgatttggtatcgaattacattatacatggagaagttgaggggttggatgaatttgttcttgcacgttcagaaggataccatctttttctctgtgtggaagaggcgcctgccacgacgtattgatatgtgtatttattttccaagcctgtccctgtatgaggtgtcaaaagttacaccagctttacaagcggagtttatgaactcgtttttccaggatagtcacattatactttttacagtcatgtgctttcagcccagtaccctttgctatgccaagatccagctgaaactgaaccaggtgggggaggcctgctaatgcccaggcagtcgaaatgacgccatctcatcactccttttcttaaaatttttttttgtctttcttcttggatttccagcaacagggagctgccaccaccgtgtactgtgctgctgtcccagaactggagggtctgggagggatgtacttcaacaactgctgccgctgcatgccctcaccagaagctcagagcgaagagacggcccggaccctgtgggcgctcagcgagaggctgatccaagaacggcttggcagccagtccggctaagtggagctcagagcggatgggcacacacacccgccctgtgtgtgtcccctcacgcaagtgccagggctgggccccttccaaatgtccctccaacacagatccgcaagagtaaaggaaataagagcagtcacaacagagtgaaaaatcttaagtaccaatgggaagcagggaattcctggggtaaagtatcacttttctggggctgggctaggcataggtctctttgctttctggtggtggcctgtttgaaagtaaaaacctgcttggtgtgtaggttccgtatctccctggagaagcaccagcaattctctttcttttactgttatagaatagcctgaggtcccctcgtcccatccagctaccaccacggccaccactgcagccgggggctggccttctcctacttagggaagaaaaagcaagtgttcactgctccttgctgcattgatccaggagataattgtttcattcatcctgaccaagactgagccagcttagcaactgctggggagacaaatctcagaaccttgtcccagccagtgaggatgacagtgacacccagagggagtagaatacgcagaactaccaggtggcaaagtacttgtcatagactcctttgctaatgctatgcaaaaaattctttagagattataacaaatttttcaaatcattccttagataccttgaaaggcaggaagggaagcgtatatacttaagaatacacaggatattttggggggcagagaataaaacgttagttaatccctttgtctgtcaatcacagtctcagttctcttgctttcacattgtacttaaacctcctgctgtgcctcgcatcctatgcttaataaaagaacatgcttgaatatcatcacctgaagtttgtattgtttctttaaatgtttgtttcagtttgtttttgtttttcattttttagaaaagaaatctagaggaaaaataaagcgcttctaataaagcgcttctcgtagatgccaggaaaacacgattcttgtttcttctctgagtgagtttgtgttttgtttttgtgctttgtggctgtccgtgggccaagttgtctcacgcgattagcatgccagcatattttctgttaaagaaagaaaaaagaaaaatgactattgtttcatttcaccttaagatgttttgttattacttacttacagtgagttattttagtcctcaatggtctgctcccctgcaattagcaagtacttagtgattagcgggtatctctatgtttgagaatgggagctgtgcagaagctcttatctgcgcatcccatctcatggacaccatgatttccagcccgttccagcaagcacatgagaaagtccactctggcaagacggagaaaatgcttctgctgaaataccaggaaggtgtggaggctgggtgtcattgttccccctcctgatcatggcagcttcaggccagacaatgtcttgaacttctgtgcctctgcatctgtggtgcagagcagtcgaacaaacaaacaccattgccctccagtggcccatagccttgccacatcctcccatctggctatagtcttccttacgtaatccttattatcacaggacctttgaaactatgaatcagataatgtcacttttcagacattattgtcatttgcaaaagcagccgtcagaactccactctcagaatctacacctggaggggatcacccctcccatatgacctctgactttggccatgtgactggccttggccaatttggaaagtgctttgcactggggcttgcctttccttgttgatctttggaaccctgcaacttccatcatagggaacggctcctgggctagcctgctggatgatgagagacacgtagtcactcccagaaccggcatccagcagttagttagttagacatgtaagtgaggccatcccagactatccagccccagctgtgccaattcagaggagaagaaactgcacatttcactcacagcaatgcaaaagatagtaaaagtttattttaagccactaagtttcaggattacatgttactcagcaaaagctaactgatacagcttctcagctcactaaggttaatttttttctaccctacttctcttataatttggtctccagctacctctctaatctcaacttccagcactttatccactagaagccactctagtcttcctctgttcctcgaacatgccaagcacactcccaactcaaggggtgcatatttgctgtttcctctgctgaaatgctttccttccagaaaccagcatgcctttcttcctcactgatttttagtctctgctcacgttatccctgtcttcatggtgtcaccccattcttattccccttcccctctatt

SEQ ID NO: 674 - DNA, 182457 bp, Homo sapiens
  source 1..182457: mol_type = genomic DNA
tgtccagaacatcagtcaagaatgtctatttaaaatgttcttggaggccgggcgcattggctcacgcctataatctgagcactttgggaggccaaggcaggtggatcatctgaggttaggagtttgagaccagcctggccaacatggtgaaaccccatctctattaaaaatacaaaaattagccaggcatggtggtgggtgcctgtagtcccagctactcaggaggctgaggaaggagaattgcttgaacctgggaggcagaggttgcagtgagccaagattgagccactgcactcctgcctgggctacaagagtgaaactctgtctcaagcaagcaaataaataaataaataaataaataaataaagttattgggcaggcacagtggcattcgcctgtagtctcagctacttgggaggctgaagcaagaggactgcttgaagctgggagttcgagcccagccaaagcaacctatccagacccatctcttaaaaaaaatatttctctgccaggtgcggtggttcatgcctgtaatcccagcactttgggaggccaaggtgggcggatcatttgaagtcaggtgttcgagaccagactggtcaacatggaggaaccctgtctctactaaaaatgcaaaaattagccaggcgtggtggtgcacgcctgtaatcccagctactcgggaggctgaggcaggagaattgcatgaaccggcgagacggaggttgcagtcagctgagactgcaccactgcactccagcctgggcgacagagcgaggctccatctcaaaaaaaaaaaaaaaaatatcatctatctatccacctacctacctacctacctacctggattataattcattaagttctctgtgccctgtagttgtagattaagggaatgcgattggattagtgtggaggggctttttatggagccaagcaggagtttttaagcttttgtacttttgcttcatgtcacaaggacagatgccccacaaaggctgagatgtttgtggtcctggatcttagaacagtgcctggcacataataggcataaggttgccaggaaatagaaatacagatactcaattcaatttgatcttcagataatcaaaaaatactttttttagtataaatatgtcccattctgtatttgggacatacatattacactgttgtttatctgaaattcaaatttaagtgggtgtcctgtactttatctggcaaccctactaaaggagctcaattaagtatttgctgacttaacagtctgaaggtctcgtttcacctgtaaaatggggctagtacctgtccctgcctctataaggttgatgggcagagtaggtggcattcagtgagccctcaatttatttgattgcctgggaccatccggtgagcagaaacccttccactttcaactacagagacgataaaaaggcctcctcgaggccagaggtgcccaggccaggcctaggtggcccgcacctgcgagcctggccagcctcttccgggtcaggtgaccgcgcgcggtcacgtgacccggcccgagtgcgggcggtggaaggcggaagtaggagaggagttcggcgccgcttctgtggccacggcaggtagcgagcgctggcgcggggggcgcggtgggctggctgcctgcacggggcgggccgggggcggcgggcggcgcggggtgggccgggggcggcgcggcccgggcgtcggggggcggcggcttcctgtgggaggggcctggcgcggcggttccggcctccgaggaggggtgtcccggctcccgcccgagtggggtgggcgcgccgcggcccgcgcgggggttgctccgaaatgggtgccccggccgccaagggtgcagctggagcgagtcctcccggaaggggagaggagcttaggttcccaggcatggagaggagcgatctttgtggagggatcgggaccaggggaaggggcgacttggaactgagctggaagggggtgcctgaaaatgggtttatggcgtggagccagagggaaaaagatgctgcctggaccccctctgagagtctctcccttccttcctgtttggaaatgattgttacccgagactttgatgacggtcccattcagtttttaaacttcaggagggatcacagaatcttgatcgtcttgcttccctcgcgcccacttagtcctgcgtgggtagggtttccacttcttgggagcctagcccttcagctcatttttctttgagattttccctgaacgggccatcatcgaggctttaaaaaacaaaaaaagaaaataaattaaaaaaataagtgtgggcactttgcctgtaaaatggcttttagcttacactgttgacctagcccagcgttacctcagcaacatagtgactgctgaaatcttggacagagaagtgtctacctagactgctttatgacttttctctttcttccgtttaaattattcagtttcccttagcttatcttgtgactgcttatcttgacgaactgtaactaggtagggtgcctgagaggtctgtgttatgttccttagaactgtgacctggatcatgattttgagattgaatacttgtgttaaagcctgttcatcttcctgtttctcatgtttactaaaatttgcagaagcaaaaggagtttcatgagtgcagtgtaactggaacgaatgttcaaactggacattcacagcagccagcatcgttttgggttacaagtaggaaaaagtactttcctaatgtattatgagttcaagtttttggagttatttgacaaacatttaaaaattagtttttgcagcagcgcctatgagtgaggttgggaagatgtattctcatttcacagggaacaaacagacttacgagagacgacttgattttttaaaacaatttattgctctttcttgtttgctggcctcttcctgctagattgcaaatccttcaagggcaggtttcatattttatttggctgctagcctagtgcctggcatgttgtgagcacttgataaatatttggtgaataaatgcatttctaaaagtcacaccggcgtaagtggtgacaaaggatttgaacccaagtcttctactctttttcttgtcagagaagcttgtgattatctgtgtcattggtccatatgaaaacaggctcgagagaaaggcttggattggcttctcagtctctttcacttcatgattactttcccatttacaaagagcgtataccaacatctcacttaaccttccctttgaaattgggatggtcagtattgtccctatatcacatgaagagactgaggcttaatgaagtccttactttagatttcagagctagtaaatgagtagggactcaagcccagacccttaatccttagatccattctttttcatttattgacacaatagaaaattttatttttattttattttgagacaggatcttactctgttgcccaggctggagtgcagtggcacaatcacggctcactgtaaccttgacctgcctgggctcgggtgatcctcccatgtctgcctcccaaacagctgggactacaggtgggtgccacctcgcctggctaatttttgtagagacaggggttttgctatgttgcccgggctgttttcaaactccggggctcaagcgatcctcccacctcggcctctcaaagtgttgcaattacaggtgtaagtcaccatgcccaactgaaagttttatttttacataatttttcaggaataaaaagtgtaacattttaaggaaaaagatcacacagaaaaagttgtgaatgtagaatgtgagtaaatgaagtttagaaaacgctgtactctaccatagcttcctcttcctgggaaaacattctttcattcagtgaatatttataagtacccactctgtctttgccaggcattgttgtagagtccagtatggtgtacactagccacatggggctgctgagcactggagctatgctgtgagcataaaatacattctggattttgaagacttagcatgaagaaaagtaaaatgtctcattgatactttttatgttatagtaaacgatcatataatgtataaacatgtatgataacattttggatttattgggttaaatacaacgtaattataaatagttggtcagacatggtggctcatgcctataattccagcactttgggaggtcaaggtggatagattgcttgagcccaggaatttgggaccagcctgggcaacatggtgaaaccctgtctctacaaaaaatacaaaaattagccaggtgcagtggcgcccgcctggctactcaggaggctgaggtgggaggatcacccaagcctggggaggtggaggctgcagtgagttgtgatcgtgccactcattgcactctagcctaggtgacagagtgagaccctgtctcaaaaaaaagaaaaagaaaaagaaaaaaagtttcacctttttgtctttttttttcccacttaaccttgacttgaaacccagcacttttttctttttaaaatgtatttcctagaaaaataaaaaattataaatgtggcttgcacttgtggctcccatcttatttctattggacaaacctgttctgaatgccaggaatatagcagtacaagaaaggtaaggatccccacccttgtggatcttcaattttattagagaagggcacattgataactaagtataatatgtattatgttgtaataaagcagggaagagggatgtaggttgcagtttaaataggatcctggccaggtgcggtggctcacgcctgtaattccagaacttttggaggctgagacgggcggatcacttgaggtcaggatttcaagaccagcctgaccaacatggtgaaaccccatctctacccaaaatacaaaaattagctgggcttgttggcacatgtgtctaattccagctactcgggaggctgaggcacgagaattgcttgagctcgggagatggaggttgcagtgaaccaagatcgcgccactgcactccagcctaggtgatgaagtgagactccgtcttgcttttggagagatggggagttgggggcgggggttctcacttttgcccaggctggtcttgaacacttggcctcaagacatcctcctgcctcagcctccgaaagtgctgagattacaggcatgaaccattgcacctggctcagtctcttaactctaaatactatccacatgctaacagcttccatatgtgtgtctagcctaggcctgtctcgagacttctagatctaattgcccacaatatcttcacgtggattcctatcaggcattttataatcaacatcaacaaaattgagccctacacctgcccctcagacagccttccccatctcagttaatgacaactccattcctccagttgttcaagccaaagaccttggagtcacccttgactcgtctcttcctctcacaccccacatccaactcagctcgtccacaaagcctactggctgtacttcagagtacaccctggatgcatctttcccctggatgatggcaacagcctcctaacttgtctccctcttccaccctggctggccttcactttctccacacaggacccagggcaagtctgttaaaaggcagggtggatcctgtccactccactgcccaactcaaaccctccaattgtcccagcttaactggagtgaaaaccaataccctacaatggcctgcaagccttccatgacctgatctctcctcccacacccaccaccaccctgacctcctctctccactcctgcttactcaatcccctccagccacactggcctcctgactggtcccaaaacctgccagtggtactccttatttggggcttttgaactctgcctggacccttaagcccctattcagccacatggccccttccttccctcacttcctcagatctttactcaaccatcaccttcagagagaggcttttctagggatcctatattttactttattatttttggagtgttgttctgttgcccaggctggagtgcaatggtacgatcttggctcactgcaaccttcacctcccaggttcaagtgactctcctgcctcagcctcctgagtagctgggattacaggcatctgccactatgtccaactaatttttgtatttttagtagagatggggtttcaccaggttggtcaggctagcctcaaaatcctgacctcaagtgatctgcctgcctcggcctcccaaagtactggaataggggttttgttttttttttttttaatctttttgaaaaccacaagctaatgggtttcttttttcttaatgaggctactcttccaactgtgcatctttatagcacccctgaaatcaatttgagtgccaatttctggaattagtctggcttcctgggttggcatccagtttaggcctccaggatggatggataatgggctttttatgtttgaaatatgtattggttttttcaaacatgtattgaatgcatgttgtttgtcaggcatcccaccattttatacatttaaccttgttgaggtgaagtgaccctcacgaggtcagatagctaagaaatgaaagagatggccatttgaatcttggtcttcagagtccacatctggtccttctaccacttatcattagtgagatgggtggagtggctatataaacataaactccctttggaatcaaatcagtgagttgcttttgagcgactttgagtcccttaggactattatgtgtcacaggcagaaagggaatttaccaggtaaagaaaggcagatttattaaagtgaaaacacgttgcaagaaagcaatgggcagcacagcagagaaggggctgtctgcaaagaggcaggagatggagggaagttttacagggttgtgctggagggggctatgtggggattgatgcatctgagggctgtttgtgattaatcatttctcagaacgactgtccatggctttcccctacctgaggccccttcctcgttgttgcttacttatcttattaggactccacattatggactctgaaatttcttttctttcttctttatttgttttgcttttgagacaaggtctcattctgtcacccaggctgaagtacagtggcatgatcatggctcactgcagcctcaaccttttgagctcaagtgatcctcccatcttagccttccaagtagctgagactataggcatgtgccaccatgcctagctaatttttaacttttttgtagagatggggtcccactatgttactcagactggtcttgaactccgggctcaagtgatcctcctgcctcagcctcccaaagtgtttggggttacaggtgtgagccaccacaactggctagggctctggaatttctgaaagatgggaacaaaagggaagatgtttcccctggatgatgggacaggttagattctaaccaaaatctttttagaaggttgcagttccctgtttttcaccccaccgcagtttatagcaaatattcagtgatttaaatcattactactaataataactattaggaaaataccagccaggcatggtggctcacacctataatcccagcactttaggaggccgaggtgggtagatcacctgaagtcaggagtttaagaccagcctggccaacatggagaaaccccgtctctactaaaaatacaaaaaattagctaggcgtggtggcagacacctgtaatcccagctacttgggagcctgaggcaggagaatcgcttgaacccaggaggcggaggttgcagtgagccgagattgcatcactgccctctagcctgggcaacaagagcgaaactccttctcaaaaataattaaataaataaaaaataacaagtaccaagacatggcagtcctgacctagggcccgtcctcttcctcaagtcacccatgccttttgcttcttgttttgtcttcagatctgctttccagtcagcctcttttattcttagcctgtaattccacggggcttccaatagtgtacctccctgctccctcccgttttctctttttccgtgcttagtctttgtaaggatgtcatttggcaaagttgattctgtttgattgtttttcaatatgggcctttggagaatggaaggtagtaactcaatgctggacagaggaaggaggccaagaaagaagcattagtgttggagtagcatgagcctgtgaagaacaggagaatcttttggacagagcttttccttgcatatctttcaagaaatgagtgcaggctgggcgcagtggctcacgcctgtaatcccagcactttgggaggccaaggcgggtggatcatgaggtcaggagatcgagaccatcctggctaacgtgatgaaacccatctctactaaaaatacaaaaaactagtcaggcgtggtgacaggcacctgtaatccccgctactcggaaggctgaggcaagagaattgcttgaacccgggaggtggaggtttgcagtgagccgagattgcaccactcactccagcctgggtgacagagcaagactccatctcaaaaaaaaaaaaaaaaaaaaaatagaagtgggtgcaaggtttatctctagttagaaataagctctgcctgtttctacagctggttaattagaaataaaatctttgtgaacccatggattatattgaaaaaaattttttaaaacaagaaataaaatattgatactggtgtgtaatttctgcttttccctggctccttctacacaggtcttttcatctcaagatcggtgttcactggtttcttgactcagagctgggtcaagaattttaggaattgaggtgcttgtaatgccagagccaagaatttcagtatcgagaagtggttttgtttgtagttgatatttgaagagctcttactgtgtgtcctctgctttacctgaattcatgtagtcagtacagtaatcttataaagtaagtactattattgggttcatttcacagatgagaaaactgagatttagagagggtaggtatgattttgtgaaatatatatttagtcttcctcccatttcctggcctataactcctaaaatcattgaaatctcccaagtgatcagtgtcttttttttttttttttttgagatagaatctcgctgtgtcgcccaggctagagtgcaatggcataatctcggctcgctgcagcctctaagcgattcccgtgcctcagcctcccaagtagctggggctacaggcacatgccgtcatacccagctaatttttgtatttttagtagagatgggatttcgccgtgttggccaggctggtctcgaactcctgagctcaggtgatctgtctgccttggcctcccaaagtgctgagattacaggtgtgagccaccacacctggtcagtgtctttttgtgtgctaataattgacctttggttggggactcctggatagtctcaggatttgggggccagtggccagggaaaccagccttgtagttagagggttggcacttttagtcccacacccagcctctgggacagggagagggactgaaagttgacttgatctgcagtggcagtgacttaattgatcatgcctgcgtaatgaagcttccataaaaaccctgaaggactgggtttggggagcttctggatggctgcacacgtggaggttcttggaggatggcaccctcagagagggcttggaggctctgtgccccttctcacatgcctcgccctacgtctcttcatttgtatccttcataatatcctttataataaatcagtaaatgcaaataaagtgtttccttgagtcctgtgagttgctctagcaaatttatcaatcctaagaacctcgatttatagccggttggtcagaagcacgggtaaaacaacctggagcttgcaattgatgtcgcaagtcaggggcagtcttggggaactaaacctgtgggatctgatgctatttccaggtggatagtgtaggaactgaattagaggacacccagctggtgtctgccagctgcagaattgattgcttacttggtatgtggggctcccacacatctggtgtcagaagtattctgtggggctgggcgtggtggctcacacctgtaatcccagcactttgggaggcagaggtaggaggatcgcttgagcccaggagtttgagatcaacccgggcagcatagtgaaatcctgtctctattaaaaaaaaaaaaaaaaggtagtattctgtgttgtgagagtatagcaggaagaaactgagtttgctttttcctctccatcctctcagtaagtaacttgctctggatcactcaaaggcaaatgagtggttcagcttattagcctccagaagattgacaggtctgaaaggttgttgctgaggtagggtgataaaagtgatcaggtgcttcaggtattgcaggagctgccactagcttaatctgatgtgtagttgttttctcctgtcaaaagttctgtaataattattatttttctttttgagatgaaatcttgctgtgtctcccaggctggagtgcagtgtgctatcttggctcactgcaacctccgcctcccgggttcaagctattctcttgcctcagctcctgagtagctgggattacaggtgcctgccaccatgcccggctaatttttgtatttttagtagagacggggtttccccatgttggccaggctggtctcgaaatcctgacctcaagtgatccacccgcctgggcctcctaaagtgctgggattataggcatgaggcacagagcctgaaggactgtagctttgtagtaagttttaaaattggaaagtgttagtcatccaactttgttctttttcaagattgttttggcgattctgggttccttgcatttccttactttaggatcagcttgtcaattgctgaaaaacaattctctttttctctctgtttgtttttatatctggctttttggccaaggacttctgcaatgtttgttgacatttaggtgtgaagtacacatgtatgctaggacccaagtgcgggaaggtgagttgggtgggggaaattgaccttttcagtttataatgtagactttcactgtctcgctgggtcaatatggtgccttatccctattgtcaactatgcctgaagtcttgagtttggtttcacctgttgagaaactaaaagtctttttagtcttttttttttttttttttttttttttgagacagagtcttgctcttgttgcccaggctggagtgtaatggtgtgatcttagctcaccatgacctgtctcccaggttcaagctattctcctgcctcggcctatcccaagtagctgggattacaggcacgcaccactacacctggctaattttgtatttttagtaaagacagggtttcatcatgttggtcaggctggtctcgaactcccgaacttgggtgatccgcctgcctcggcctcccaaagtgctggactaaaagtctgcttgggattaggaaggggcaactgcttggttgaactgggtggggaggggactctgggactctaatcattcccaagataggcttttgccagtcctcctgtttttagccccacttctgcccttactttcggaggtacctgtactactgatgcagggcacgtgagccccaaaactgggggttagtctgggtaggttcttggctttgccctggaaagaattcaagggcaagctggtagtagaagaaaacagctttattgaggcagcagagttacagctccgtgactgctcctgcagagcagggctacgctataggcagtgtgtccctagtagcagctcaggggcagttttgctgtcatatttatacccagttttaattatatgcaagttaaggagtgggctattagacatttctagaaaagtggtaacttctggggcattaccatggcattggcacactgtcatggcactggtgggtgtgtcttgtggggaggtgcttttggtgcctcttccctgtttcagccagtcttcagtctggtcctgagtcgagtcctccctcctgcctcaccaccagtgattgaccctttctggaattcttcattgccagtctgcttgccttctgttgacctctcttgtgggcagctaagtttcagtttcgacacactggaaccattttccaaaattttgctgctgtttccgttgtgtttttttccctttctgtgggttttcacctttttgtattgcttcctgtcattttgatggagtttgagaagggaacagagataaatgtatgtgtagtctgctctgtgtattgagagctcctggaaggctaagggaagaactggcctctgggaagacgctagtgtcgctactactttgtttccttagcaacagtcctgacggggagctccttcattgtattctgttcctaccgatacacgttgctccttttttttttttgagatgactctcatgctgtcgctcaggctggagtgcaatggcacaatcttggctcactgcaaccttcgcctcccaggttcaagtgattctcctgcctcagcctcccaagtagctgagattacaggcactcactaccacacccagataatttttttatttttagtagagattgggtttcactatgttggccgggctgatctcgaactcttgacctcatgtggtccacccacctcggcctcccaaagtgctagaattacaggcatgagccaccacgcccagccaccttttcttttttttcttttgaaacagggtcttcctctgttgctcaggctggagtgcagtggagtgattacagctcactgcagccttgacctcctgggttctggtgatttcccacctcagcctcctgagtagctgggactacaggcatgcaccaccatgtctgactaattttttgtattttttgtagaaatggggtttctctatgttgcctagactggtctcgaattcctgggctcaagcagtctgcccacatcagcctcccaaagtgcttggattacaggcatgagccactacacccagctgccccagtttttcatttgcataattttctatgcaaattttttgcatttttttagttcagccaaattagctgaggtctaaagcactccttttagtgcagtcacattagttgaggtttcaacaaattcattaacagtaaaccagtggtcctcaacccagcttcatattaggatcacttggggaatttttaaataacacagctgtccctggcccaccccagaccaattaaatgggaatctctgagggtagggtttggtggtcagtgttgtttttttttaatgctccccagataattcagatgtctagaaaggatggagaaccactgctccaaggcatttgatccttcattaaggataatttaacctaactctacacattcaattacatctgttatcttattgttattctttccatcttacatttccacccaacattggcctctttccttccttgtattccccagacatgctgtcacctcaacagcattttttttttgagacagggtcttgctctgtcacctagctggagtgcagtggcgtgatcatagctcactgcagcctagacctcccaggctcaagcgatcctcccacctcacctcagcctcccgagtaactgtgactacaggcatgtgccaccatggctaatttttgtggtttttgttgagacgaggttttgccctattgttcaggctggtctcgaactcctggattcaagtgatccacctgacttggcctcctaaggtgctgggattacatgcatgagccaccactgctggccatcatacccttttatctatctgaatgttttgcagatactctcagtttcttccttcagcttcttcagatctttgctcaaatgtcaccttctcagtgagaccttcctgttcatgcctttttaatttctattttggccaggtgctgtggcttacgtttataatcccatcactttgggaggccaaggcaggaggatggcttgagcctaggagttcaagaccagtctggacaacttggtaaaatcctatctctactaaaaataccaaaattagccaggcatggtggcatgtacctgtaaccctagctactcaggaggctgaggcatgagaatcacttgaatctgggaggtggaggtgcagtgagctgagatcacgccacagcactccagcctgggtgacagagcaagactgtctcaaaaaaaaaaaaaaaagaaaagaaaagaaaaagtgaaaagcatgcaaatttatatcatataaatttacgtgactaagacctggagaaacagataatgtgtatttatgtttaggtttgatgaagagtggacaatcgtggagaaatacgattggacaaaaggggtatgattgactggtaatacactgggggaaatttaacaagtcctatttgttcagattcttctctgtgtccttttgttttcagagaaggatatttctttccttggggtataaggagggcatctctcaaaggagggtcatatgacccgtttcaggggaaggtcagaaaatctttcataggctttatgacctgctttatgggagaagggtgagaggaagctgagagtgacttcctgcttttcctgttttcttaaatgccaaggtgtcatgttttggggtaaggtatcttaaaccccatcagccatgtcctgtctactgatgagcccatcaaggcattcttcacttctattacagtgtttatgatttctagcattttctgttgactcttatagttgctatatctctccttacattgcccatctattctcatgtgttgtctgctgtttccattagagccctgaacctagtaatcatagttattttgcattacctgtttgattattctaaaatctgtcctatctgagtcaggttctgatgcttgctttatttctttttcacactgtttcttcttgccttttagtgtgttttgtaatttttcattgagagctagacattgaccttcttcctgctgatcagttcctcttccttacccctccctagttcttgtttaaaaaagaaagctggacatgatgtattaggtaataggaaatgagataaatagtccattagtattgttagtatggtgtttcatgttaatctggctaagagttggtctgtgtttaatgattgctgtaactgttggtatctgaggcttcaaattcctctagtgtccttgtttctgtctcccctgttatctttggttttccctaaaaactccttcttaaatagagtgtatgcctttcagccctaattccctgttgttgtactggagccctgttggtgtgacagcaaagtatgggggaggggaagcattctatagcctcatggtcaaatcctagtcttttagtgggcctgtgtcccaggctatgactgtcactcatatttaactgtttttctccccttagatgaaacagaaaggctaaagagggctggagtcaggggacttctcttccaccaggtaggataaggctctggtaaagtcttcttccctggagagtaggccattgctctgggcctatttcactatggttacttcccacaactagagctaggagggaatctttcttgactctttaccaggataatcttgtaaagaaggattttttcttctgttttattcagcagtataccactagcaccaaaaccagtgcagagtacataatagatgctcaataaatatttgtcaaatgaatgaatgcctcttatctaagctctagagattgttacctagatgtgggaagtttcttaacttataatgataataggccgggcgcagtggcttacgcctgtaatcccagcactttgggaggccaaggtgggcggatcacctgaggtcaggtgttcgagaccagccttaacatggagaaaccccgtctctactaaaaatacaaaacattagctgggcgtggtggtgcatgcctgtaatcccagctactctggaggctgaggcaggagaattgcttgaacctgggaggcggaggttgtggtgagccgagattgtgccattgcactccagcctgggcaacaagagcgaaattccatctcgaaaaaaaaaaaataaaaaaaattataataaactgatgacatttctctgaatgaaattagtccctagtgtagtatttgcttattaggttctgtagtgtttgtttaatctaaaaccctaccttagatgggattgttgtagaccagtagtctcaagcttttttgactgcaacctttagtaagacatacattttatatcttaaaacagtatatgtgtgtgtgtgtatatatatgtatgtatatttattttaaaacagtatatggatatatatatacacatatgtgtatatacaatacacatatggatatatatacacatatgtgtatatacaatacacatatggatatacacatatgtgtatatacaatatacatatggagatatcatatatgcacctattaatatatatacatgtatatttatttggtaaaactttttgtgaaataatactttcctttgtgtgtgatatacttttatattttctttttttttgaaacggagtctcattctgtcacccaggctggagtgcagtggtgcggtcttggcttattgcaacctctgcctcctgggttcaagcaattctcctgcctcagcctccttattaactgggattacaggcacctgccaccacgaccagataatttttgtgtttttagtagagatggggtttcaccctgttggcgaggctggtctcgaactcctgacctcaagcaattcacccacctcagcctcccaaagtgttgggattacaggcatgagccaccgtgctcggcctatattttcttttaaaaaaatctttttatttattatagtttggtatacaacttttatagtttctaccctattagtttgtattttatttttaaaatgcttgtcaagatttatgtagaggataagttcagaggaaatatgttgtttgtatttatattatatataaatatgttatttatatttttgagaccaagtgtggtggctcatgcttgtaatcccatcactttgggaggctgaggtgggaggattgcctgagctcaagagttccagatcagcctgaacaacatagggacccccttcatctgtacaaaaaatttaaaaaattaggtgagtctggtggctggtgcctgtagtcccagccttttagaaggctgaggtgagaggattgcttgagcccaggaggttgaggctgcagtgagccatgattgtgccactgcactccagcttggggtgacagagtgaaaccctgtctcaaatatatatatatatatatacacacacacacacacatgtatatacatacacatagatacacacacacacacatatatacatacacactcatactataaataaatatatatatatatatatatttttttttttttgagaaatttcaatagatctaccagacttagtaaagggggacattttgactttcccatccccctcccaataagtccattagtttcttcaataatgaaatactttgttcatctggtaacctttagttatattttaaacattgacccccttctccctcttccagcaaagcttatgctcactcagagttttggagtgattaggatgcaattactttccatggctattagcaggggagaaattacttgagtacgtgtacggagtcatctgttcgtgttgctgagacagagtgtgaagtctgggcctcaggtttcctaagcttcttgtagtggatagtggggatttggacctaatacgcattaggaaccttgtctaagatgggaggcaaaagctgagaggtcgaaagtactttgatggggatgggatctgttcctttctatagttacggttatttctcttgagacagagtctcgctctgttgcccaggctggagtgcagtggtgcgatctcggctcactgcaacgtccacctcccgggttcaagcaattctcctgcctcagcctcccgagtagctgggattatagttgcgccaccactcctcgctaatttttgtatttttcatagagacgggggtctcaccatgttggccaggctggtcttgaactcctgccctcaagtgatccgcatgcctgagcctcccaaagtgctgggattacaggtgtgagctgtcacacctggccggttatttatttatttatttattttttgagatggagtctcgctctgttgcccaggctggagtgcaatggtgcaatcttggctcactgcaacctccacctcctaggttcaagaaattctcctgcctcagcctcccaagcagctgggattacaggtgcccgccaccacacccggctaatttgttatatttttagtagagatggggtttcaccatgttggccaggctggtctcaaacttctgacctcaggtgatccacctgcctcggcctcccgaagtgctgggattacaggcgtgagccactgtgcgtggccccggccggttatttttctttatgcatcaattggaaaggttttacaattccaaatgcctacattatataatgtcagggtggtatcttgctcattagatctggaactccagacaaagctctatagaataacatggattactgttatataagcagtggactgcaattttaaaagacactggagaaagaaaacatggtgatgttttatctaccctgtttctcctgccttcccagttgcctttgttccttctgagccttctttagaatttatctgattgttttagttttgcggccctgaagtgtagatcaaaaagtttggtctttcttctgttgaacaggccatgtatgggcttcaagttccattctctaagagtcaggaccaaaggctcaaaactgctacagttcaggagaacaagatagtttaaaaactaccattagttgagttgccttaggaaagaaagagtcccaatagaagtaaagatttctaaaatattctttcatttttaaagtctgtaaataatggatttccagcgtttagtgctttaacccctgttaactaaaagccccaaggctcaatttataattatttataatctttcctgcattattcaagatacgatcttttgcttccccttaaaattattgttcaattatgaaagagatcaaacatataaaatggttagagatgaagataacaaacagtcataaaaaccaccatctggatttaatgaatatgaacattttgccatatttgccccagaacttttttctttgaaagataaaatgttgtagatacagttgaggttcctttggtctcttccccactccaattcccctgctccctcctcccctaccctagagggaacttctgttctgaacttggtgtggttccttcccgtcgtacttttatacttttaaacgtttgtgtgtccacaacaacaacgtatacagttgttttgtgtaagttcaagtgtacaccaaagacatcgtactaaggctgccacttgccttttttttttttttcccctcttggcattatcatttgggatttgtacatgtggattaaattcatatatttcaggtactatatagcattccattttagaaatatatcaatttatccattcccccattgatgggtatttaagttgtttataattttttactattacaaatactgctatgatgaacatccttgaacatggcctcttctgtgtgtgttggagaatttctccctctgcaaatgcctgggagtagaatcctggtgggtccaaaattacgcgtctttaactctgccggaggttgtcagctgccatctaatgtgcgctgcctccacaggcatgtgagacttctctccaacactaattgtcaggcttctcatctctttctaatctgatgagtagcaaagagagttgatctttttactgctttgccaagacaaatttagtctaagtgagtcaaaacatcatctttttggcctggtgaaatggctcatgcctgtaatcccagcactttggaaggtggggctgggaggattgcctgaggccaggagttcaagactggcctgggcaagatggtgagatcctatctctacaaaaaataaatacataaattaataaaaaaggaaaaaaatcagctggatgtggtggcaaatgcctgtagtcccagctactcaggaatctgaggcggaaggatcactggaacccaggaggtcaaggttgtagtgagctatgatcatgtcactgcactccatcctgggtgacagggctagaccctgtctcaaaaaaacaggttggtcctgtggtagtgggttatcagaacttattaacattagtgtcactaaagtttgtatacaacccctgaatgctaaatttggctttaaaaaaggaaaaaaaaagaactgagatgggagtctgtctgcacgttcaagggatagttgaacagtgaggaggcctgtgtggcagtaatcacagcatgatgagggtggggggatactggggagcaggaagtgggccatgaggtcagagaggggtgtggaaatgggggaaggtattgcataggacgtcaaagttcatttgcaggtctttggcttttactctttttttgtttttgtttttcaaacagggtctcactgtgtcacccaggctggagtgcggtggcacaatcttggctcactgcagccttgacctcctgggctcaagggatcctcccaactctgtggtcctgattagctgggtccacaggcatgtgccatcacactcagctaatttttgtattttttttggagagatggagtttgaccatgttgcccaggctggtcttgaactcctgagcacaaggtgatccgcccgcctcagcctcccgaagtgctgggattataggcgcccgctggcttttactctgagttagacggtgtcttagttcattttgtgtttctataactggataatagaaacgggataatttataaagagactaggtaatttataaagaaaagagatttattctttgtatttgagtctgggaagtctaaggtggagggcccacatcctggcaagggcctttgtactccacatcccaagtggaaggaaaggcaggagagctagagagaaacgtgaggggctgaacttgcttttataacaaacctgctcttgagatagtggccccagccctgaagtaacatcaatctgccctcatgatccaatcacctcttcaaggccccacctctcaatactgttaagattaaattttcggagccgggcgaggtggctcatgcctgtaatcccagcactttgggaggctgagacgggcggatcacctgaggtcaggagttcgagaccagcttggccaacatggtgaaaccctgtctttactaaaaatacagaaattagctgggcgtgttagcgggtgcctgtaatcccagctaccagggaggctgaggcaggagaatctcttgaacccgggaggcagaggttgcagtgagccaagatagcgccactgcactccagcccgggtgacagagcgagactccatctcaaacaaacaaacagacaaacagagggatgacattcaaagcctgagacagaatgaggtaactgagaagaggtagaacattgattgcttgaggttgaggacggggcaggagccaaccaagaaggctcaggtggggcaggaggaggatgaggcaggactggtatccccagagctgagggaaaaaagcagttaaagaacaaaagggtgatcagttgtgtcagatgctgccaataggtcagtcatgtaagaggagatggagaattgctatgggatttggtaacctggaggtctctctggagctcttgataagaagagtttggtgttgtattccatttgctaagtaccatttcagaggtttccagtggaagtaaaatgcttattacagactagtctagaaaaactagccactttaaatctttttggaaactagatatatcacataagacaaattctgttcgagtttgctaaaaatcttggagcgtgacattgtttgactttagctatggaaaatgtcaacatcattgtcacttagccatagctacatttatttaaattgaaatttaaattataaaatagagccaaggtctcactatgttgcccaggctggtcttgaattcctgcgctcacatgatcctcttgccgcagcctcccagtgtgctggaattacagatgtgagccactgtgcctctcctgtaactatatttaattctcatatgaagggcttttgtcctttttttttttttttttttgagatggagtctcactctctcccccaggctggggtgcagcggcgtgatctcagctcactccaacctctgcttcccaggttcaagcgattcttctgcctcagcctccggatacctgggattacaggtgcgtgccaccatgcccggctaattcttgtatttttagtagagatggggtttcatcacattggccgggttggtctcaaactcctgacctcaagtgatctgcctgcgttggcctcccaaagtgctgggattacaggcgtgagccactacgcctggccaagggctttcattcttagagtaatatggtgaattaataaccatgttttaaagctgaacaactctttaagataagtcaggcaccgggcttggtggtccgatcctgtatttccagctactcaggaggctgaggcagggagatactttgagtgcagaagttcgaggctgccgtgagccatgattatgcctgtgagtagccactgtactctagcctgggcaatacagccagaccctgtgtctaaatagtaataataataatattgaagaaaaaaaagaaaatgggaaggcagggagagaggtcacatacaaatagaatgacagaaggtattaatgatgttgaatagaacaggaattttggccaggcttggtggctcatgcttgtagtcccagcactttgggaggctgcggcagaagaatagcttgaagccaggagtttgagactagtctgggcaacgtagtgagaccttgtttctacaacaacaacaacaacaacaacaaaatattagagttgtggtggcacatctatagtcccagctactcaggaggccaaggtgagaggattgctcgagtctaggagttcaaggctgcactgagcatgttcatgccactgcactcccggcatgggcgacagagtgagataccatctctaaaaaacataagatacaaaggcacaagaatttaacagcatcagttctcaagtgtggtcctcagacattgggaggtctcccagactcttttagggttttgcaaggttaaaactcttttctttttctttctttctttctttttttttttttttttttttttttgagacggagtcttgctgtcatcgcccgggctggagtgcagtggcatgatctcggcgcactgcaacctctgactcctaggttccagcaattctcctgcctcagcctcccaagtagctgagattagaggcgcccaccaccatgcccggttaatttttgtatttttagtagagacgaggtttcaccatgttggtcaggctggtctcgaactcctgacctcaggtgatccacccgccttggcctcccagagcgctgggaatacaggcgtgagccactgtgcctggccgaaattattttcataatgacattaacactttgccttttcactgtgatcccattcacaccaatgttccagaagcaaaggtgagtaaagcagttggtgctagcaccaattgggctgttgctgtggtcatggtatccttcaccacacatactctcagtataaagaaaagaaaaagccaggttcgcctgagaatgtccttgatgaagtggtaaaattcattaattttatgaagtcttgactcctgagcacgtgtttttaatattctgtgtgctgaaatgggcagtactccaaaagctcttctgccgcctgttgaagtataatggtgtgttgggaaaaagcacggttgtttgaattgagagctgaattaattgctttttgggtgaagtaccatttttacttaaacatctaacagacaaatgtgttactagatttgggtatttggcaagccttttcttgaaaacgaatgaagtgagcccgacacttcaaggaaaacaacacagtatttgttaccaatgataaaatatgagttttttttttttttaaagaaaagaaagagtggtcgagtgcagtggttcacacctgtaatcccagcactttgggaggttgaggcaggcggatcacttgaggttaggagttcgagaccagcttggccaacatggcgaaaccccatctctactaaaaatacaaaaattagccaggtggtgctggtgcctctaattccagctacccatgaggctgaggcacgagaatcacttcaacttgggaggtggaggctgcagtgagccgagattgtgctactgtaccactccagcttaggtgtgtgagactgtctcaaaaaaaaaaaaaagacaaaagacaaggtagtagagatgatggaaggagggaggaaggggagcggatatgagtttttaagtgaaaggttttaagggaaagttagacttttggaatgcttttatctactaccaagagctcaatggcttcccaatgcttaaagacttgtctgatgagatcagtggtgacattcacaaatgtgatttttggatattgcataatgaaatgtgtcaacatttggaaaatctgcagaactcaatgaaccaatatttttcaaatgtcaaatgatgatattccaaaatcacatacaagtaaaagatccattcaaagtacaagatagacttgcttctagccaagacggaatgacagggacacctcatggcgaatgatgctgcacatcttttttttttttttttcgagacagagtcttgctctgtcacccaggctggagtgccatggcacagtctcggcccactgcaacctccacttcccgagttcaagcgattctcctgcctcagcctcccgagtagctgggattacaggcacccactaccacgcccgacaaatttgttgttttttagtatagatggggtttcatcattatggccaggctggtcttgaactcctgacctcagatgatctacctgtcttggcctcccaaagtgctgggattacagaccatgagccactgcacccagcctacccatttaaataattgtattagttgtcttctttttctctttcctttttttttttcttgcattatacttttagcaaggattactgtcagattctactcatttggccagagaccctccttgaggtgtttgcagcaaacttgctctacagctagcacactagattagctgtctttctgctgtgaatctgtgatgttctttttggagatgtcttttttttttttttcttctttttttgagacagaatcttgctctgttgcccaggctggagtgcagtggcacgatctcggctcactgcaccctccacctcccgggttcaagcaattctctgcctcaccctcctgagtagctgggattacaggcacccaccactatgcttggctaatttttttgtatttttagtagagatgggatttcatcatcttggccagactggtgttgaactcccaaccctgtaatccacccgcctcccaaagtgctggggattacaggcatgagccactgcgcccagccaatcttttttttttttttttttttttttttgagatggagtttcgctcttgtcacccaggctgcagtgcaatggccgatcttggctcactgcaacctccgcctcctgggctcaagtgattctcctgcctcagcctccagagttgctgggattacaggcatgcagcaccatgcctggataattttgtattttttagtagagacggggttttgccatgttggtcaggctggtctcaaactcctgacctcaggtgatctggccatctcggcctcccaaagtgctggaattacagacgtgagcgaccatgcctggcagaggtgtcttagtagactctgcctcctctagactttgctataacagtcctgtgtcctttctagtctatcctaagacctgtccaggttcattaagtcattataagacaaactataccctggttgcagttgcttggacgtttctattttcttgcctgtttctttaagcttaaatattgaaattgagttaaactcctctgtcttcttatcagatattctctgaattcttttttctgtttgtcttacagcttcacggtgatgatatggcatctgccagctctagccgggcaggagtggccctgccttttgagaagtctcagctcactttgaaaggtgagtggcactgtataatgtcttcatcttgtctacgcccagggaagagggagaatctaaccacaccttggtctggggagccaaattttgtgaaatagtttacatgtgttaattatttattctcatgggattgtcatcttgtagctgtaattcttgaagaagaaagaaaataaaggagcaggaaaatagggaacttttagctaaaattgtctaaaatggtgatttcaggccaggtgcagtggctcacgcctgtaattcagcactttgggaggctgaggcaggaggatcccttaagcccagagtttcaagaccagcctgggaaacatagggaagccctgtctctacagaacataaaataattagccaggcatagtggtgcatgctagctggtcccagctactaaggacactgaagtgggaggatcgcttgagcctgggagttcaaggctgcagtgagctgtgatcacaccactgcactcagcctgggcaacagggtgagaccctgtcccaaaaacaaattaaaataaaaactgaataaaataaaatggtgacctgttcatgccctagggctcgttgctacctgcactcgctccctaggtgcttcttccaacctctggctttaaatgccaccaatagaagatcactcctctgggctttacctctgaactcctgatttataaccagtagccagtttgttaccttcacttgaatatttagtaaacatctaaaatttagcctgtctatagctgaggtcctggtttttcttcctcattgtctgtatcaacccatcagcgtatctggttgactcgatcttcaaaatgtgtcactcaacattcagccacttctcaccacccctaggtcccagcctagtccaggccaccattgtctccaccctgagttaaggcagtagcctcctgtcctgtctctcggcttctgcactttgccctccttcagtctgttggtcacacagcagccagtgatcttgttaaaaggtaaactggggccaggtgtggtgactcatgcctgtaatatcagcactttgggaggccaaggcaggaggatcacctgagcccaggagtttgagaccagcctgagcaacagagcaagacccccgtctctaaaaaaaaaaaatcagaggctgagacaggaggatcacttgagcctaggagttcgaggctgcagtaagctgtgattgtgccactgcactccagcccaggcaacagagcagagcgagaccatgtctcagaaaaaaaaatgtaagctgggtcttgtcactcctctgctcaaaccattcaagggtgctccatttcacagtagaagccgaagctcccatgtgatgtgacccttccccaccccacatttctcatctcctgttcctggtctacattctctgtgccccagcctccttgctcttcagtgaatacactgggcaggcgtctgcctctgggcctttgcacttgctgttccctctgagtgaaatgcttttcgcttcattatttccttaggcgttttctcaaaagccaccctcttcctgatcccctgatccaacgccacctttctcattgacttcatcacatctatttccctctcttctttatatttttcttatcagcccttgtccctgtttaattaatttatttcatttgttgactgtctccttcaatagagtgtaagatccacagtaagagatttttgtcgctttggtcactgttaactaccccagccagtagaacagtgcctgacacatagtgggccctcagtaaatagtgcctgaacgaaagaatattgcttcgggttccatagctctgcagccatcacagatgggagagtggctctcagtatctgagctcagacccctcagcctggtcctccagaggcaaaattgtgtctcttgggaatatttttcttgagtatttttgaaatgcaaatgttatttatataatatactcatggagtttaaaaatcttagtttttaattttattattattatattttgcgacagagtctcgctctgtcgcccaggctggactgcagtggcgctgtctcggctcactgcaatttcttcctcccaggttaaaacagttctcctgtctcagccttccaagtagctgggattaccagtgtgtgccaccaggcctggctaacttttttgtttgtttgtttttttgagatggagtctcgctctgttgctcaggctggagtgcagtggtgcgatctcgactcactgtaacctccgcctcccgggttcaagcaattcttctgcctcagcctcctcagtagctgggactacaggcgtgtgccaccgcgcctggctactttttgtatatttagtagagatggggtttcaccatattgggcaggctggcttcaaactcatgacctcatgatctccccgcctcggcctcccaaagtgctgggattacgggcgtgagccaccgtgcccagcctcctatagttcaaaattctttcctgcagtccttcagtgctcctccttggaaaaaaccagtattgtttcttgtgtgtctcttccaagatacaccaaaagggatgcatttttgtaattttgagagccagattgccttccttggaaggaatacccttctagcaatgtgcgagagtgcctgtttccctacatctttaccagcacaatgttgtcagacttttaacttttgcctgtttcattggtgcaagcttgtgttctcagtgtagttttatttcccacttctttacttacgcatttgatccttgaacagcatgagggtcaggggtgctgattccctgctcagtaaaaaaatccacatgtaacttttgactcccccaaaactttactaatagcctgctgttgactgaaagccttgccaataacagaaacagttgattggctgggtgcggtggctcacgcctgtaatcccagcactttgagaggctgaggcagacagattccctgaggtcaggagttcgagaccagcctggccaatgtggtaaaaccctgcctctactaaaaatacacaaaaaaattagccaggcgtggtggcaggcgcatgtaatcccagctacttgggaggctgaggcaggggaaccgcctcaacccgggaggccgaggttgctgtgagccgagaccacaccattgcactccagcctgggcaacaagaacgaaattctatctcaaagaaaacaacaaaaaaagagaaacagttgattaacacgtattttgtatgttacatgtattatatactgtatttttacaataaaataagctagagaaaaaatcataaggaggaaaaaaattttactatttattcagtggaagtgggtcatcataaaggtcttcatcctcatcattttcatgttgagtagctgaggaggaggaggaagaggaaggattggttttgctatctcttgggtggcaaaggcaggagaaaatccatgtaaaagtggacccttgtagttcaaacctctcttgtttaaaggtcaactgtatgatgtttagcatctttttttttgtttgtttttgagacagagtctcactctgtcacccaggcgggggtgcagtggtgtgatcttggctcactgcgacctctgtctcctgggttcaagcgattctcatgcctcagcctcccaaggagctgggtttacaggcatgtgccaccacacctggctaatttttgtatttttagtagagatggggttttgctatgttggccaggctggtctcgaacttctgacctcaagtgatccgcctgcctcagccccccaaagtgctgggattacaggtgtgaactactgcacccggccagtgtttagcatcttatatatttaagggcggttgtatttcctttcctatggattgcctgttcatgttctttgcctgtttcttattacattattgattgtttttgtagtcttgaaatattttaattatatttcttggagtcttttgccttgcttctgcccttttgagtagggagatgagttagagtgaactaatatggttttaaactgggggctacagactttattaccttagctaataattagcaagtctaggtcaaagcagaagttggcctattggacctggtaacatcctgaggtctctgttttggggccatgttattcagccacgcacacttacttcttttctttttttctttctttttttttttttgagacggagtctcgctctatcgccgaggctggagtgcagtggcgtgatcttggttcactgcaacctctgcctcccaagttcaagcaattctcctgcctcagcctccaaagaagctgggattacaggcacctgccaccacacccggctaattttcgtatttttagtagagacagggtttcaccgtattggtcaggctggtctcaaactcctgacctcaggtgatccacccacctcggcctgccaaagtgctgggattacaggcgtaagccactgcacctggcctcttttctttttttgagacagtctttctctgttgctcaggctggaatgtagtggcatgattacagctcactgcagcctcaaaataggctcaagcaatcctcctgcctcagcctcctgagtagctaggactttaggcatacactaccatacttagctaattcttaaattttttttatagagataggtcttgctgtgctgtccaggctggtttcaaactcctggactcaagcagttctcccaccttggcctcttaaagtgctgggattacaggtgtgagccaccgtgcctggcccccacctcggcctcttaaggtgctgggattatagatgtgagcctctgcacctgtccagcacatacttctaaaggcttttttgttgcctttcttgaaggtgaattttcttaccagggtggaaagagccagcttgataatactggtgtatctcattatacacatatttaacctacacagatttggtaataccattcaggaaaatggtggggggaaagagaaagagagaaataaccatttaaatagcgtaggtggttctttttcccgtgcatttcatgaagaaagctgatagtgtaacctgtggggtgtgactgcgcggtttccagttcccttgtgcctgcccacagtgtgatcctggtgttttaaggtatatttttaaatgcatcgaggcccttaaacgtaggacagctattttatttgatattttactagagaaacactgaaaaactgatctctgaaaagcatagtataataaaacaagaaacaagctgtttggaacttattgagagagcagatgccagactctattgtggtcccttcttaagagctttttcagtgtataattttgtctttatatgatttttgcctgatttgttgactttaaaagctaaatctcacataaagtcgtgactctgtgtataaagatatatttcatgaaagagactttctagataaacttgctcatatctttattttagcctgtcttttaagaacaagaaatattcaaaatatcaccctgctgattaactgtaggttacaaatgtgtcagtggagagacctggccaactccacattaagcagatgttcaaacttagtatccccaatggcaggacaacctaatgtatgtggtaagaggtacacgacataacttatgtagtattcttctttcttttgagtcagggtctcactctgtcacctaggctagagtgcagtggcacaattacagctcactacagcctcgacctcctgggctccagggatcctcctatctcagcctctcgagtaactggaactacaggtgtgagccactacacctggctaatattttattttttgtagatttggggtcttgctgtggtgcccaggcttgtctcgaactcctgggctcaggtggcccttctgcctcggcctcctaaagtgttgcaattacagggtgagccactgtgcctggcctttaaaccgaatctaatcatgaggaaacaattgtaatcacccagtgggttcttcttgcccactgcacagataaaataaattcactgctgggcgcggtggctcatgcctgtaatccgagcactttgggaggcctaggtgggatcatgaggtcaggagttcaagaccagcctcgccaagatggtgaaatcctgtctctactaaaaatacaaaaaaattagctgggtgtgatggcaggcgcctgtaatcccagatacttgggaggctgaggcagagaattgcttgaacctgggaggcagaggttgcagtgagtcaagattgcaccactgcactccagcctgggtgacagagcaagactccatctaaaaaaataataataataaataaataaattcactgggactgtagcattgcattagagaaagagtttaattgacacaaaacaggccatatgggagacagagttatcactcagatcagtcttcctggaggctcagagattagggtttttatagacaatttgacaggtaggggactagggaatgggtgctgcttattggttggggatgagattatagaggtgtggaaaatggtcctgtgctgagtccacttctgggtggggccacaggataatttgtttcacgagtcaagtcacgggcccaggcaaagtcagtagattgccagaaagaaaaaatctcaaaagaccaaccttaggttctgcaatagcgatgttatctatgggagcaattggggaagtcacaaatcttgtgacctctggcttcatgactcctgagcagtaagggattatagaaactatacctacctcttattagaattcaagcccctcccataatcctaaccttgtggctgttgattagttttacaaaggtggtttcgttttgggaagggctgttattatccttgctttttttttttttttttttttttttgagacagggtcttgctctgttacccaggctggagtgcgttggacaatctcagcttactgcactttctgcctcctgggttcaagcgattctcgtgtcttagcctcctgaatagctggaactacaggcgtgcgccaccacgcccggctaagttttgtacttgtagtagagacggggtttcaccaagttggccaggctggtttcaaactcctggtctcaagtgatctacctcccttagcctcccaaagtgctgggattacaggcataagccaccatgcccagctatccttgctttaagattaaactataggctgggtgtggtggctcatgcctgtaatcccagtactttaggaggctgaggcgggtggatgactttgagctcaggcttaaagtttgagaccagcctgggcaacatggaaaccctgtctctacaaaaaatacaaatatgagccaggcatggtggctcacacctgtagtcccagctacttgagaggctgaggtgggaagatcgcttgagccccagaggtggaggctgcagcgagatgagattgcaccactgcactccagcctgggcagcagagggagacccggtctcaaaaaaaaaaagaaactataaactaaatttctcccaaaattagcttggcccatgcccaggaatgaccaaggacagcctagaaatcagaagtaagatggaatcaactatgtccgatttctctgtcataattttgcaaaggcagtttcacaattagaaaaatgtagaatttgctgcattctttaaaacagctggtggaagtctttaaaaatcattgttgccttggcaaagctgctgggattataaaagaaaaaaaccaaaaagttaaacaaacaaaaatcattgccatggaaaagaagggaggatgttctagattttaaaagattaaggagatagtagccacaggcaatttgtatatattgattaggtactgaattgggggaaaaatggctttaaaaatatgtctggggactgggcagtagctcatgtttgtaatcccagcattttggaaagctctggcgggtagatcgcttgagtccaggtggattccttgagcccaggagttcgagatcagcctggccaatggggtgaaatcccgtctctacaaaaaaaattaaaaagttagccaggcgtggtgttgcgcactggtagtcccagctactcaggaagctgaggtgggaggatcgcttcagccaggtaggtcgaggctgcagtgagccgtgatcgtgccactgcactccagccggtctacaacttactttttaatggttttacctaggaaaaaaaatgcggatacacacacacacacacacacacacacacacacacatacacagagacatagatggcatttatctataacctttggtgtccaatagaatagtcactgtagccacatagaactgtttacacttaaattacaattatataacatttaaaaatcatatccttatttgcactagccatatttcaagtgtcaatagccacatgtgtctcatggcaatgtattgggcagcacagatgtggaacattttcgtcatcatggaagttctcttgggtagtgatgctatagacacatagaacagaaagcaaatgtggcaaaatgataacaattggtgaagagtatacagtatttattgttctatttcaatttttctatagattggaaacttaaaaataggaggttttttttttttttttttttttttttgtgagagtctctctccatcacccaggctggagtgtggtctcagctcactgtagcctccgcctcctgggttcaaacagttctcatgcctcagcctcctgagtagctgggactactgttgtgccccaccacgcccagctagtttttgtatttttggtagagacagggtttagccatgttgcccaggctggtctcaaactcctggcctcaagtgatctgcctgcctcggcctcccaaagagctgggattacaggcgtgagccaccatgccctgcttcaaaataagagtactaaatgccagtatgatcctagattggggcctggaccagaacaaatttttttttctttctttttttttttgcgatgatgggcatcgataggacaattggcaaaatacgaataaagtctgtaaattaaatattagtattataaaaagttaaatgtcctgattttgataattgtgctattggttatgttaaaaaatgtgtttgttgggaaatacacccagaaatatttaggagtaaaggggcacaatgtctagagcttactctcagagtttcaggaaaaagtgtgtatgtgtatgagcgcagatacttctcaacttacagtggggttacgtcctgaaaaacccatcataagttgaacatatcgcaagttgaaaatgcatctgatactcctaatctgccgagcatcatagcttagcctagcctaccttaaatgtgctcaggacacttcgatatcccgcagctaggcaagatcatctggtgaaggggtacacggcagagtatcaattgtttgcccctgtgatcacgtggctgactggtgttgcggctcactgccgctgcccagtagtaccgcatatgactattctgcgaaaagaccaaaattcaaaatttaaaatacagtttttactgaatgcatatcgctttcgcacccctgtaaagtcaaacgtcctaagtaatgcaccatttgtagtccctattttttaaaggcatgtagattcatgctcttaccaccaggtggcctcagttaaccttggtccgtgtgtaaatcactgcacctcatttttctaccctgggccatgcctcagtaccacaaacctttgtccctagtactgttcccttgtcgcttctgaatcttagccacagctgattttttatctgttgtcttcctcccttctgttcctttggggccagaggaagatagttactgctataaaaaatctgaaggtgaatttggcctttgccaagttgtagacaccattgtaggactgtcacctttcagaagagtctgggagggagggatttgcttatactcaaacagggaagctcaggctaggatagacttgccattacaggcaagggagcatcagttgtatctctgatttggggcaggatgggagacgtctagatgtgttttaccctagcgacctggcgtttccaccaggggtaatatacactaggatgtctgtctagctcctcggtgtgatgcttgtgtagctttgtactccatgagtctttggcttgctggtcccaaacgaacatcagaattgttgccacatgaaggctatgagcggaagaagaaatgtagatgactaacgacacatggcaaaaatattcaaccttgctggtaatcgaagaacagcaatagaacaaataagtaaagttcaataataatatgcagcatgatgtggaatcagaccggccgggtgcacagtctggcttgtagctccctggctatgtagagtgggagagtgaccttgcctctcaagcctgttttctcctgggtaaaatggggtgatgatatattccctgcctcatgggtttgttgtgaggattcagttagaaaatgtatgcacatggcagagggtctttaataagtactcataaaatcttaaatattatctttatttatttcagttaaaatttataaattggccaggtgcggtggctcacgcctgtaatcccagcactttgggaggccaaggtaggcagatcatctgaggtcaggagtttgagaccagcctggccaacatggtgaaaccctgtctctactaaaaatacaaaaattagccaggcacggtggcgggcgcctgtaatcccagctactcaggaggctaaggcaggagaattgcttaacctgggaggcagaggttgcagtgagccgagattgtggcattacactccagcctgggcaacaagagccaaactctatctcagaaaaaaaaaaaaaattataaattttgttatgttcccaggctggtcttgaactcctgggctgaagcagccctcccaccttggcctcccaaagtgctgggattccaggcatgagccgccacgcccggccttagctgttgtctttacaccatgcgtttttaacccatggatttgcaaaaagtgaacaagcatatcccttagcactctgtgatgtctggtaaaatgaatattctcctgtagcactgatgggaggctacatgggtttacctttcttggaaaggaatgggcagttttaagaactttaaaaagtgttcgtatcctttggaggaatactcaagaaaggcatgcagatgtatatgttcacggtaatttccccagagcgaacaattgcaagcagtctattcgacaatgaaagaatagttaacatatacctattatgggcttgtattgcagtcatttaagagtgacttatgggggtgaagaatttttaaagaattgaataaataaaagatgaaaatctggaaggcaatttaccaacgataaattggtgatgatgatcactggcagttatcccagtggtttcaggttagggattttttttttttttttacacttcatattttttttggtgtgtgtactcacatttctttaaaaagtttttagaatcaagacaaaacaaaatgtattgatttattttttaaagcaataactaaaaagagccggaacatctgccacaggggggcatctgggagccctgggactcatctttgactttttctttctttctctcccagtggtgtccgcaaagcccaaggtgcataatcgtcaacctcgaattaactcctacgtggaggtggcggtggatggactccccagtgagaccaagaagactgggaagcgcattgggagctctgagcttctctggaatgagatcatcattttgtaagagaaagccccttctttttgaacgcagcaagatggggaaagagagagggtgctccgagggggttgtgggaggtacagattccctgtggcacctccgactttttctacctatggtacccaaggtgactctttttaggtgttcctacaccattgagctcatagagcgttcattattatctagagggttacagggtcagctttgagaggggaaaggatatatgtgggtgtctgcctgttttggttccccctccccaagatgtcagcagtttagtttaaatgttttcttctaagttataggaatgatctgcttggatgtaatgaatcaggtatttgtttttcaggaatgtcacggcacagagtcatttagatttaaaggtctggagctgccataccttgagaaatgaactgctaggcaccgcatctgtcaacctctccaacgtcttgaagaacaatgggggcaaaagtacgtatgatgaagggggtgccgacgtgattcttgggtggggatgggaggacctggcagatcaacctggtattgcaatttcccccaggactaggggctgcagtacctctgttctccttggatgctgtctttggagttttgggaaggctgagggctcctctctgcctccactacagagtttagccctctttgtccagggcctctagtaatgtgatgcagtggtgtgttgccctttatccttccttagggactggaaactttctgtctgcctctgctcctcttcccgttgcaggagatgtgtgatatgttgaatgaaactgtcaaatacctctagcctaaatcattgcttttctagcctcagccctaaaacagaacaaaggagctgtgtgtatacgtatatgtgtgtgtgtgcatgcctgtgtgcatgtgtgcacgtgtgtgtctgggatagtattacaaatagtgccctgtgcttactcggcactcagtaaacatttactggatgttggaacgtgatggacgcgccatctgaattagccaacgtgcctctacgtcacggacatataaatcctcatctatttattgctgtttgtggtcagtggcatggcccatggcggtggtattggaccctccttcataaggcctctattcagagcagtaccatatgtggcgaatgaatggcatggaaagaaaggctcctttttctcttgatatctggaaagtattttctgaaagtggatgtagcttaagagagaggtgggggcggggagagttgcgtcccagcgagcgtgttacatgatttaagagtctttcttttctctccaagcctgtccttttaagcgatgggccacttgaaaggtctttgagcctcctctggtcttttcttttcggctgggcacatagagatgtgctgaacccacactggcccgaggaattgtttaaaaccagagatgtgcctccactttaatcctgcagagaactccctgattgctttgtcttctgaattggtgtttattttcccaaaccctagccagccttttgtaatttgatcatcagggagaattctatttattgcaatatttggaaatatacttgtggatagcctcacattaggatgcagcaaccagcatgagggtccttttttcctcttcatttgcccagccaatatacttttgcttttggttagcaaaagtccttgtagaaattgtaaattacagaaagaaaacaaaatttgcccctaagcacagcacctagtaatagttattgttttttcttttttttttttttgagatggagtcttactctgttgcccaggctggagtgtagtggtgcaatctcggctcactgcaacctccgcctcccaggttcaagcgatcctaccacctcagcctcccaagtagctgggattacaggcatgtgccaccattcccagctaatttttgtatttttagtagacatgaggtttcactgtgttggtcaggctggtcttgaactcctgacctcaggtgatctgcccgcctcatcctcccaaagtgttgggattacaggcgtgagccactgcacccagcctgatagttattcttaatgtttttttaaaagcaattttatggccgggggtggtagctcacgcctgtaatcccagtactttgggaggctgaggcgggtggatcacctgaggtcaggagttcgtgaccagcctggccaatatggcgaaaccctgtttctactaagaaaaatacaacaattacccagggatggtggtgggcgcctgtaatcccggctactcaggacgctgagacagaagaatcgcttgaacccgggaggtggaggttccagtgagccgagattgcgccactgcactccagcctgggtgacagagcaagtcttaaaaaaaaaaaaaaagcaattttactttaattaattaatttttatttttatatatatatattttttgagacaggtttctcactttgtcactcaggctggagtgcagtggtgcaatctcggctcaccgtagcctctgctcctgggctcaagtgatcctcccacctcagcccccacccctagtagctgggactacaggcacacgccaccatggcctggctgtatttcatatttttagtagagagtaggtctcactatgttgccaggatggtctggaactcctgagctcaagtgatccgcctgccttggccttccaaagtgctgggattacagatgcgagccactgcgtctggccaattaattaatttttagattgagatgggatctccctatattgctcaggctggagtgtagtggctatttataggcacgatcacagctcactgtagcctcaaactcccagcctcaagccatctcctgcctcagcctccggaatagctggaaccacaggcgtgcaccactatacctgactactgttaacattttgatgtatacatttttgagcttttaaattttatcttttaaataattttttcccctcagatccttgttctgatctttttttatatttgtagacgtatattgatgtttatgacatcaatgaaactaaattgagattatacatgaacatattattttgcaatatgcctttttctctttaaaaatgtatcaatatatatttatttttatttatttatttttttttctgagacggagtcttgccctgttgcccaggctggagtgcagtggcgcgatcttggctcaccacaacctttgccttctgggttcaagcgattctcctgcctcagcctcccgagtagctgggactacaggcacccaccaccatgcccggctaatttttgtatttttaacagagacagggtttcactatgttggccaggctggtctcgatctcctgacctcgtgatctgcccgcctcggcctcccaaagtgctggattacaggcatgagccaccgtgcctggcctatatttatttttagttgtgataaaatacacatgatgtaaaattaatcacgttaataatttttaggtgtataggttagtggtgttaagtacattcaccttgtacaaccatcaccaccatctatccccagaactcttttcaccttgcaaaactgaaattctgtcccattaaaccatgactcccccatcctcccctcgcaccagcacctggcagctaccgctctactttctgcttctgtgaatttggcttttccaggtagcttatgttagtggaaccatacagtatttgtccttttatgactggcttatttcagtcagcataatgtcctcaaggcttattcatgttgtaacatgcgtcagaagatttttctttccttttgttttttttttttttgagacagggtctcgcactgtcgctcaggctggagtgcagtggcgcgatctcggctcactgcaacccctgtctcctgggttcaagtgattctcctgcctcaagcttccaagtagctaggattatgacaggtacctgccaccatgcccagctaatttttttatttttagtagagacgggagtttcaccatgttggccaggctggtctcgaactcctgacctcaagtgatctgcccaccttggccttccaaagtgctgggattacaggcataaaccaccgcatctggcccaagatatcttattatgtatgtgcaaatataccaaaatctgaaaaaatctgaaatccaaaacacttccagtcccaagcatttcaaataaatacttatgagacctgtacaatttaccttcccatcagcagtggctgaaatttctggtttgtattgtaccttggcatatattggatattacttgtaaaaaaaaaaagcctttttttttcctatttgataactattaacattatgatggatttgcttttcctgtttctttttggctgaattatttttattttcttattttttacttttttgctctgatctcctggcctctcaataagaagtattttaaagtatattctagacgtcctgacattttatcctagattcttcagcatgcatcttgttaaaacaggacattttctttattttaattcttctacttttttctattttttttttactttggaacatttacataaaaaaaacattatcttacacaattactgtatcgttatcacatttagcaatagtgacatgaattcctatttatgtctaataacctgttcatagtttcaccatttttctcaacatgtcgttttgcagttttacatttggtttgcttgaacctgggtttgggaaggtccattcattggttgttctatctctgaggccccccacttccaccctgcttttttgtgtgtgtgtgtgaaagcaaatttgttaagaaagtaaaggaaggcagggcgcagtgacttacacatgtaatcccagacctgggaggcggaggcaggttgatcacctgaggccaggagttcgagaccagcctagccaatatggtgagaccctgtctctactaaaaatgcaaaaattagctgggcacagtggcgcacgcctgtaatcccagctactcaggagtctgaggccggggagtcacttgaacctgggaggcgaaggttgcagtgagctgagattgtgccactgcagtccagcctggatgacagagcaagactccgtctcaaaaaaaaataaagtaaaggaataaagaatggcagagcagcctccaccctactttttaaagctgtgatttgttgaaggctactgaaggattaaaaaaaagtgtttattgccctattaatgtcctttgctcatttttatattgaagtgtgcatttttctcttttggtattgaaagaactctttatttgttaaggttattattcttcgtcttaccatttgtaaatgtttttctagtttttcatttgcattctaactttgtatgtttttaactttctgtagtccaatctgtcaccctttatgttttcagcattttctttcatgctttggaaggcattcccccttctgagatgaggtaaatggtcacctctattttttcctaggtgtttatgattttattttttcctgggtgtttatgattttattttttcacatttaattctgcatccacatgagtttatttttgtgcccagtacaaatagggatctaattcatttttttccctaatatgtagctgattggtttagcactacttattgaataatccatctgtttccccaatgacttgagttgcttcagcttatattaaaaacatatgtgtatttgggcctgcttagggactttccattgaatccatcgttttattagcctttccaaatcactctgtctatgctattgtaaaattatgttttaatatctggcagttaagtttctcttttttttcaaagtcttcatgcttcttttctttgcatatatcacatcactagatgaaccttaacagtttcatcagattctctcctcttcctactccccatgccccctaaaaaatctcttgagattttatggagtcctgtcatatgtaaagttaacgtaatggggaattttcatactgaactccccacataggaacatggaatgtttctaaattaattcaaataattttgaagttatctttaaatagattccactttaaattttaaaaacctttggtattattttcagtgggatcttttcttattctgtcttctaactcagtattgttggtaaatggctgtttctgcattttcttttgtaatctgtcagtttactgagtcctttagtataggtttgcagtagtttcttttgagtttgcttggtagactttttttttttttgagatggagtctcactctgtcacccaggctggagtacagtggcatgatcttggctcactgcaatctccacctcctgggttcaagcgattctcgtgcctcagactactgagtagctgggattacaggcgcccaacaccatgcctaatttttgtatttttggtagagacggggtttcatcattaaggccaggctggtctcaaactcctgacctcaggcgatttgcctgcctcggcctcccaaagtgctgggattacagacgtgagtcactgcgcccagcctgcttggtagacttttatgtgggttgtgacactgataattttgttaatcctaagagataattatatttctattttgtgttagttgctttgcataaaactttctgttttagtggtgatagagaaatgccctctagtaaataacttctaggtgtaaggctgggtattagtaacctttttgctttcttcttctttttttattttattttttggcacctttctgactgggaatctttttgatttattaatcattgcaggttaaaaaaaaagtcaggaaggatgttgagtttttttttgagacaggatcttgctttgttgcccaggctggagtgcagtggcatgattaccactcactgtggcctctacctcccaggctcaagcaatcctcccatctcagtctctggagtagctgggactataggtgtgttactaatttaattttttttctttttttttttttttagagatggtatctcactatgttgcccaggttgggtgttgactttgtatcaaatatctattaagcagccattggaatgattatatgatttttcttctttaaattactatattaatttctacaactgggcacagtggctcatacctgtaatctcagcactttgagaggctgaagcagaaggatcacttgaggccagtagtttgagaccagacagggaaacatagcaagaccctgtctctactaaaaattaaaaaaaaaattagccaggtgtgatggtgtacgcctgtagtcccacctacttgggtgactgaggcaggaggatcacttgagtccaggattctgaggctgcagtgagctatgattgtgccagtgcactctaggctggacagcagagtgagaccctgtctctagaaaagatttttaaaaatctattatatgaatttcctaatagtaattatcttagaatttctagaatatacctagttgctcaagatagactattccttgaaaattttgttagaattgtttgttaatattttatattggggttttccatctatattcgttagtggtaatttgtctgtagctttggtctatttttgtcagctttggaatcaaggccaagctaattttataaagtaaattgatgtgctttccaactttgggaacagtctctataacatgggaattatctgttccatgagtgcagcaaagagctcacccataaaaccaactgggtctggcatcttgctttgaaataattctttgatgactttttttttcagttttcccccccataattactggtttgttcagcttctttgtttcgtcttgactcaattttgttaactcatttttttctgagaaaatcggttcatgagattttcaaatttattagaataagggttttaaatatcattctcagtttaaaaacgtctgtaatattttttactttaaatttttgctatttgtgtgtttccccagtttttttcttgactaacttaaacatttttgtttttcatttttgcttttaaatttacttttcatagaacaacttcttggatttgtcagataccatattttgtaatattaatttctgtctttagctttattaacttttctactatttgccctagatctgttttatttatttatttatttattcattcattcattcattcattcattcattcattcatttatagcttttcaggttgaaagcttactgcatttatctttgtctttttttttttgagatggagtttatctctttttgcccaggatggagtgcaatggcatgatcttggctcactgcaacctctgcctcctggtttcaagtgattctcctgccttagcctcccaaatagctggtagctggggttacaggcacacgtcaccatgcccggctaattttgtatttttagtagagatggggtttcaccatgttggctgggctaatcttgaactcctgacctcaggtgatccacctgcctcagtctcccatactgccgggattacaggcgtgagccaccgtgcctggcctatccttgtctatttttgtttaataatgaaaacatgtttgctttgtacttgtctttgaattttcacccctggatattgaattttttttctttcaatgtagcattgaaaactcatctctacaaagatttaaaaaaattagctaggtgtggtggtgtgtgcctctggtcccagctactcgggaggctgagtcgggaggattgcttgagcccaggaggctgaggctgcagcgagttgttattgtgatactccactcctgcctgggtgacagagcaagaccctttctccaaaaaaaaaaaaaaaaaaaaaaaaagaaaagaaaaaggaaaatgaaagggcagccaggtgcagtagcttatgtctgtaatcctagcactttgggaggctgaggtggtaggattgcttgagctcaggaatttgagaccagtctgggcaacatagtgagaccctgtttctacaaaaaagaaatttaaaaaaattagccaggtgtggtgttgcacacctgtagtcccagctacttgagaggcagtggtgggaggattgcttcagtctgggagatagaggctgcagtaagctgtaatcatgctgcactccagcctgggtgacagagcaaaaccctatctcaaacaaacaaacaaaacaaaaaacattcttagtgttacaacttgaatatgtacatgtgtccacagctgcgtaatcatcacccacatcaagacatagcatatttctagcatccccagaagtttcccattgtcccttctagttaatttctcctccctgaaataaccactattctgacttctatcactattgttcagctttgcctagtattgaatttcatattagtgagaacatgcagtatgttttcttgtgcctggcttttcattttatatctttgagattaaagatatatgacctttttttgcatgtgtcaatagtcttttttttttttaatagagatgggatctcgctatattgcccaggctggtctcaagtgatcctcccactttggtctccaaaaatgctgggattacaggcatgagccaccatgcctggcctgtcttttatttttatttttattttttttgagatggagtttcactcttgtcgcccaggctggggtgcaatggtgcaatcttggctcactgcaacctccacctcccaggttcaagcagttctcctgcttcagcctcctgaatagttgacattacaggcacctgccaccatgcgtggctaatttttgtattttcagcagagacagggtttcgccatgttggccaggctggtcttgaactcctgacctcaggtggtctgcctgcctcggcctcccaaagtgttgggattacaggcgtgagccactgcgcccggccatggcctgtctttgtatttgggtgtagtgttctgttttatgaatacaccataatttatttctccattctcctattggtagacatttgagttgtttccagtttttggccatcatgaacaacgctgacataaacactctcaggacatgtattttgaaggacacacacatacatttctattgcgtatgtacagatctaggagctttggttcatagggtggatgtatgcttacctttagtagacaccatcagttttctagtgttgtaccaatttgccatcccataaattttactgtgctctgatcgtttgtaattactgttgtgattttatcttcaaacccagagttatttaagtggatgttttccagtggttatattgtttgtggtattggttgtagctattgctgctgttgctggcaccagccgtagcacgttgtgcatgtggctgggttgggtagcaggcaaatcagatcagagtctgttggaaaatgtggattgcaacagggcagtgggctttttcttagaaaaacaaatcttctaggatgacaatggcgtacgtagcctatgtacctaacattccagccatgtttcataaagtcttctatttagagccaggttatttctggtaattgcaaatcttcccaaagatggggaggtttgaatctcagagatggaccacagagaccctgtttccggatgcgagactgtcttgcctaaagggaaggcagtcctgaggttgtttcaggagggaattctaggatgagacaaatgcagaagctttgagggtggccaggtacggtggctcacgcctgtaatcccagcactttgggaggccaaggtgggtgtatcacctgaggtcaggagttcgagaccagcctgaccaacatggtggaaccctgtctctactaaaaatacaaaaaattagctggacgtggtggtgtgtatttgtaatctcagctactcgggaggctgaggcaggagaatcacttgaacccaggaggcagaggttgcagtgagccgagattgcgccattggatgccagcctgggtgacaagagtgaaactccgtcagaaagagaaagagagagagagacagagagagagagagagagataggaaggaaggaaggggagagagagaaaaagaaaaaagaaagaaggaaagaaaaggaaaaagctttgagggtgtggagtggggaagctgtcgttaacatgggacatttcagccccatgggcttgccccttgctcttggtgtggaacaatgtttgcagagtggtgtcaaatcgtgcatacagttgtgtagggtaagtgggtcacagtgcggttaggtaactcctctcaccgtggcctagtcttcccgcagcatcttttcctggggaaggacctgatgggcgatggttgccctaactgacattctcctcttccacggacagaattcgttctttcatttgctcccttgttttccctgggtggacttggacattggctgggaaactcagctggctgttttctgcctgcctttggcagagggatgctgtaatgcagggtttcactcacgtcccgcagtggcggatggtcaacctgggctgacttctctctgaggggacattcgccctggccatggctgcaaaaagacttgcccaaaagtgctggtttgcctcttaaaggtagttctagtcatctctgggtagaacccagcttttgatgttgccagttcagttttttaacatcttttttttttttttttgagacggagtttcgctctgtcccccagggacatgagggcagtggcacaatctcggctcactgcaagctccgcctcctgggttcacgccattctcctgcctcagcctcccgagtagctgggactataggcacccaccaccacgcctggctaattttttgtatttttttttagtagagatggggtttcactgtgttagccagatagtctcaatctcctgaccttgtgatccgcctgccttggcctcccaaagttctaggattacaggcatgagccactgcgcccagccttaacatctttttactagaggaattttctttttttttttttttgagacggagtctcgctctgttgcccagactggagtgcagtggcacaatctccgctcactgcaacctccgcctcccaggttcaggcaattctcctgcctcagtctcctgagcaggtgggattacaggttcacaccaccacgcccagctaatttttctatttttagtagagatggggtttcaccatgttggccaggctggtcttgaactcctgacctcaagtgatctgcccgccttggcctcccaaagtgctgggattataggtatgagccaccatgcccggctggaattttcaaacataattttcatgatgcagcttcaagacttatcagcatgtttcatctgttcccacccactggctgctcttaatttctttctacattgttagcaggtagggtctaatactccatttcctcttgtagctccccactcctgcagctctcccaggagcactgcagactttggctttcccagaatctcctactttcaaggaggtgaatgtagcttgaagtaggttttttccctccccaatttttgtatttttaaataatttcaggctaggtgtggtggctcacacctgtaatcccagcattttgggaggctaaggcaggaggtttgcttgagcgtgggagttcaagaccagcttgggcaacatagtgagacccatgccacccctccatccctacaaaaaataaaaaaatagcagggtctggtggcttatacctccccacactttgggaggctgaggtgggaggccctcttgagcctaggagtttgagaccagactcagtattgtagtgagacacagtctctacaaaaataaaaataaaggaaatagctgggcatggtgggcatgcaacggtagtcccagccacttgggaggctgaggtgggaggatcacttgggcacaggacttagaggctgcagtgagctttgattgtgtcactgcaatccagtctggatgacagagccagacccagtctcaaaaaaataaaagattcaaattcagagaagtgttacaagaatagaacaaagaactcctcaatgtcgtccttcacccaactgttaaaatttgctacatttgctttcactgtgttcttctgagccattttagagtaaattacaaacctcgtgtttctttcatccctaaatactgatgtgtctggttcctaaaggagaaggatactacagtacaattaacaaaactaagaaatttcccgtttttgcagtgttgttaatctaattcagatttcccagctgtcacagtccaggacctcatgcaagatgcagtgtttagttgtcctgtgtctttaaatctggatctgcatcagttccttagggtatttatgtctttcatgacattggcatcggcgttgttgaagagtacagacctttttttttttttttttttttttgagatggagtctcgttctggcacccaggctggagtgcaatgacatgatcttggctaactgcaacctctgcctcctggttcaagcaattcttccaccttagcctcctgagtagctgggattacaggcacccaccatcatgcccagctaatttttgtgtctttgtagagatggggtttcatcatgttggccaggctggtcttgacctcttgacctcaggtaacctgcccgcctcggcctcccaaagtgctaagatcacaggcatgagacaccgcgcctgcccccaaccccccccctttttttttttttttaattgagacagagtctggctctgtggcccaggctggagtgcagtggtgtgaacacggctcactgcagcctctatctcctgggctcgaggaatcctcccacttcagcctcttagttgagaccacagatatgtgccaccctgcccagctaatttttaaaaattatttggcagattcccctcaacttggggctgtctgcttttcctcatggttagattcagagtgtgcattcttggcaggaacacccaggagtgactttgtgtccttctcagtgcagcatatctgggagctcatgactcagcttgtttattattgatgacattaactttcatcacttagggtgctgtgtgtcaggtttttccactgcaaaattactgtttccccttgtcaatgaaaaggtattataatttacggggaggtactttgagactgtgtaaatgtctattcctcatcacaccttcacctgctagtttctgcatccggtgattttactctgatgcctatagatttttatttttgaattccatccttccttctgcatttattaattggcatagtactgcaaagaagggctttccgttttcatgtatgcgtgtgtgtaggtatgtattatcagcttctactcatggattcagattttattccatgggttataacttatttctggtgtaattttttttttttttttttgagatggagttttgctcttgttgcctaggctggagtgcaatggcgcgatcttcgctcaccgcaacctccgcctcctgggttcaagcgattctcctgccttatcttcctgagtagctgggattacaggcatgtgccaccacacccagctaattttatatttttagtggagatggggtttctccatgttggtcaggctggtctcaaactcccaacctcaggtgttccacctgcctcggcctcccaaagtgctgggattacaggcgtgagccactgcgcccagccttttttttgttgttttttaaattgtttgtttattttagatagagtcttgctctgtcacccaggctggagtgcagtagcgcaatctcagcttcctgggttcaagcgatccccccacctcagcctccagagtagctgggactacaggtgtgtgctggctaaattttttatttttattttttgtatttttgtagagacagggtttcaccatgttgcccaaggctggtcttaaacttttgggctctagtgatcctcccacgttggcgtcccaaagtgctgtgggattacagctgtgagccactgtgcctggcctctggtgttgatttcatgctaaaatgatctctggcttggccagtggctgcctcttcaagcttgctgctgtatcttttcacatgtccccatcatatatttttgtcccaacataatccaatataggtaaaatttactatgtgataaagatggcatttaaaatcagaagagaaaggcaaacaagtggcattaagatcatcagctaacccagtggtttttgaagtgtgatcctgaggccagtggcacaagcatctccaggaaatatgtcagacacctaaattctcaggccaacaagcccttgggattcggggacacacttgtttgagaaccagtaagctaaaccacttgagggaaaataaagtcaggtaccttgcataccaaatgtggggtcgtttgtttgtttgtttgtttttgacaaggtcttgctctgtcgtctaggctgcagtgcagtggtgtgatcataggtaactgtagcctcgaactcctgggctcaagcgatcctcttgcctcagcctccagagttgctggaactacaggcatgcggtcctgtgcctggctactgaacctgtatattaaacactatgaatttgtactgaagccaccaatccaattccaactcagctccacagggctcttcctaaccttcctccactctcatgagaaccctggcactcaacactatttataaatatttacaaattccttcacatctgtaatgcacagaaggcgatttgagaattcctgtacccacaccaccatgaaaggtgaagttgattttgaaaagctccgtactttatgctgtccatgttctgtgtgtgtttcttctctttcctcgtgtgtctaccagattcaaaaagagaaagaaaaagaaaacaacctcctatttatttaaaaatcttttaagcagagggttattacagcactttacattccaagaacagacaggccagtcatgagcggtgggcctcctcccttattgctccgtgaggatggagtgttctggtggatgggccgtgggtcttgagcagctgtacctgacagacagtgtacccatttattttaaagtaaacacagcactgtttttccagtttttcagctggaagataaataaaactactgaaccttggaacttgagtcagtgggagaagagaagaaatttttaaaaagttgctcttcagttaaaaacaactttaaatttatttttattattagttttttaaaaatatttatttatttatttttatttttttgagatggagtctcactcctctgtcattcaggctggggtgtagtgggacgatcttggctcactgcaaccttcgcttcctgggttcaagcgattctcctgcctcagactcctgagtagctgagattacaggcatgagccaccatgcctggctaatttttgtatttttagtagagacagggtttcaccatgttggccaggctagtctcaaactcctgatctcaggtgatcaggccatcttggcctcccaaagtgctgggattacgggcgtgagccacctcacccggcctaatttttattgttagttttttagaggcaaggacctactctgtcactcaggctagggtacagtggctcgagcatagctcactgtaaccttgaactcctggccctaggccatagatcattcactgagctatgatcatggcactgtattctagcctgggtgacagagtgagaccctgtctctttaaaaaaaaaaaaaaaggagaggggcaggggctgggcacggtgcctgtaatctcagcactttgggaggctgaggtgggtggatcacaaggtcaggagtttgagaccagcgtggccaatgtggtgaaacccccgtctctactaaaaatacacaaattagccgggtgtggtggcgggtccctgtagtcccagctgcttgggaggctgaggcaggagaattgcttgaacctgagaggcggaggttgcagtgagccgagatcgccccattgcactccagcctgggcgacagaacaagactccgtctcgaaaaaaaaaaaaaaaaggcaatggaatcatacatactgtatattatggcctcaacacatgttcccaatttcctttctctgctttattttctttctgagtagctaagactacaggcgtgtgccaccataccaggctaatttttaaatttcttgtagagtcagggtcttactatgttgcccaggctggcaattttaaacttaaattggataaattactcaccattcttcagctgaggaggcagcaagggacaaaagtaaaagacagctacagaccctggtgccttcaacaggcttcatggtagaaactgctaacccagtcctgcatacccagttagttttttcaacctggtaaaccactatttcaatcttgtggaatgattacaataatactagattctgagagtttttctcttgctccctaaattgaacattattattaatattttgtatgactgtaaaaggtgtgtaaaatttcatatcatgtatattttaccacaattaaaaataattacttagcccagtgcagtggctcacgcttgtaatttcagcactttggagactgaggtgagaggatgacttgaagccaggagtgcaagaccagcgtgggcaacataacgagacccaccgctctattaaaaaaaaatctatatctataactatatctatataatatatataaatatatatactttatatatgtaatatataaacatatatacactaaatcattcttgagcaagctaataaaataaaaagtaaaaaaagcaatacaggctcataaaattaaaaacattattagtatttttctgattattattatttcatgcctattactaaaaaggacaatattctgagtgcttcgtatgtatcagtcatttttctgaattccctcatatgtatatacatatacacacgtatacatgtacacatgtacatacacacatgcacacgtatacatatacacacgtatacatatacacatacacacatacacatatacacacacacatatatacacacatgcacacacatatatgtgtaaactcatttattcttcctccgtacattcaaggtagattgtggtgccatcccctttgatgaagaaattgaggtggagagatgctatgtaacttgtccaaagttgtcctataaggagttctcagagttaggatttaacccagttcttttgttcctagagtctctgcccataacctctatacattctgccttccaaggaagaaggttaaaatcatttggaattctgttattcagacctaatccagttaatactttgtaatatagccactgttttggggggcatataatcatatttgtatgtatgcctttttccccccaaatgggaactcattatacatatttctttgtaacttgattttttcacccagttttttccgcatcagtgaaactaggtcagttttaatggctacagtaatgggtgtgctttgttttgttttgttttttgagacagtctcatgctgtcacccaagctggagtgcagtggtgcgatgttggctcactgcagcttcaacctcccaggctcaagcgattctcccatcttagcctcccgaatagttgggattacagatgtgcaccaccatgctcagctaatttttgtatttttagtagagacagggtttttgctatgttgaccaggctggtctcgaactcctgacatcaagtgatccacccaccttggcctcccaaagtgctgggattacaggtgtgagctactgtgcccagccagatgctttgtttttgttttgtataaatgtacccacagtttaaccagtctttcattcttggccctttctattgttttttacaattactagcagcactttttgttaaactcttttttttttttttttttttttttttaaagagatggagtctcgctccgtcacacaggggtgtgatcacagctcattgcagccttgacctcccaggctcaagtgatcctcccacctcagccttccgagtagctgagattacaggcttgtgtcaccatgcttggctaattttggcatttcctccctcctcagcctcccaaagtgttgggattacaggtgtgagccattgtgcccagcctaaattcttgtaaagatacctttatgctcctctttttttttccctacagtaaattcccaggcatgcagtcgctgggtcagaaggtgggcgtgtttcaagtttttgatgcctgctgcctgtgtccatggcagagtctggaccaatttacacactgtaagggtgccacatacctgtttccctgtatctccaacagcactgggtgttgtcagtctttttaacttaccttagtctgttaggcaaagtgatttctctttgttattttattttattttgttttatattttagattttattttatttatttatttaatttatttattttatttttatgagatggagtcttgctctgttgcccagactggagtgcagtggtgtgatcttggctcactgcaacctctgcctcccgggttcaagcaattctcctgcctcagcctcccaagtagctgggattacaggcacctgccaccacgcccagctaattttttatttttagtagagatggggtttcaccatgttgactaggctggtctcaaacacctgacttcaagtgatctgcctgcctcagcctcccaaagttctgggattacaggtgtgagccacggcgcctgacctccttttcttcttgaggaacctccagtgaggtgttctgctgctctgctgcatttgcttgtcccaaggtcgccagtgacctccgtgttgctaaacccaatggtcacttctcaagctgtaatcactggccttatagattggacacaatgaatcgatccttcctgcttgacatatgttctgccttggtttcagggtgccacaatctgtgggttttctgtccatctctctggtcactctcattcagtctcccttgctcgtttttctcttccccagtctgcaaacatgggggtgctccatggtggctttgtcctgtgttcatttgttaatttacccccctttcattcacaagcacatccagcctccttgctttaaatttggcctatatgcccaaaactcacagctagggcttctcccctggcaaccaaagacagtatttacgtctaattaacatcctcaagtgaactgttgaaatctgagtcacctgcttcccacagctttctacatcttgaagcagtgacaattctgtgtcactcaggctaaaatcctccgtgccttccttgacttcattttctgtcccatcagcacctcctgtctgcattgcctttaggatatattctgggatccgaccatctgtcactgtgactgctgctgtcacccatgtccaagtcacttcttgactgttattgcaaaggcctcttaatgggtctccctgcatctgctgttgtcttcctatggaacggttctgaatgcagcagccagaataattcaaaccagaagtcaaattgtattgctactccataaaaaccaaagtcattccctatgagcccaccggccccctgtgatgcctttatgtgtgtctgctactcctttgttacctcatctcaaacatgctcctccgctttccagatccctcgggccacaggtctccctgctgtttctccagcccggtgctgctctcctgccactgacccttggcactggccttaaatctctcctgaaactgaccccttccagtccactgaaatatcacctcagtgaggccttctttgataatactgtcttcattttaatttaatttaattttctagagatgggatctcactatgttgactaggctggtcttgaactcctggccccaagcaatcttcctgccttggcctcccaaatgctgggattacaggtgtgagccactgtacctggtcatgccttttaaaaaaggcatgtaattcagggattttaaaatgatttttaaaaatcattaattcagtgatttaaaaaaacattactgagtcatgcagtcattgccatgaatttttcaatcgccccagtgagatcctttgtgcccatttatagtgaattcccctttccacctccagcccctggcaaccacgaatctactttgtgtctctgtagatttacctttcctggacattttatagaaatggaatcatacagctgggcacagtggctcatgcctgtgatctcagtgcattaagaggctgaggcgggggcaggggatggatggggttcgagactagcctgggcaacatagtgagaccctctacaaaaaataggaaaattagccaggtgtggttgtccacacctgtagtcccagctactcaggagggtgaggcaggaggattacctgagctttggtggtcgaggatgcagtgaactgtgatcatgccactgtactccagcctgggtgacagagtgggacccctgtctctttattttttgttattattatttttttgagatggagtctcactctgttgcccaggctggagtgcagtggtgcatctcagctcactgcaacctccgcctcctgggttcaagtgattctcctgcctccgcctcctgagtagctgggattaaaggcatgtgccactgtgcttggctaatttttttgtatttttagtagagatgggatttcaccatgttggccaggctggtcttgaaatcctgatcttaagtgatccacccacctcagcctcccaaagtgttgggattacaggcgtgagccaccgctcttggccccctgtctcttaaaaaaaaaaaaaaataggaccacacgtattgtatattgtggccttgaaaaaactgtcttaattgtgactactcctccccagcattccctgtttctcttctctgctttattttcttgtaagcggttctccccatatactactgtttattttgtttatttttctcattcattgtcctccacaaatagaatgtaaggtctatgggggcaggcgttttgtgaattttgttcacttttgtgtacctacaacacaaaaccatgaatacatgcatatacacacacacacacacacacacacacacacacgacgttgaaagagtgactttctcctctaattactgaggatgaacgtcttttcctgtgacttaggtctttgcagccagtgtccggctcacctcggaggctgacagcaggaccagtgtggtgcgtgctgcccactccggcgaggctatgggctgagcccagttccagccgccaaatgcaagccgttgtttcattttgccctgatcgagttgcagttacatcagcgactactgtttttttgattggcaccagatgccaggctttgggatttcaggctgtctttagcggtctctgaaaagccctctgtgtgtcgctttctatcatcctgcacctcaggcagatatgcccaggccagaacctcaaggaattcccaaagatgccaaaagcaaccccctccctcagccccacaccctcaacttctcaaagttgcagccggggcccttttcctggctttggtatcagctgagagctgttggaaagaaaaggtccttttagccacaagtttcaaaaagtaaacacggaggccctgcaacgaatgttccaacaatcctgcaccctgtgtcactgagtgctggctgagaggctgccttgtggagcctcacctgaagagagaagaaaagctctctgtcaggattcccttcccctggtccaggctgctgcctccagagtgttctgtgaggtgtcggctttggaagtcggtcagcctcgtgggaacacatatttgagcaaagggtgattctgctccaaatgctgaatgctggccaaggcctttcctcttactccttttctacaggtatattgtgactgtttgcattttagtctgcagtaggtggccaagacattttttctcccctttcttttctttcttacttttttttttttttttttgtagagatgtagtctcactgtgtcaggctggtctcaaactcctggcctcaagcaatcctcccatctcggcctcccaaagagctgggattataggcgtgagccaccatgcccggctatttttctttgttttgttttttttttaaataagaaacagggtcttactctgtcaccctggctagcgtgcagtgccatcatagctcagtgtagcctcaaacttctggctttaaacgatcctcccaccccagcctcccgagtagctaagaccagaaatgcacaccactatgcccagcttttttgtattttttgtagagacagggtctccctttgttgcctgagctggtctcaaactcgtgggctcaagcgatccttccacctcagcctcccataatgctggagttacaggtatgagccatcatgcctgacccctgcttttctttccttcttagacttaagagtttcttcgtgttgggtcagggttttgtgtgagagtttctttcttctctgtagggcattttcttaggatcatgagccttgcttgtagcaggggcagggcctgacgctgatttatcagctttcgtgcagtaagcacctttgaattccgagctagaggctggcgctgaagtggtgaacagcagacagcatccctgtcctcctggaatttagactctagagaggaaaacagaaagtcgaacaaatggtgcaaactattccagttgtgacagatgcgatggagcaaagtacaggatgatctgggaatgcatcatgggagactttgcctggcctgggtggggtgtgtgtgtgtgtgtgtttgtgtgtgtgtgttcatgcatgtgtgtttatcaaggaaggcttcctggaggaagtgacacctggacaccagaaagagaaaaaggaatcgtctagaggaacaagagaaaatcattttaggtggagggaacagcatgtgggaagctttgaggcaggaacaagctggttgctgtcaagtcacacaggaggccaacggcagggaggaggcaggtgctagatcagtgctgtccaatagaaacagaatttgaggtgtgtgtataatttagaatttgctactagccatattaaaaataagtcaaaacataggccaggcaccgtggctcacgcctgcaatcccagcactttgggaggctgaggccagtggatcatttgaggccaggaattcaagaccagcctggccaacatgacaaagctccatctttactaaaagtacaaaaattagccaggcatggtggcacgtaatctcagctacttgggaggctaaggcaggagaatcacttgaacccaggaggcagagattgcagtgagccaagatcgcgccactgcactccagcctgcgcaacagagcgagactgtgtctcaaaaaagaaaaaagtaaaaacaaaaacacaggtgaaattaattttaataatgtagcttatttccacatatctgaaatgctattttaacatgtaatcagtataaagaaaagtactaatgagatattttacatactttttggcctcaggtgtgtctttctgacacacagcacatcttaatccataccagccaccttctaagtatggctgcaggtagctgtggcccccatattggacagtgcaggtctagaggttgagtccctggagaaagactgggaaacttctcttcttttatttatttatttgtatttacaaattttttgatttaaattttctctttttcttgtgttttttttttttgaggtggagccttgctttcttgcccaggctggagtgcagtggtgcggtcttgttcactgcagcctgtgctcctgggttcaagcgattctcctgcctcagcctcccaagtagctgggattacaggtgtgtaccaccacacctagctaatttttatatttttagtagaaaaggggttttgccatgttggccctgctggcctcgaactcctgacctcaagtgatctgcctgccccagcctcccaaagtgctgggattacaggcttgagccaccgtgcccagccaaaaatttttgttaaaacatcaccttgtcttcagaagaaacttttctgcgaaatcaggttaccattagtgtagggttatatttgtacagttctagaaacttcttccattcctcttgagcctgtggcacaggggcgttgggccatcttctccaagggcctgtgctgtttctcatcagccgtgtagcattcaggccctaaatgaacacctgctgcaggccgggaatggtggccttgacctggtgacaggaaaatgagattgttgcctgaatgtgagctgtttccttccccttgccaaaaacaaaactgaaacacttcatctggtgtttgggcctctgctccgcaccagtcattcgggcggcttccgcctgaccgtccattccagcctcccaggttctcccaggggaggtgctgtggctgccggaatagccatgttaacatcagacctcatttatctcattgcagtgtttaattttccctcttccttcagactaccaggattcttggagtatttttcttagtgtaggaggcttattctttgtgggagagtggtccgtcaaaagggaaggtaatcctggaccagagtaagagtgtcacagtcacataagtgggcagttagtgccactattaggtacagagtgggactctgacttcagtgcctggcctggcctgggagtgctgtttattacatccaggacagtaaggcacacacttctcagaaaataatatccctccctccctcccttcccccctccccctccctcccccttccctttgttccttccttttttccttcctcttgcccttttcctctctccctcaattaattaatgtttataacacatgtattgcatgaattcattctcttggagggaggaatccccaaaccctcttgagtggatagagtgcatctgtatatatttgaaaagattcatagattacaagtgaaaaatcaaagggcagagctttgggcctagaatgacctcaactttgcacctgtggctttttttttttttttttttttgagacagagttttactctgtcacccagactgcagtacagtggtgtgatcttggctcactgcagcctccacctcccgggttcaagtgattctcctgcctcagcctcccaaggagctgggattacaggcatgcacaaccatgcctgactaatttttgtatttttggtagagatggggtttcactttgttggccaggctggtctcgaactcctgagctcaggtgatccacccacctcaggctctgggattacaggcatgagccactgtgctcggccttgcatctgtagcttttatgtgtatatttgtgcttgtgtttgcaatgacttcatacaaagtttttcaaagtgggcgatactggctgggtgcagtggctcacacctgtaatcccagcactttgggaggctgaggtgggcggatcacttgaggctaggagttcgagaccagcctgaccaacatggtgaaaccccgtctctactaaaaatacaaaattagctgggcatggtggcaggcacctgtagtcccagctactcaggaggctgaggcaggagaatcccttgaacccaggaggcagaggttgcagtgagttgagatggtgccactgcactccagcctgggcaacagagcgagattccatctccaaaaaaaaaaaaccccaaaaaccaaaaaactaaagtggcgataccatgggaaaggctttggaatgtgtgcatttgtggagtaggtgtcatagtttacctttctgtatttgaatttttttgatgagcacattattttttattttgaaagctaatattatttattgtaaagacgatatgatatagcagaagtgggttttttttttttggtttttttttttggatacagggttttgttctgttgcccaggctgaggtgtagtggtgcgatcacagctcactgcagccttgacctcctgggctcaagtgatcctcccacctcagcctcccaagtagatgggaccacaggtgcatgccactacacctgtctaagtttttacattttttgtagacacaggatctccctatgttgcccaggctggtctcaaactgggctcaagggattttctcaccttggcctctccaagtgttgggattacagacgtgagccaccacaccctgcctggaaaatactttttaaactttttactatggaaaatttcaaacataaataaaagtagaagcagccaggcgcggtggctcatgcctgtaatcccagcactttgggaggctgaggtgggcagatcacctgaggtcaggagtttgagaccagcctggccaacatcatgaaaccccatctgcactaaaaatacaaaaattagccgggtgtggtggtgggtgcctataatcctagctactcaggaggctgagtcaggagaatcgcttggactgaggaggcagagcttgcagtgaactgagatcacaccactgcactccagcctgggtgacaagagtgaaactccgtctcaaaaaaaaaaaaaaagtagaccaggcgcagtggcttatgcctgtaatcccagcactttgggaggccgaggcaggcagatcacaaggccaggagtacgagaccagcttggccaacatagtgaaactctgtctctactaaaaatacacacaaaaaaattagccgggcgtgatggtgggtgcttgtagtcccagctacttgggaggctgagacaggagaattggctgaacccaggaggcagaggttgcagtaagccgaaatagtgccattgcactccaggctgggcaacagagtgagactccgtctcaaaaaaaaaaaaaaaaaaaaaagtggagccgggcacggtggctaaggcctgtaatcccagcactttgggaggccgaggcgggtggatcacgaggtcaggagatcgagaccatcctggctaacatggtgaaaccctctctctaataaaaatacaaaaaaaaaaaaaaaaattagcctaacacggtgaaaccccgtctctaataaaaatacaaaaaaaaattagccggacatggtggcaggtgcctgtagtcccagctcctcaggaggctgaggcaggagaatggtgtgaacccggtaggcggagcttgcagtaagccgagatcgtgccactgcactccagcctgggtgacagagcgagactccacctcaaaaaaaaaaaaaaaaggggggggggcggagagaataatggaccatctagcaccagttacccagcttaaatgataaccagcacacatctacttgtccttcatctttagctcccatcttttggggaagtatttgcaagaaaatctcatgccttgtgtcatttcacttgttgacactcctgcatacatgtctaatgtttaactgaaatggaaattatgaaaaaaaaaaaactactgtggaattaatggaaattgaacaaagaaaatctttgtttcataatcttactgctcaaacacaacttatcatttttccctggttcatttatttctttgcccctttgtatacttatttttacatgattttagtaatagggtgcattctataatgtcagaggttgcagtgagccaagatcgcgccactgcactccagcctgggcgacagagactccatctcaaaaaaaataaaaacttaactttgtggtatgaataattttccatgttgttgtatacgctttataatcactaatccaaatcttaattggggcataataggtccctcatctgaaattataatttgtaaaaaaactccaatgtatacaagggaatttttttaaaagcagaattgtaaccttaaaaaataattttctaagaggactcctacattttgctctgcaaagaacatttaaaaggaggtttgttctttggaaggtgtttataaacatggctttgataccaggcaactgagagaggcggttgtggccgctgcggttccctgagggcacagagcatgggtgatctgttggagccaggcagggcctgggcaggggattaatggtgtggcagggactctccctcccctcggagatgaggagcactaatgacaaggcagcagtaatgatgtgaactgataatttattctaaagacttaaccttcccagatctgtatttatttccccaggtaccttttaaaaaattaaaatatgctacggcttgagagatttaccaagacggatgaaatctttgtatcttgttttaagaggatccacagctggttcccgagactccttctggggtaccttgttacgtgggtgactgtaatgggtaactggtgctgaattgtgtgtgcatatgtacttttttttttaagtaaaggaaaatgtgtgtagctggatgggccttgcctatagagcactgggaccctgaatcaagagaaataagggtggtcctggttggtgagtccgttatgtactgaaatgaggacatgagtgcccaatccaccttcctttctttccctcctcctaagggcagatgccccatccatgcttagaggctcccctttcctgccttcccaggaacccttcttgatcttcctcccatctctctagctgttcttctctgtctttcttgcaaggtcatcatctattattaattttttattaattttctttgagacatagtttcgctcttgttgcccaggctggagtacaacagcgcgatctcagctcaccacaacctctgcctccctagttcaagcgagtctcctgcctcagcctcctgagtagctgggatcacaggcatgcaccaccacaccccgctaattttgtatttttcgtagagacgggtttctccatgttggtcaggctggtcttgaactcctgacctcaggtgatccgcctgccttggcctgtcaaagtgctgggattacagatgtgagccatcgtgcctggcctaatttttatatttttagtagaaatagggttttgccatgttagcaaggctggtcttgaactcctcacctcaggtgatccacccgtcttggcaaggtcatcatctatttaactgttaaatatgggagtttcctattattccatcctcttcttccatgatctcatctctgtttcaccttcctctctatgcaaaccaccgtgtgcaggtgagccacagatttgaatcacttctgagctctcttcccacgtatctgacgactctcttggtgtttccctgtggtgttccctgacaggtgtttccctgtcagaagcacctcaacatgtgcaagtcacctcctcagacttggtcctgttcccgtattctgtatttcatcatatagagcctctatttgtccagttaagtgctttagaatcccaggagccgtcttcgatacccgacccctcttgcccaccccgttttctaatctcttttcagattatcttgatttttacttttgcaagtctgcccacttcttcagctccacttctgctctagtcctttcctggctgccaaaattttcatctgcagcctcctgtctgctctgcctgtttctgtccttcctttcctccggcttgttttccacaccaaagccagaatgattattaatccagcaaggctgatcttgtcacacctcagttaaaaaaccctttagcactgtgcagtggctcttaggttacagaaaaactctctaacacagcatgtcacaaggcattgcaatgtccagtgaccactcagtcctcccacccatttggatctcattccagtccagccccgttcatctctgcccactttcctgaatgcacccagctcattgtgccacaggacctttgcacacaacatttcccctgcctggatggtcttcctccctgccctgccctaccctgctagctgtcttcttgaaacttagatgacagttatcagtttctcaagaaacttttcctgatgtcctgaccaggccaagcatctggctgctcaggggaccatatgttaatatctcttgcatgaaaccttttcttacagttgcaactttacatttccttgttacttccacttctcccactgaattaattgtaacgttcctaaaagcagggacaacgtctgtttccattttccatgataacatagcttcaagcactgtctggaagatagtgggcacccagcaaatgttacttgaacctcctgggttcaagtaatcctcttgtctcagcctcctgagtagctgggaccataggcacacgccactgcgcccagctaatttttttttttttttcagatagagtctaactctttcacctaagctggaatgcagtggcgcgatgttgggtcattgcagcgttcgcctcctggattcaagtgattctcctgcctcagccacccaagtagctgggattacaggcacatgccaccatgcctggctagtttttgtatttttagtagagatggggtttcaccacattgcctaggtgggtcttgaactccagcgctcaggcgatctctctgccttggcctcccaaagagctgggattacaggcgacaaccaccatgcccggcctagtttttttctgttttatagagatgagggtctcactttgttgcccaggctggtcccaaactggtctcaagccatcctcctgcctcggcctcccaaagtgttgggattacagggatgagccactgtgcccagcccaggaaatgtttcctgaatgaatgaacaagaaacagagaaaaagtttgtaaactggctttgtaaaaatgaggctattttctctagaagagttcatacaaccctcaggagaccaaaactttaatttagcaatgataaagggtagattcccagcggtagtagcccaaagaagagactgcaagaccaagccagagttctcattacattctgggttctgggtaagaccctgccagagtgtgagtgttggggggccgcggggaggtggagtaagcagagtcagcattggtgccccaacaggaataccagtgttcactgttggcctagctgggtagaagagactttctgttgttaggctctggctaaggttggaagccgaagagccatcgtaacagtaaatcctggaatcatctggcttcctttactgcaaaggaaatgtgaaagagccttctctctagacctggggtggactccagcctgtgtgtgtctgagtttcagggaactggggaatggaaaggagactgtttactctctgcccttctggaatttcccccggttcccttcctctgtgtaccagtgtttgcagttatgtgtagaatgaacacgggcctgttaatgaagtgctgcttactctcacccgcttttgatgggcctatgggattgagggcagagggaggcaggaagaaggaggcttgtttcactaagcaggtcttatgttaatggccaaatcagtcacatcttcatcgggcttcagagactcttaatcctggcgtccttggcctccctttaaaaaattctcctttctttcttgtttcatgtttctcaaatttccaggtaaatcctatcatttgtattctgaattaggaaccaaaagaaaacagaactatttttcctttgacatgcacatacatttcggtggtatggggtggggagggacaataatgagaaaataccccaaactagaaagttctttcgtacatttgctgtgaaactctccaggcaagagttctggattttgtaacggaattgcattatagtagcatggtctggcagttacagtttatgtagttttttttcttttgttggaataaggacggcaatttccatgccctatttatctatatttattagtaccacatgcaaacaacatatttttaaaaatccaggtcaagaaagggaaaaagtaactcttagaaaaatatgactcatccttgctgcacgtacaaactcttctcaataggaaattattaacttgaagccacttgcaaatctgaggctttgaagggaggaaaaataagagtgagagttattccccaaacagcttgactgatgtgtcttctacctttttatattttaaactatattttgtcaaattcttgcaagtttttattgttatagttgctgttagtaccttaggcatgctggcatggaaaaaaacaaaacctttttttttttttttttttttgagacagtgtcactctgtcacccaggctggagtgcagtaccctgatctcagctcactgcagccttgacctcctgggcacaagcgattattccgcctcagccccccaagtagttgggagtataggcaggtaccaccacgcccagctaatttttgtgtttttaatagaggcagggtttcaccatgttgcccaggcgggtctcgaactcctgagctcaagcgaaccatctgcctcggcctcccaaagtgctaggattacaggtgtgagccactgcgccctgccttctttgtttgtttgtttgttttgttttgttttgttttgtttgatagtggccagttactagaacaaaaactgttataggaaatgtgaaacatacacagaggtggaaaaacagtcgatgaatccccacatgccattacccagttcagtagccatctatgacgggccattcctgtctcatctaacttcccatcccacccctgctggattaattttatgaaaatcccgacatacttcaactataaatattaatattttagtgtatttctctaaaagataagaactcttaaaaacccaacccatgatgccaatttcatacctagaaaactcaatggtaatcatttaatattttgaactatctagtcagtttttacatgtccccagttgtagtgtaaccctttcattttatttttaaaaaatttttaatgttttttgagacagagtctcactccatcactcagtccggagtgcagtgacatggatctcagctcacagcaacctctgcctcctgggttcaagtgattcttgtgcctcagcctcccaagttagctgggattacagatgtgtgccaccacacctggctaatttttgtatttttagtagagatggggttttgccatgttggccaggctggcttgaactcctgaactcaagtgatctgcctgccttggcctcccaaagtgctgggattacaggtgtgaaccactgtgcctggcccaacctttttattttttatttttatttttcgagatgggatcttgctctcttgcctaggctggagtgcagtgatgcaaacatggctcagtgcagccttgaccttctgggctcaagtgattctcctgcctagcctcccatgaaggtgggaccgcaggtgcacgccaccacgtccaactaattattttattttattttttatacagatggggtctcactttgttgcccaggctggtctcaaactcttggactcaagcgagccccctgccttggcctcccaaagtgctgggattacaggcgtgagccactgtgctcagcctttttaagccatcggtttgtctgagtcaggaaccaaacaagattgatatatcttttcagtctctcttaacttagaggtagtcctccctctttttactccttgcagtgtgttgttgaagaaactggacagcgtgtcctttacagtttcccacactttggattttgctgtgtgtctccctaaagtgtgggtctgtgtgtctctctgtccctcatgggcagatctagaggctgagactgaccttggttcttttttttctctggtgtggtgatatgtgtttccatcaggaggcacatggtgtctgattgtctctcttggtatgctggcttttaaagggctgtctttcaaagggcacagtccctggggacttcccagagtcttttccctagattctcatattcagccttactgctgtctgtcgacctccataaagtagcattagaaggtattggtaaccagttattacttagaacagaagggtgcagtcgtatagctgaagaagtatgtttgctgattactgaagttagcatgagcttaggcctttggctttcttgctgaaacctgagcctcttgccagctgaatattttcattatatatgttccatttagtcctaattgaatcagacttcctctagccatgctctaaattggcactgtttgcagcccctgcctgtgacttgcccaaagctttgattccaagagatcagtggccctgcggggcctggctgatgtgctcggtggggagtcctggggctttctaactcatgctagggaggaggccagggtagaatcttcttagacactgtgtttcttaaagacactgccatcacctttgcccaaaccaccatctgctcttgcctggattaccacagtgacctcctacctggtcttgtgtacctcagcccttctcctgtagccagactggttgtgctacagcaggaatcaggtcacttccttgctcaaaaccctgtaacggagtcccgtcccatgttgagcaatttccaaggaccttgtcccaaggcctgactgggaggctctggctacctcctgccctcatctgctcctctcttccctcgctccactccagctgccctggcctccctgccattccccagacatgctaggcatgctctctcacctagcacctctgggcttgctttttcctctgcctagaatgttcttcctccagatacccacgtgacttcccccatcctttagtctttgctcaattgtcaccttcccagggaggtttttcttctctaccccacatcctctcccagcttaacattcttcatcccccttcttttattttttcctattgcacttgccaccttcttttttaaatttttttatttcattaaaaaatttttttttagtttttttttttttgagacggagtttcgctcttgttgcccaggctgtgtgcaatggtgcaatctcggctcactgcaacttctgttttccgggttcaagcgattctcctgcctcagcctcccgagttgttgggattacaggtgcccgctaccacacccagctcatgttttgtatttttagtagagacagggtttcaccatgttggccaggctggtctcaaactcctgacctcaaatgatccgcctgccttggcctctgaaagtgctgggattacagacgtgagccatggcgcccagcctgcacttgccaccttctaacagattatgcaattttcttttttttttaaggaaaaaaagaaaagaaattgcttattgtctgtttctgccaagtagaatgtaaatgctctaggagcacagatttttgcccatcttgttcctgttgagtcactagaatagtaggtgctcaaggcacggatgtgaacagcacggatgcagatagagcagggcttgatgagcttgaggggagcttgtgagcttcctatatgctaactcagattccagttatggaaatagactcactaaacctactttttcatgggtttcttgattttgagcaatgcctccaaaggcagcaggaagacatactggaagagaaagggcctctgtagagccgtctgcacagctgtagtgaaaacagagggccccagaggtgaggtggctaagactgctatttataactaaggttctagtatatgttttccagccacacttacgcctttcagcctcccctgtatgctcgaatctgtcactcaattagctaatggtttctttagtcccattatgtattatagggttcctctggctcaatttttttaaaaagcaaataatgaggtgttctgttctctgaagtttaattttttaaataaccttgccaatttaaaaaaacctttccccaatgtttaattatgaaatttgcaaacatatggaagaattgaaagagtgatacagtgaacacccaaatgccatccacctatttctggctcttgttaacatttttttgccaaatttgttttatctatatgttattatagtatatggctgggtgtattttttttcctgagccatttgaaggtaaattgcagatatcatgacactttaatccccaaaacttcaccctattcttctaaaaagtcacttgaaaataactgcatatatcattctcatctactcttgcgtctcccaagaataagacatgctcatataaaaccaaagtaaattttttttttttttttgagacagagtcttgctctgttgcccaggctggaatgtggtggcacgatcctggctccctgcaatctccgcctgccgtgtttaagtgattctcctgccttagcctcccaagtagttgggattacaggtgtgtgccaccatgcctggataatttttgtatttttagtaaagatggggtttcaccatgttggccaggctgatctcgaactcctgggctcaggtgatccacccacctcggcctcccaaagtgctgggattacagacgtgagccaccgtgcctgtgcataaaaccatagtactactattgaacctaaaaacattaacaataatttcaaacatcatctaatattcagtttgtatgcaaatttctccatttatcccaagagtatttttttcaaaccaaggtttagtcacaattcacgcatggcatttgttggttttctttagatctagaagagtctccatcctgcctccttttttttttttgtttaaatgaatttaatgacattaacattttcaggagttcaggacagttattgtatggatgtctcacattctggcatctgattgcttcctcatggtatcatttaatgtttctctatccccctctttcatgtgaagcatgtggcatcaggttgccttgctttgctctcagtgacagtaaattagatcacttggttatcatggtgacagccagaggtctcaaatagaacagaggagggttatgttctcaaaagtttagtttaaagaaaaaaggccctctctctcctcattggctatttaaatttaaattaaattaatttattttttgagacagggtctcgctctgtcacacaggctggagtgcagtggcgcaatcttggctcactgcaatgtatgcccccaacccaggctcaagtaatcctcccacttcagcctcccaggtagtggggaccacaggtgcaccctgccagacctgggtgattttttgtatttttaatagagacagggtctcaccatgttgcccaggatggtctcgaattcctgagctcaagcgacccacccatcgcagcccatctcagcctcccaaagtgctgggattacaggcatgagccaccatgcccagtcctattttacttttttgagacgcagtctcattttggttgcttaggttggagtgccctggcatgatcttggctcactgcagcctcgacctcccgggctcaggtgattctcccacctctgcctcctcagtatctgggactacagttgcctactaccatatccagctaatttttggcatttttattagagatggggttttaccatgttgcccaggctggtcttgaactcctggactcaagcaatccatcctccttggtctcccaaagtgctgggattacaggcatgagccactgagcctggctggctgcttttaattaattttttttagtgacagagtctcactgtgttactcatgcttgtcttgaactcctggcctcaggtgatcctcctacctcagcctcccaaagtgctgggattacaggcatgagccactgcacccagcccattggctctttttgaagacaaaatgtgtctcaaggtgttgtatgatggcttctgagccttcaaatatataatgattccactggagacaatgagtagataaaccagatagaagagctaacttggatccctgagatgagaccatggagaggaaaattcaggctatctctctgccttctgtccaaggcccatggcagtgtgactgtcacgggggtagaaattagcaacaagaggccttgggttcctccactctcctgttgaacattatcagtcctccaggaaggaggaaaaaaaagtgccaacactccatttatgaaacgatgacctttgaggtatcaggacaggaatcaaggagccttccggaatgctcatccctcagcacgcttccaatagcggtgtgtgtcctggagccagaaggctgggcgcctttaggagatgacctggaaacaagatgaaaggacagtttgtctgcgtgatgggtctgtggcttaccttggaagattctgtggtcacagcccaaaaaagtctcagaaggatcagaaggatcaagagaagaatgactataaaatgaatgaaggctagggcgcggtggctcactcctgtaatcccagcactttgggaggccaaggtgggaggattgcttgaggccaggagttcgagaccagcctgggcaacatagtgaaccatgtctctataaaaaaaaaattaaaaagcaaaacaaaaaacaaatacagtgaatgagaagttagaccaagaggaattaggactcttcctaaacacaggaagtcaacagggagatgataaaaatgacagcttattaggaactcggtaggtgccatttacttctttgcaagagtcctctgaaaaaggtgccatgattacccctgttttgcaggtagggagactgatgctcaggttaggtagtttgcttcacggtgcacagctctcagggactagaactgtgaattaaactcggagtgcctgaccacaccccctcttaatccacgtgcttaaaaaccctattgccagagacttaggtactggatcttggcgtaatagaggagggagaccctccttgacttaaaaaaaaaaaaaaaaaagcccacaataatcaacacttacgattgcatagtttcagggggctagatttggcagcagcttagctgggcagcctggccagggatctctcccgaggctgcattcaggatgtggactaagctgtagggttaggctctgctggggctggagcagctgcttcccaagtggccactcccagggatggcaagaggtggctgggggttgaaaggcctcagttccttcccatactccttggcttttgaaggaactcgtttcctttggaaactacaagtgttattttatagaaacgtttagtactcaccaaggccctcagtggaactggctgaaaatagcagcagactcactcagaaaagaattggagagatccatggcagggaagagagattaagggaaggtagagcgcttaggagagcttgaaaacccaaagggtaactggtttctatcttattataatagatctttgacttgatccagaattttctgctaagttcttaaagggttgtatctgtagagggatttagagcagtcttttttgggggggtgggggaaggggggttatctctagaaagtgctgaaatttaccttagtgtgcttatggagacatttatatatactataccttgttctagaagacaggtaagatagcttataatcatgcagtagcaactaagaaataaaacaaagtgttggattgggtggggcgggtggggagggaggttcagatatgtggttttgtaaggtgtggagtggacggaccccgtggaaatcctcataaaggctgattccctcttggtaattattaaacggccctgaactgaaggccatagctcctggctggactgaactgaagggaactgaaatattcagtgtggactaaacacttaactagacagaagctattcagcacagccaagttcagtagcagggtggagggtgtgtatgcagcagtttctagcctgcctagggcttggtgcttctgcctccagtcagcttgttctgtttttctgctacagtcacccacaggactgaatctgcctggtatccttggggacggggtgctctgggccacttctcaattctctctccttaagtcactgatggggctgattagcctgtattgaagtttcattgttttaacttttttttccttatttcaagacaatacattttcaggattgaaaattttaaaaaacaacatcatgttttaacacaaataagaaaagaataagcccctgcaatccctcatctagatggagatgcctcctgttgacagttccttagggtctcctcggtttctatgggcagggggatattacttgcaactaatttcttcgtctgtacgccatcaatatccctatgcttttctcacagtcctgcaagtataaacaaactaatacatcagtaatgtggaaattatggtgctgacccagtgatatgaaatgtttagaaagagtgcagcttcccctccagcctgatacaacagtgatttcattagacatattccttcccactcttttttccatgccacgaggcaaaatgtgaagatgtggagaaagcattcccagagaagccagcaaaggtgaaatgaaagcttctaatttagagaatcttaacttggggtgcattctctttagcccatccatgttgccttttgtaccccacagtggagaacatgcagctgaccctgaacctgcagacggagaacaaaggcagcgttgtctcaggcggagagctgacaattttcctggacgggccaactgttgatctgggaaatgtgcctaatggcagtgccctgacagatggtgagtgccgccctgctcctcaggactgtgccgggacagggtggggctgggcgggggccaggaggtgctgagagcttggttcttactaggccatcttggtttgattcccactcagcctggcccatagctagcccggactcttcttagctccgtggatcagtatcacaacatgaattttcaagggtcacagtaaatgtccagtctttgtaaatatgtaattgtttggtttgatagcagagaaaaacatctttcatcccatgtggactttggaaaatgaaatatctttatcaaatgtgactttggcccattattttccttcccaatacagttacactttttggggaggttgaaggtgtttttatgagaggcattggttgggaagggtacgctgtgttcttctagagatacacactagcaaaatacagacagagcagggaatttggagagtgtcccttgctctgtcccgaatgttggtagtttgtttcttttgatctagtctgaaattagtcacctttggatctagcaggaaattatttcatgaagtccgaggtctgaaatgggttgggtttctccataatttttctcattaaatgttttgttagatgtgatgtaaccatggcactttccagacaccaagcaggatttctgtagcttcaaaggggtgcaatttgaattgcaattcaagggcagttggttggaatctcagtggccggatgggccttgactgtggagaaaaatcccttaactggactgatcggtgtttggggtgctttggtgcttggagaaaaacatgtgtcattcactcattcaacacatatatatgtaattgtattctggtatgcactaggtcttagaccaggccctagccagatggcagtgggccaaattcacatggtctccactgcttcaggtttacagtctccttgatgagggcaggggaagttagatatcaaatgagtaaacacacagataattacatagctgtgattgtaacaaaagctatcagtgaaaaccacagggtgctatgagattcctgtactttgttgggggagatctcatctaagttgcggggtcagggaaggtttctctgaggaagctgagacttggaggatgaggagtttagacaggccaaggtgggagtgtggggtaaaggggtggcttggcctgtggtgggaacagaggcagtcagcgtggttggattattaggagcaagaaggagagagaatggaggaggtgagatcagagaaacaggtcaactcagatcacgcagccttgaaacatttggtagggattttggacctcatcttgagaaacagctattgaagggtttctcgcagaagactatgatgatctgatttggctttgtaaaagctctctgggtgtattatggagaaatgcccccgatttctggcccctactttgcatggttagggttttgttctctatctcacgtttttgaggctcagattcatttaatggataaggcaatgtgcttgtaagtgccttggatgttcttcaatgtcttggagaagagaagctgtttccaaggtttgagccccactgctccatggcatggatcggatccatatgatcgtccctgttcctcttctcctggtggctgcagcttgccggatgtccatatcccgtggtggtgggcaactctaacacacagacggagttctgttcctggccgtcaaatctcaaacacgagttgagctcctcaatgcttctgtcttttcttgtgattgattcctttctaggatcacagctgccttcgagagactccagtggaacagcagtagctccagagaaccggcaccagccccccagcacaaactgctttggtggaagatcccggtaagaccccccttggtgaggacaaagagctaagaagttgcttagagctattgaaaacatgttgggacatggcggggaacattttatggtagaaactgttggagatttccagagatcttgtaactgactcagtagttaagaaagctaatagaggagtccagagcttaggatccttatttattttttttttaattgaatttggatttttaatttttgtttttattttagattcagggggtacatgtacaggtttgttacatgggtatattgcatgatgttgaagtttgggcttctaatgatcctattgcccagatagtgaacatagtacctgattggtagtttttcaattcttgctcctctccctccttgtttttggagtccccagtgtttattatttctatctttgtgttcatgtgtactcaatgtttagctcccacttataaatgagaacatatggtatttggttttctgtttctgcattgatttgcttaggataatggcctccactctccggctatattcatgtccctgcaaaggacatgatttcattcttttgttttgttttttgatatggggtcttgctttgttgcctacgctggagtgctatggcaccatcacagctcatagcagccttgacctcctgggctcaagcaatccacccacctcagcatcctgagtagctgagacagcaggcatgtgccaccatgcctggctaatttttttatttttgtagagatagggttttaccatgttgcccaggctggtctcgaactcctggactcaaccgattctcctgtcctggcctcccaaactgttgggattacagccataagccactgtatctgacttattttttattcttttttatggttgtgaaagaattcaggattcttagaagggtcagaggctccttgatgaagattgggactggctaagtaggttattggataaaaggaactgttgaacaggaaacttgactgcttttttgtatgtccggggctgcagccacagttattcttccaggatacacatagaaatgcttagagcaatggttctttgtgcaattttctgtcatgcattctgctttgggggtggcccatggttcccttgtaatgttggttaagacctcctacgcttagagtccaaatattatacttgttatacgtattacaaatgacgtaatgttatttactgaaattcccattttatacctgtgttagtggtgcaaactcatttccatggcaactgaacgtctaggcaggaaaatagttctaagtataaagagatgaggggagagggttggcacctttgtttattgtttattgcaatgtgcaaaatccccagatatttagaggacattttgaggaaaataatcttaaatgtacaaactacgaatgtagtttgtaaatctttatcacttgcggaaagtaggtgagtaactggcagtaaaatcttcccaaacgaggccaggcacagtggctcatgcctgtaattccagctcttttggaagatcaaagtgggaggatcgcttgaggccaggagttccaagaccagcctgggcaacctagggaggctctgtctctataaaagatagaaaaatgagctgggcatggtagtgtgtgcctgtagtcccagctacttgggaggctgaggtgggaggattgcttgagcccaagagtttgaggctgcactgagctagcatcagggcactgggtaacagagtgagactatgtctgtaaaaaaaacaaaaaaacaaaaaaacttcccaaacagaccctagggagggggaataatgctttgaaaaatggaatatgattttagccaatacccgcagcatcttaaaagatccctctgaggacagctgtcagcttctccagatttggttgttttgtgggcttatgaggttgtggtgactggcaagtggcgggagcaagacaagatggacgtttggatcttttttccgtacctttattagaagcagagatgccatttccccattctcttttctccaagtcactgtaaaggcgttgcctcactcccaaagaccagtcatgttttccgtgtctcggtaggtgacttacaatagttgggtctcacggggtgatgaatgacagtgtaactggcaaatcttgtgtcaacaaagccatgatgggcacctggaactggaggaaacaatttcttaagctagaacagcggtgggcgaggaatacttgagcatttcactcttttagagaggaaggaatacttgagtatttcactctttagagagtgatgccttctcagctttggtgctagtaactacatcttagtcttttagctgagttggaaagtttgtctcaaacacacccatataacttaatttggggctcaaagtcagattcagctattaacaagtttggatctaaattcttgacctatttactggtctctgaattcctctagttgatcgaccttgaaattcagagatcctgttaaacctcgtttgttgtcattggtgttgagaatgacaccaggtcatcggtgttgcagcagccaggctgcaacaggaaatcggatgcattttggcccatcacacgtggtagacattcagtgctagttagttactggtgagcaaggtaccttccgatagtgtaagccttatcggagtcctctgcagtctgttagctgctgcaggcttttactacgtgtagcatctgagttttccctggcctctgccatctaagtaactattcattctgcactcacatggaacctgttgccattcagcaggaaatatttttgcaaatattatccaaaggctgtctctttgcctccttaaaagccccctttccactttgctgttgcaggtatgaaggtcactgtgcacacatgcttatgactgtaggcggtggccaaggagtctattggataaaggtgtagggctttggaatcaggagatgcagatcgaatcctggcctgtcatttacttgctatatgattttggataagtcacaaaacctctcggatccccagtttttttcaggtgtaaagtgggggtatcacctgtctcacagggttattgtgggaatgaactgagatgaggcatgtcagtcagagggccttacacaacgggagcactcggtggaagtggcagtgggttttctttgtatctggagactcgtttgtgcatgcctaccccccttccctgctaagcctgggaagtgaggcattaccggtgcgtttacatcaaggactgtagttgggaggtgatgaatcagacctttgggatcaagggcagtcctttgctgtccttgctttctgggggcagagagaatgatgggcttctgcctgctgtctcccagactaaatatttagcttttgctgtctgaagggtaggtttttcttggacttgggtgctattcactgtgatcaaacaaaggtgctctgacctgcccatgaaggtgaagactgcgatgtcaaagcaaccctttcctctccttctttcctctgcttggtaaagctgtagaactggaactgtgaaagggttttatctgaggggttcattcgtccaagctcatcccgcagagcaccacttgcttgctaagcaaggtctcacagctccatttcttagtgggatcttgcctcttcttcaagaataatcagatgaagcctgggcgtggtggctcatgcctgtaatcccagcactttgggaggctgaggcgggcagatcacttgaggtcaggagtttgagaccaggctggccaacatggtgaaaccctgtctctactaaaagtacaaaaattagccaggcatggtggtgtgtgcctataatcccagctactcagaaggctgaggcaggagaattgcctgaacctgggaggcggaggttgcagtgagctgagatctagccactgcactccagcctgggtgacagagccagactccatctcaaaaaaaaaaaaaaaaaaaaagaatacttatctggtctggcacatggaagccagcatgggactgccaccagcaattcatgcggcatacatttgtttgcccacagactgtgttaatatggaatcagaggtctgattatgtaaagaaagagttatatcataaattgtcatacactcttataatggaatactgtctcacagtaaaaatgggtgaaaaatggttatatccatatggtggaatcttagaaacataatgttgaacaagagaagcaggtcatagaaaacagtaccatagtaggatgtcatacgtagaaagttgaaaaatgcaaagccaaacaatacatgttgtatggataccttcagaggcagtaaaactataaaaaatggatggggctgggtgtggtggctcacgcctgtaatcccagcattttggggaggtcgaggcggatggatcacttgaggtcaggagttcaagaccagcctggccaacatggcgaaacttcttctctactaaaaatataaaaattagcttggcatggtggcgtgcacctgtaatccctgctattcgggaggctgaggtaggagaatcacttgaacccccgaggtggaggttgcagtgagccgagattgcgccactgcactccagctgagtgatggagtgagactctgtctcaagaaaaaaaaaaaaagaaaaaagaatgggaataatgaatcctgaattcaggaggttatcttgggaggaggcagacaggtgtaatgagaaaagagtacagagaaagtttctaagatactggtcatgttgtttctttgcctgggtggtggctcccaagtgttcattattttattcttctttaaacgaaatatatatttagagtcttgctctgtcaccctggctagagtgcagtggctcacccacagctcactgcagcctcaaaatcctgggctccagggatcctcttgctttagcctcccaagtagctgggactacaggtgtgtgccaggccctacacctgctgccaggctctttttattatttatttatttatttttaaatttgagatggagtcttgctctgtcgcccaggctggagtgcagtgccacgatctcggctcactataaactctgcctcccaggttcaagcaattctcctgtctcatcctccagagtagctgggactacaggcacatgccaccatgcccgactaatttttgcatttttagtagagacggggtttcaccatattggtcaggctggtctcaaactcctgacttcaggcgatccacgcaccttggcctcccaaagtgctgggattacaggcatgagccaccatgccctgcctttttatttatttttcttattttttttttttttaatttttttgagatggagtttcactcttgttgcccagggtggactgcaatggtgcaaactcagctcactgcaacttctctctcccaggttcaagctattctcctgcctcagcccctgagtagctgggattacaggcatgcgccaccatgcctgactaattttgtatttttagtagagatggggtttctccatgttggtcaggctggtctcgaactcccgacctcaggtgatctgcccgcctcggcctcctaaagtgctgggattacagctgtgagccaccgcgcctggccaggctctttttaataacccattcttgcaggttcccaacagagagaactcactcacccccatgagaggacattaatttattcatgagggatccacccccatgacctaaacacctcccactaggtctcacctcccaactctgccacattgggaatcaaatttcaacatgaattttggtggggacaaactgcatccaaaccatagcagggagtcaagttggaatgaagcccacaggactgtctgtgagtggagctgctcctcctagcacctcacgacttcctctggcttgaataactggctcctctgtctagaatctcagtaaaatttccatagtcatacagggaaatggaacaacaacaacaaaatgagaagaatgcatttaatttgctttttgattcataaaatttttcattaatagggattaacataagggatcttagttaagaagctgtcagctgggcgcagtggctcagcgtgcaggctgggtgtaatcccagcgctttgggaggctgaggtgagtggatcacctgaggtcggaagttcaagaccagcctgaccaacatggagaaaccccatctcttctaaaaatacaaagttagccaggcgtggtggcgcatgcctgtaatcccggctacgtggggagctgaggcaggagaatcacttgaatctgggaagtggaggttgtggtgagcccagatcgtgccattgcactccagcctggtcaacaagagcaaagctccatctcaaaaaaaaaaaacaaacaaacaagaagcgaagtgtcaatagctaggtgcagtggctcatgcctgtaatcccagcactttgggaggctgagttgggaggattgcttgagcccaggaatttgaggctatagtgagccaagatggagaccctgcaatccagcctgggcaacagagctagatgctgttgctaaaaaaaaaaaaaaaaaaaaaaaagaagctatatatagagccttcaacaatttattttcctttcttatgtgtatatgtatttaagctattttgtttaagaatgcatgtgaacgcacatgagagagtgtgtatgtgtgtgtttgtgtgtgcatgtaggcctggggaccttggatttgcctgtggccctcatcagctgtcagtagtggccagtgttggtcacaatctgcattttaagatgtctttcccagtgatttttttacatggaaaagtttcagagcctcttagatagttttctttctcactcctttactcttctttttttgtcctgctttgatgaaaacatatcagatttattggctcccttgccttggcattaacggcctctgaagatttaaaagatctgtaatctcggagacttataaagcctaaccgtctccggtgagctctaaatagatcatcaactgtgtctgcagacagcctatcccagaaaggaaagaaaaataaactcaggcgggtgtgagtccactgtgaacacttcaggaagtcctgggagggccgggggagaattgggaagcagagctagcagggaggaggggtggagggtggataggagctgagccttgggcactaggccattctcacagtcattgttggctggcggttgccacccctccttccactgaggtgactaaaggctgcttgattgggaactgcagttatttagagatgttgccctgtcagcaggaaagtcctcccatgcagtagcttatgcttaaaatctgggtattgcctcatttctgttgctggggaagacaatggaataagtgttatttatttatttatttattcattcattcattcattcattcattcattcagttataattaagacatagtccctgctcaaagtccctgcttgtaggcagggctttcttctgagcagttggtaaatatggaataggattgagacagtggtcaagggtcccactgcattctccaagccagacgttgaaaagtaatcatggctgggcatggtggctgtatgcctgagtcccagctctttgggaggctgaggcagaaggatcgcttgaggccaggagtttgaggctgcagtgagttatgatcgtgccactgcactccagcctggacaacatagggagaccctgtctcttaaaaaaaaaatcatggagattaattacacactcatttatacattggtttattttgcatcaattaaaatgatacatggtaccttattatacatttatttattgcatagatatttatttggcatttactctgtatgagcctagagagatgtttataatgccagatgtggcatgcgccagaaagctggttataaactaggaggaaggaaggcaaatctctgccgttgaaggcaatattcacttgatatacatgaatgccaggctctgagctgtcgtggtgattaaaagatgaaaagtcggccgggcgcagtggctcacgcctgtaatcccagcactttgggaggccaaggtgggcagatcatgaggtcaggagattgagaccatcctggctaacacggtgaaaccccgtccctactaaaaatacaaaaaaattagccgggcgtggtggtgtgcgcctgtagtcccagctactcgggaggctgaggcaggagaatggtgtgaacccaggaggtggagcttgcagtgagccgagatcacaccactgcactccagcctgggcaacagactgagactccatctcaaaaaaaaaaaaaaaatgatgaaaagtcagggtccctgacatcagggagtgtctctagtaggagacagatgcatggatgagttagagtctagtgtgatggatccatggtgatggtatgtacacatgcaagaggaatgtagtgggacattacctagatatgcctgggagatttggggaagacctcccacatttgagcagtattttgaaggagtttgccagaccgacgaagtggggttcagggatgtcactgcaggcagagggtacagcatgagtgaaggcaaggaggagtaagagaacttgatgtatttgaggaaataaaagtcatttagaaatgttgacatgtaagatattagggatgatagcgtagcaaactagggtttgcaggctgaatccagcctgccatctgcttttttgttggtgttcttgtttgtttgtttgtttttgctgggtgaaatctgccgtgttttttttagagcacttttaggttcccccaaacatatatactctcttccccactatcaacatcccccaccagagtggtacatttgttagaatgatgagcctgcattgacacatcattgtcactcaaagtccaaaatgtatattaggtttcactctttaattttttttttttttttttggacagagtctcgctctgtcattccactggctggagtgcagtggctcaatctcagcttactgcaacctctgcctcccaggttcaagtgagtctcatgcctcagcctcctgagtagctgggattacaagcattcaccaccatgcccagctaattttttttttttgtatttttagtagagatgaggtttccccatgttggccaggctggtcttgaactcctggactcaagtgatccacgtgccttggccctcacatgtatccaccattactctgtcatacagagtagtttcactgccctgtgcttcatctattcatctctccctcccgtccccagcccattgtaaccactgatattttattgtctgcatagttttgccatttccagaatgtcgtatagctggatcatagagtatatagccttgtcagattggcttctttcacttagtaattgggatttacgtttctttcacgtcttctcatggcttgatattttgggtactgaataatatttcattgtctgcatgtaccacagtttatccattcacttttacattcctcctccacagtttattcattcatttactggttgcttccaagttttggcaatgatgaataataaagctgccataaacattagtgtgcaggtttctgtgcagataaaagttttcaactcggtcgggaacggtggctcatgcctgtaatcctagcactgtgggaggccgaggcaggcatatcgcaaggtcaagagatccagaccatcctggccaacatagtgaaaccccatctctagtaaaaatacaaaaaaaaattagctgggcgtggtagtgcgctcctggagtcccagctactcgggaggctgaggcaggagaatagcttaaatctggggggtggagtttgcagtgagctgagatcacgccactgcactccagcctggcgacagagcagcgagattccagctaaaacaaaacaaaacaaaacaaaacaaagtttttaacttgcttgggtaaatacaaaggaacatgattgctgggtcatatggtaaaagtatgcttagttttgtaagaaactgctaaactgttttccaaaacggctgcaccagtttgcattgccaccagcagtgagtgagagttcctgttgctccacatcttcaccaggtttgatgtagtccattttctggattttggctattctaatgggtatctagtgatatctcactttaatttgcatttcctggatgatatatgatgtggagagtctctttttttttttgagaaagagcctcactctgttgtccaggctggagtgcaatggtgtgatctcggcttactgcaccctccacctcctaggttcaagtgattctcctgcctcagcctcctgagtagctgggtggcacctgccaccacgcccagctaatttttttgtattttaagtagaaactgggtttcaccatgttggccaggttggtctcgaactcctgacctcaggtgatccgcccacctcggcctcccaaagtgctgggattacaggcatgagctgccttgcccggcctatgatatggagagtcttttcatatgcttatattccatctgtatatcttctttggcagggtgtctgttcaggtcctttgcccattttaaaaatctggttgttcatgttcttattgttgagttttaagcattttttgtatattttggatagcagttctttatcagatatatgttttgccaatattttctcccagtctgcggcttgtcttctcattctctttaccacctgtttttggaaatacagttttatttttatatggccatactcatttattttcatattgtctgtggctactttcatgctacgatggtatgttaagtagttagaacagagatcttatggtcagcaaaacctaaaagatttacgatttggctctttgcagaaagtttgccagtccctggctgtaggagatggtttgaaggcaagagcagttcacaaagggtcttttgtgttttactgaggactgtagattttattctttggagacagggaaccagtggattttgagcaaggcaatggtaaggctatttctgcggtaaattattcaggaaagtagtctaatggatgaattcggagctatatcagttggggttcattgcaggaaacagaaaacactctaggtattttgagcagaaaaggatttaatatggggaattagatgcttataaaagtcactggatgggctgatgcaataggagtgaggggtctccctgaggtctttggttacaggctcacaggcttgcagctccagttcacatgccaagaaactactgtgcccttgcaaccgctttatgtatttgaagtgggtgtgcaggcgatgaggcatggtgtctgctggagcccctgccagtcaccaccaccacaggacaaatggcttctgccttccttctgctttccaacctttctgcaagaacttctcattggtgcaacctaaatcacacccagagcctatctgcaggagggtctggaagtcttctaggccctgcagtgcgtcagggcgggcatatgggatagaagagggtgggaatgtctgatacagtggggctgagaccagactcagggactgacgaagaggactgttgcaggaactggtgaggttacaattgatgactagccttgggcagtagcgaatagagaggagacaagagaaatacctaggaggtgtaattaagcaggactgcatggctggctaatgagacaaggtgaagggtaaggagggaggggggtactcccagattcctctactgtgctgtcattcatggagacaagagacgcaagaggcggggagctaatgaagatgtcactttaaaaccacatctcccatggtggtcggctttggtgttcagcagggtttatggaacattggtactgcctggctctggggcagagtcatttctctgaaagtgcacccataggaggaggaatgagaacctaactgaagagacacagagagaaacatcgtattcctgacagtgaaccacagggccacaataagggcacaattcagggcacgtgagtgctagttctacttgaaccagatctgtatctggattctactacttcttggtcctagaaaattgtgatcgaaaggggacaagtttagagagaagccaataaaaagagtatgggtgttggagaaatgactttctagtcttgagagcttggtagcttgaccatgtgctgatggaagaccagaacagaactggctgcaaatgctttagacagatgtggatggcgaggaaagaggggtgcttcagccatggtgtttgtggctgtggtttggtgagatgaggttcgacttttcctttcggattctgttggaactggatggctccttttaaagtgccaaggtctgtggaggtggtgatttggggtttggtttagtgactgcctttctggtggcatttaaatagcctaaatagaatgactcctttcaaacgttgaatcaattctgtatgtaggcttttctttttttttttaagtttatttatttttgagatggaatcttgctctgtcgcccaggctggagtgcagtggcacgatcttggctcactgcaaactctgccttctgggttcaagcagttctcatgcctcagcctcctgagtagctgtgactacaggcacctgccaccacgcctggataatttttgtatttttagtagaggcgaggtttcgccaagttggtcatgctggtctcgaactcctgacctcaggtgatccacctgccttggcctcccaaagtgctgggattacaagtgtgggccaccgcgcctagcctcttttttgttttttaaaattttgagacagggtcttgttctgtcatccaggctagagtacagtggtgcaatcaaggcccactgcagcctcaacctccaaggctcaagtgatcctcttgcctcagcctcccaaatagctgggactacaggtgtgcaccaccacagtaggctaatttttaaaattttttgtagagataaggtctccccaggctggtcttgaactctgaactcaagcgatccaccagccttggccttccaaagtgctgggattacaggcatgagccgctgagccccagccggcttttcattttgttttagataaaaatagtaacagaactaaaatctagaatttatattctgcttcacatgtactgggtttcatgaagtttttcttcacccttaacttattgaaaatatagtggaggtatttgtctcaatattcttggggtctgccatccttatttcttaagtattttttagttcacttcagtctgccctctgcctctatcattctgctgcaatgacagtcaccaaagcccccctgacctgtctgccagtttaacatcatggactagtcctctctagaaacattttgtgccttggtttctataataatgcagaatcccagagtgttccttttttcccttggttttattgatttttattacttaaaaaatgagtttgattcatgcgaaaaatatgtataaatgtatcatataagagccggttgcagtattaaatagggcagtcaagagaggtgttgttgagaaggtgacttttaagcaaagatttgaaggaggcaaggaatgtaaccatgaggatatctggggaaagagagtttgggcagaagaatggctgttggaaaggccttaagttaggaatgtgcctttggagttgaaggaacagtggagaggccagtcccactggagaggaaggggaagtggagtcataggaagagatgacactggtaaagggtggtgccagatcattctgatgaatttctgctttatgtatttcgaggttatttcattggatctagagtacaatttgacatatgtcttatggatgaatagaacgttttggccttatcttgttattcttgtttttagtgctttttctcttaaaatttatttggtctgaagccaggcacagtggtatgtgcctatagtcccagccactggggaggctgagctgggaggattgcttgagtccaggagttcgagtctagcctgggcagcataacaagactcccatctctaaaaaagatgtatatttatttggtctgacaaataaaaagtaacttaacaacgtgaatgactcttaaaagtattaggctaagcttaagaagccagacatagaagcttatgttctatatgattccatttatataacatcctggaaaaggcaaaattctagggacagaaatccaatctgaagatgtgggggcattggaggagggattgactgcaaaggggcacaaggaaattttgggagcaatgggaatgttctatgtctcagttgtggtgatggtaacaccactataaacatttggtaaaacttgccaaattgtacccttagaaagggtaaattttactctatgtaaattataccttaattttaaaaatcattaaaagacccatttggtggccaggtgcggtggctcacgcctgtaatcccagcactgtgggagactgaggtgggtggatcacgaggtcgggagatcgagaccatcctggccaacatggtgaaaccacatctcactaaaaatacaaaaattagctgggtgtggtggcatgtgcctgtagtctcagctactcgggaggctgaggcaggaggattgcttgaacttgggaggtggaggttgcagtgagctgagatcacgccactgcactccagcctgggtgacagagggagactctatctcaaaaataaaaaataaaaaaaaaatacaacaacaacaacaaaacccgtttggtgtgacgttaacctaactatcccagcttccttttgttttgtgtccacttggcatatttttttccctattcatttcattttaacctatttggtacttatattttaggtagtgtttttttgtaacagcatttaactagagttttaaaaaaccatatgattttaaactgtcacagttcatttatgtttctcgtgattcttgatatctttagagttgttttcttcctcttgttaatttctgtctgtcctacagtttctgtttcccatctttgactaactttccactttttttactttttttgagacagagtctcactctgtcgctcaggctggagtgcagtggcgccatctcggctcattgcaacctctgcctctggggttcaagcgattctcctgcctcagcctcccgagtagctgggcgcgctccaccacgctcagctagtttttgtatttttagtagagatggggtttcacctgttggccaggctggtctcgaactcctgacctcgtgatccacctgccttggcctcccaaagtgctgggattacaggtgtgagccaccacgcctggcgtaactttccactttccactgtgtttggtctgccttttcaagaaaagtcttgatgggttgaaggtatctttggctccctgactatttgataatggagtgtgaaattctgcatccagtggtgtgaagagagcaagagctcattgactggctcccggcctgaaggttttctgtttggccttatgctgagttttatatacagcatgtctatattttgggtctactttgtgtgttttgtgttttcaaatggcctttgaaggtcaactcttttttttttttttttttttttttgagacagggtttcgctctgtcacccaggctggagtgcagtggcacaatcacagctcactgcagcctcgacctcccaggctcaagtgatcttcccacctcagtctcccaggtagctgagactacaggtgtgcgccaccatgcctggctaatttttaaatttttttttgtagtgacagtgtcttcctgtgttgcctagtctggtcttggatcctctttcctcagcctcccaaagtgttgggattataggcgtaagctaccgcatccggcctaacagtacaactctataacgacaaaatgacacaaagaaaatttaatgaaattagtgaaaacctagagtaggatgtggtgcagatactcattattttgtagtggagaatgggagattagggcccggttggttttgttccttttctttgaaattttacctttagaaccagtaaaaaaaaaaagttttcttttaaataaagttatacatttttctttacacttagaaaaaggatgatgaattggagacttccgaggagttatttcttccacctggtttgtggtttttttggggaggaaggggcttgggggaagtggtgctgaagctttcactcaaacaccaggccacggctctgtgtgcctcattcatctttgtgtccccagcaggacctagaatagtgcctcactgcacgtagtagcagctcaataaatatttgctgagctgaaagagtctcgtgttcctgctcttcattcgccaaaacttctgggtgggtcatgttgctggtttacgttccctggcgccttgactcctgagatgcgataatttgaggaccacagagaagagggggcgccctttatcacagccgccttgtgcttgcaaggtgaaccaccaagagtgtgctggggtcccactgcctgcacagtctctgtggcttcatctgtttttttcttcatgattgatatttctgtgttgaatgcttttcaccgactgttcttttcaaatccttgcagcttttaaggttagtattggaatcagagaagaattgacacataaataagtcttgtttgggaaaagaaggtgtaaagtccgtgtacttcaactctgccagaaaagaatgttacttaccctctaagaataggtaatatctcatttatactaggtgttcaaattcccaagtgattattgaatcttaggattgagtgtctccttgaggacattaggatcactggaatgctgctccttcgacatgggcactggatcccacagagtgatgccataactgtatgagggctgctgaactagaccagcaagaactgggtcaaggctgttccctagtcatgcatgtatttgagagttccatcttctactgtggaaattgaattgtcatttatttgcattcattttctattgctctgtaacaaatcaccacaaactcagggcttaaaacaacaccatttattagctcacagttctgtaggtcataagtccaggatcacacggctgacttttcccttcagggtctcacaaggccaaaatcaaggctctggcaggacaacattcttatctgcatacactggggaagaattcatatcaaaggtcattcagggctgggcacagtggctcacgcctgtaattccagcactttggcaggctgaggtgggcagatggcttgagtacaggagtttgagaccagcctaagcaacatagccaaaccccatctcaacaaaaaaaatacagaaattagctaggcatggtggcgcatgcctgtcatcccggttactcaggaggctgaggcgggaggatcgcttgagcccagggaggtcgaggatgcagtgagctgtgattgcaccactgcactccagcctgggcgacagagggagaccctgtctcaaaaaaaaagaaaaagaaaaaaaaagtcattcaggtccttagctgaatttagttatttgcagttgtaggactgaggtgcccattccttgctgaccatcagcgggggtccctctcaactccttaagcttccccctggccccgacccctgcattccttctcacggtgccccctccaccttcgagccaggaaaggagtgtcagatctccctgtgatttgaatctctctgattttctctcctgccacctgctggagaaggcgctctgcttccaggaggtgatgtgatgctaattagactgagagagcaccgccccccacccccgccccgcccgatgatcccctttcttaaggtctgctgtggtacacgacgacatacttgacgacatactcaagggtgtggcaccttgtcatattcacaggttttaggcattggaggggggctagagtgagagggatgtcattttagaaattctccccacagtagaaagactctctctaatgggccagccatggtggctcagacctgtaatcccagcactttgggaggccgaggtgggaggatcacttcaccttaggagttcaagacccccatcgctataaaaaaaaatcaaaaaaattagccaggcgtggtggtccgattccattctttaaaggagtcggggaggtgatgagtgactggattggaaagaatatgcaaagtactggaggttacaggcccaagagtgattttgaacctgacagcttgcatctttccttcattcaacagatatttcctgaatcctactgtgggccaggcacacactaggtgctgagtctccagaggttcacaaaacaagacatgatctctgccctcatgaatgtgtagtgacacatagcagtgccataaagggaacaattaggatgttatgagagaatgaaaggaaatttactgtagcctgggagatgagggacatttggactgagatttggcctaggaatttggccacctgggtggaaagtccaggaagagaatgccgggcaagtagatcagcaaagggtctgactctcccttggtaggggtctagagaggtattttgagggatgtccattgaacatattctttttggagcctgcctccgtcctgctgaattcctgccttgtgatttgtcgtgtcagaacacttagaaataatgctctacccagctcatgcctctaatcccaacactttgggaggccgaggctggaggattgcttgaggccaggagtttgagaccagccaggacaacatagcaagactcgatctctagttaaaaaaaaaaaaaggaaagaaagaacactctaatatactgtagtcccccattcattcaaggtcctgtgtagtcctttctggtctggagctatagtaaaaggaggcagtgagtgggccagattcaaacagggaatgatgccagtagcgagaaagtgaagaggcttttctggcgcacctgtacaggttgtgctctgcattccttgggggccagccccatggagattcctcctgtgcacagtggaggttgatggggatgctcatctcctaagcggcaacagtgtcctatgcactcataattcagggtcaggggatctcaggtcataggacaaatcacaggctgctgtctctgttcagggtacctcaagccatcaatggccacgttgagcaggtgaacacttcccctctgaactctctagctctctttgaagtttgggagggcatttgagcactcttctcagctaagcccaacatacggcctggaagtagattggacaagtcaccatttactataccttctctctcaaggtgagtttttttagtctaatgaaattgccacctttgagaaggttgctctgtactctagggtgcgcaaaaggaaattgtttgtcttccggaagtctttctgtaatttagaatggacttggcagcgattttatttttaccttccctgtcatttgtgaggctggcagtccagaggtagggtgtggaatggagccgtaaattgcgcttgcagtgaccagaaggggcccattttaactctaattgtgcctttcccggttcacttctccttttacccgccctctcctttttttttttttttctaatccacatttgagtggggaggaagaattgaggggggtgcaggtgggagtaggtttatttattggcgcttctctgggtggtggacactgtttcttttcccattacggcttccttttttattttttcatgcttctattttaagtgcctgtttctttctggttctgtcttgctggaaactggcccagctccactgaatttttttttccatgcagctattaaaagacaatgaccagttaagagtgtgctcagaggaaggacagacttgaggtggggagccctcttggttctagtaatcctaggcaaataccgcttacccggattggaatgtgagaggagttttattaggtaattttactttttgtgcctgttttataggaggaaaatcaataatcaggttgttttgttttgtttgtttgttttgagacagactttcgctcttgttgccccggctggagtgcaatggtgtgatctcggcacactgcaacctcagcctccagggttcaagtgattctcttgcctcagcctcctgagtagctgggattacaggcattcgccaccatgcccggctaattttgtatttttagtagacacgggatttctccatgttggtcagacaggtctggaagtcccgacctcaggtgatccactcacctcggcctcccaaagtgctgggattacaggcgtgagctaccgcgcctggcccttgttttgtttttttgagatggagtctcgctgtgtcacctaggctggagcgcagcagcaggatctctctcagctcactgcagcctccattccccaggctggtctcgaactcctgacctcaggcaatccaaccacctcggccttccaaagtgctgggattacaggcatgagccaccatgcctggccagtaatcagtttttataccttgaaacttctcttttgctgaacttgaataccagtgggcctgaatctggggtcaatgaacctccctttcatattctgggcctcttttaccaagatagaaaagtatgcttggaacctggtatccagccagccatgaattcttttttttttttttttttttttttttggaaacagggtctcttgctctattgcccaggatagagtgtagtggtgtgagtgtgatcacagctcactgcggcctcgacctccccagctcaaatgattctcccacctcagcctcccgcatagctgggatcacaggcacttgccactatacctggctaatttaaaataattttttatggagacgaggtctccctgtgctgccaggctgggtttgcactcttgggctcaagcagtcctccgcccttggcctcctaaagtgctgggattacaggtgtgagccgccacccccggcctagccatgaattctcggcatttgggagagatatgtccctagtctttatagaatcctacatgtattaatttagaaatgtttgtagggtcttgaattttgcctgaatcacattcccatccacattcttgctgtttttttgaccataccctcacgccatacctgccttctacaacttttgctcacttttacattttctccacaaatggcttttttaaattattaagttactataatttacaaacagtaaaatttacccttactagtgtatagttctgtaagttttgacaaaagcatacagccaggtagtcactatcataatcaagatacagaaaggctgggcgtgatggctcatgcctgtaatccttgcactttgagaggccgaggcgggtgaagtcctgaggtcaggacttcaagaccagcctggccaacatggtgaaaccccgtctttactaaaaacacaaaaattagctgggcgaggtggcaggcgcctgtaatcccagctacaagggaggccgaggcaggagaattgcttgaacctggtgggggcagaggttgtagtgagccgagattgcgccacttcactccagcctgggtgaaagagtgaaactccgtctcaaaaacaaacaaagaaacaaacaaacaaaagatacagaaagtttcatcaccccagaaagttccccagtgcccctttgtagccagctcctccttgtacccgtcgctgctggcaagcatggatctgtattctttctctaagtttgacctcttcttgaatatcttaaaaatggaaatgtacacgtatagcctttggtgtcttttacttagcataatgcggttgtgattcacctctgttgctgcatgtaccagcactttattccttttatgcattgagtttattccactatgtgtatgtaccacagttggtctactcattcaccaattgaaggacttggagttgcttacagtatttggcgcttacaagcaaagcctctatgagcttttgcatacaggcttttatgcaaacatgttttcatttctcatgggtaaatacctaggagaggccaggtgtggtggctcatgcctgtaatcccagcactttgtttgggaggccaaggagggtagattgcttgatctcaggagttcgatatcagcctgggcaacatggtaaaaccccttctctaccaaaaatgcaaaaatgagctggacatggtggtgcgcacctgtgatcccagctacttgggaggttggggtgggaggattgcaggagcccaggaggctgcagtgagccatgatcacgccattgcactccagcctgggtgacagagtgagaccctgtctgaaaatattaatttttaaaaatacctaggagtagggttgtcagtttgcatgccaagcatatatttaactttataagaaactgccaaacagtttacaaagtggctgtgttcccgccatcaatgtatgagagttccaattactttgcatcctaatccagacttattactgtaagttgtataaaaactctgtccattctttttgttgtgggagacagagtctcgctctgtcacccaggctggagtgcagtggcacaattttggctcactgccaccttggcctctcggggttcaagcgatctcctgcctcagcctcctgagtagctgagattacaggcgccagccactatgcctgacgaatttttgcatttttttttttttttgagacagagtctggctctgtcacccaggctggagtgcaatggctcgatttttaatagagaaggggtttcaccatgttggccaggctggtctcaaactcctgacttgaagcaatccgcctgcctcggcctcccaaagtgttggggttacaggcgtgagccaccacgtccagcctaaaaaactttgtcaatcctgatagatatgtaatgatatctcattgtagttttaatttgcacttcccgaagaacttatgatgttgagcatctttttttgtgcttattttccctctgtagatcttctttggtgatgtgtctgttcaaatcttttttttagtcggggtttggctctgtcgtgtaggctggagtgcagtggcgtgatctcggctcactgtaacctccacctcccaagctcaagccatcctcctgcctcagccttccaagtagctgggactacaggcgcttgccaccataactagcaaatttttgttatttttgtagagacagggttttgccatgttgcccaggctggtctcgaactcccgacctcaggtgatccgcctgcctcagcctcccaaagtgctgggattacaggcatgagccaccacacccagcctcaaatcttttgattatttaaaaaatattggggttgttttctgattgctgaattttaagagttctctatcaattctagataaaattcctttatcagacatatattgtcaaccataaaagtcacaaactctataaatttagaaaagagagcttcatttctaaagggggggtaccataacctgcaggcaggaagtggagcctctacctgaaaccaaaaagcaggcatttcaagggagggaaagatgagacagtaatttacgctaaactggttggctaagtttacatatttatcaggttataggagaagctataaatatttatgaaggggacacacatgcatgtgtcataaactaacacgtttgttacatgtgtcccttgttgccctttgagatggacacttaatatttaaatgtattactgttagaccctgtccatcagaaggtgaagcagaggacagaaagatactgagtgcacagcctccgtggcctggccagaaccacaccatagtcagtggcctcttatcagaaaggaatgccggtcagttgctgtgtggaaaccacaaaagggaaggcagcgtgaggccattggttgaaatcagcagtgaacaagtcttttgagagggttgatttttgttcgacactgaggaaagaaagacttatggtggctagggaaggagggggtgtaacgaggtgtctctgacctcgcatctcatcatggctgggaattaaggtttttaaggtttctctggcgtcttcttggccaagagggggtccattcagttggttgaggagcttaggattttattattatttctcagtattgtggactgtcctgtcatttttttggacagtgtctttagaagagcaggagtttaaaatttttgatgaagccacaaaatgctttttaaaaaaaggtttcacattttatttatttatttatttatttatttatttatttatttatttatttatggagacggagtcttcctacattgcctgggccagtctcaattgatcctcctgcctcagcctcccaaagtgctgggattacaggcatgagccactgcacctagcctcattttattagatatttttgctttctacaaatttcttccctatttccccctctccctagctccttgcaaccatcatcccgctttctcactcaattagtttggctactccaggtaacatttaaatggaaccacacaggatttgtctttttgccacgggcttctttcacttagcagaatgtcctcgaggttcatccatgtggtagcctgtgtcaaaatttccttcctttttaaggttgagtaatactcatatgtatgcatataccatactttatccatttgtcgaggatgggttgcttctacctcttggctattgtgaataatgctgttgtctacctgcgtgtgcaaatatctctcctgaggtcttgctttcagttccgtatttatttatttatttatttatttatttatttatttatttatttatttatttttgagacggagtctcgctctgtcgcccaggctggaatgcagtggtgcgatcttggctcactgaaacctccgcctcctggattcgagtgattcttctgcctcaggctcctgagtagctgggactacagacatgcgccaccaggcctggctaatttttgtttttagtagagttggggttttgccatgttggccaggctggtctcgaactcctgacctcaggtgatccacctgcctcagcctcctgaagtgctgggattataggcatgagccactacacctggccaaggctttttttttttttttttaaaccaaacaaacaaaatcctgttttgtttaattactccacatgatctgttgcaaaggtgacaatggtcagcgaggctgcactgaggtaacactgtcacgtggtcagccaggctcactcaccagcaggtggcttccccaaagcagcattgtgtgctatgatagaaatttgtgtctcagcagaattacaaatcacagcatttccactaaggtggaagctccttgaggtcagggactctgttttatctctagaatggggcctaacactcagaaaaggatgattgagtacatttcagcggccctcatgaagggcgaggccaggtgtcccatgacacccaaggctctggctgtcagggtgtagctgaggatggaggccagggctttgaccatcaaagcttaaatgccaagtgtcagtgagcagctctgtcctggggacctcatctgtgtcagaaccactttggggagcgtgggtcctggtcgtggctggcctgccttcaggaggcctcagttcttgagagaggaccttgagtgaggacacaccgcatcctgagaagggcgagctacaaagagagctgaatttctgtaatgagttgacttaaaaccatttgtggagtttggcctgactggcactgccattctaactgctttctgcctgccctgggggctgtataactcgtcccctccccctaaatggtgagggggcttgggccaaggttgaagtcatgggcagagccgagcctggctgtctcagccatcaccctgcatttgtctgggtgctattttggcccacgatgtgtggtttcagcatctgggccagcttttcattacaatatgatcccatcttttatgggttgagtgagttctccaagagaggaaactgccaaagagaggagttgcctcagatgttgaggccttttcttcctttaagcatcttattttaaaggtaacacaagagccaaaaactggaaactccagatttagggcaaggggagaatctggggagaggggatgtggtgtttgtgtgtgtgttggggggtggtggctggccacgggcagggaggtggcagttcatgcaaagtgatcccagctgcccctagcttagggctgatcccgccctgcccagcccatcattcagggtaagccgctatcattagtggttaagtgtttctgaaagtattctctctccatgctgaccacatgccctttctgggaagggagggcagggccagggagtaatgggacccaccctattgtcatgcccagctgctctgcagagggacagggaacccggggctggagttgatcatggacatgtctgtctgaggggttgacagtgcacgttttgcaggtcctgcagctccctgaggggtccagcttgctcctgggggctgcaagttccaaatcagagaggctttttgtcctagtaaagggatccttggctgaaacaaaccttctattaaccaattttctccctcaagctctctgccctcaacacatacacatgtgcacacacacacacacacacacacacacacacagacatacacacacagatatacacacatacacacacaccagcttgctgagggctgcctgcctttccctttggaactcatttgtgctcattccacttttgaggaggagctgtggtgaaatgcttaaggtgaacatttcttcccatgaagtgggaactttgaaatattcatctttgactgaggtgtggttgacagctttttgttgttgttgttgagacagagtctctctctgtgttgtccaggctggagtgcagtggtacaatctcggctcactgcgacctccacctcccgggttctaagtgattctcctgcctcagcctctgaagtagctgggattataagcgctcaccaccatgcctggctaattttgtatttttagtagagatggggtttcgccatgttggccaggctggtctcgaactcctgacctcaggtgatccacctgcctcagcctcccaaagtgctgggattacaggcatgagccactgtgtgcggccaacagcttttgatttatgaaattagctcagggaaaaagttaaggtggaaaaagagagtccacattgagtatttccacagttcagtcgtactctgtctccattgccatgcagtgtttaggtatgagggactccagagtttgctacgtttctccctttttctccttttttttttttgttggggattgggggcaagaaaaacttaattttttttttttgttaaacaaggtctcactcttttgccacgctctcaggctgaagtgatcctcctgccttggcctcccaagtacctgggaccacaggggcacgccaccacacctggctaattttttaaattttttgctagagatgaggtctccctgtgttgcccaggctggtctcaaactcttgagctcaagtgccgtcccatctcagcctcccaaagcgttgggattacaggtgtgagccactgcacccagccaaaaagtcatgtttttttccttactcacaagtatacaagctcaatgaaggaagctggaaaaatctagaagagcacaaaagggcttctttattcccaatatccaaagataatgacggttaagattttggtttatgttcatcttgtcaaattctgtttcttactttagagaaggtagctggtctgggtggttcatatccctcaaggagcttcctgttgactgcctcaacacactggaccaaagactcccagcagggtcgttctgctggaggtggatcctcccaatggggaactttctattatagctcttaatttcaccattgtccaaatgaccaacaaaaaaatagcccaagaggaatttagcttgagttcaggcttcctgtcccatcttctgacctaagagcctaggctcttgacattaaactgcctgtacatgaatctttgcatcatttggcttactttctgtagagcttctctgtgtctgtttgcttatctgtaaagcggggataataatattaatctacctttagggttcccatgttaaatgagaacatatatgtaaatgcatagcacacacagtgcctggaacataatgttagagttcagtgaatattatatacttctgtagccattattattacctttatttatttatcctttttttttttttttttggagacactctcactcactctgtcacccaggctggaatacagtgacgtgatcttggctccctgaaacctctaccttctgggctcaaatgatcctcctacttcagcctcttgagtagctgggactacaggcatgcaccggtagtgcagctagttttgtttattttttgtagaggcagggtctcattatgttgcccaggctggtctcaaactcctgggctcaagtgatcctcccgccttggcctcccaaagtgttaggataacaggcgtgagccactgtgcccagccacctttattgttgagagtagttttatcgccccatgttgcatggtacaaattgtctctgggtctctgtttctctgtctggagaggggtgatcttttcttcactggatggtatttgaaacatctcacagttgcaaagtagtagatgcttactaagtagtagaagagcctcgtttggtgaaacagatgaaccgaaggacagggaggcttagacattttcactgagtgggcaaagtcaagctgcaaaaagaacttgagagcacatgctgcctgttgccttgtgttctctgaagatgtctgataggttttctgctgctaaattccacacttttctttgtgatttctgcattgcttctcatttacttggatggattgttgagtcatcttttctagataaaacatgtctaggccaggcatagtggctcatacttgtaatcccagcactttgggaggctgaggtgggaggatcgtttgagctcaggagtttgagaccagccttggcaacatagcaagaccccatctccccaaaaataaaaaaatgagccaggcgtggtgctgtgtgcctatagtccagctactggggaggctgaggtggaaggatcacttgagcccaagagtttgaggctgcaatgagctatgatcgtgccactccagcctgggcagcagagtgtgaccctgtctctaaacaaacaagtgaatgacaacaacaaaaagtgtcaacatatgcattgactaaaagttgtttaatgccccttgacttttattgccaagggaatcatctttctagctatagagaaaattgctttggataagttttgagctcttcttgcctaatgggggaaatatttcatctgagcctgtccagtgattcttgtttatttgtaacatttgagcccaataaaaataatgtgatggtcacaggatattttgccaattatttcagatgtaggggcaattcactctggatttgtttacttgaagtggaaaagtttacacaaagttaccttctgagcttttaccaaaaaggaaacttccctgggtctctctgcttggaaccagcttctgtttagtccaaaactagaggggctattaaaggtcttgtttccaataaatggcaggagaagggaatatgatgacttaggtaggaaacacttctgtccttttcacagtgacttatgtctgtctgctttctactttgaacccccaggacgcacagacattcgggtgcttcagccagaacaaccccagcaaccggcgagcaaagccccggtgctcggagccggcaccgccagcccgtcaagaactcaggccacagtggcttggccaatggcacaggtgagtgatggcaccgcacgccagcctgcactgaagctgtgggctctcacccgttctaacgtggacacgggatcctgcccactgtgtcagaatagagggtgggcgtcagaaggctctaggactaaactggatttgaatccatcagtctttctactgacccatcttcttctctctctggcatattctgtacagccaaggttattctccatatgactgcgctcttctaaaatactcatttgcacagaaataaaaagtcttgtctttctataaagacaataaaaagaaatgtctttttttttttttgagacggagtctcaccctgtcgcccaggctggagtgcagtggcgtgatctcggctcactgcaagctccgcctcccgggttcatgccattcttctgcctcagcctcctgagtagctgggactacaggcgcccactgccacgcccggctaattttttgtgtttttagtggagacagggtttcaccgtgttagccaggatggtcttgatctcctgaccttgtgatcgcccgtcttggcctcccaaagttctgggattacagacgtgagccactgcgcctagcctttctattcatttcttatctgcattggatttcatgttggggaggatatctcatttatacatagcatattttttatttccttcacgtaagggaattatcagactaaggaaatgtaggactaagtattgttgctaagagctgagtcagatgatggcaccactggtgaatgggttgagatgctgactggggcagagccaggtaactacttgggggtgtgcaggggccatcccgatgggggccccatttgagaggagacagtgccgtccacgtgcgcatggaacttccccacacttggctctgcttccccgtaagtgagacgggaaggacctatttcaaaacaactcattttccgtcctgctctccctctctctcatcaggacagagtcaaaaaggaaaaagaaaaaacaaacccattcatttctataaacttctcaaagattgtcaaatctttagagactgctggtcgtttggtagtttgtcttcatttcgggcagttgggctgggatgtagatgtttcgcttggatgaattgtaggtagaggaatgcaggtgttgaaatttggtaagtgacgctgagatagttttctagtgctcgtgacagcagaggtgtggcgtaaaggccaggagacccagagcagcatggcttttcacggaagtgttgttgtggcattgttaagtgacctctgtgacaaacttactgagtggaagaaattgatttgggttcctttgcaatacccttcagttctgtggcagcaccatatgggggcttcagagtccccgtggctgctgctgttgcctgggtaccctgtcatcttctgtggaccacaagatggagtggtctgtgtcctacaaagcgcactgtgagtgcagtggcctgacctcctccctgaagtttgggagctgcctgaaggacttgagtgaactgactagcccaccctgagccttggggaagaggaggagctgcaggtggggagtcccagggctgccgtctcagctgcctggcgcccctgtgccacccactgtatccttgtgctggaacatccggtggtagctgagcctggccttcctgtctgtgtgaaggagacagcaaagtgatggccgtgagccatagtatagagaaccataggcagctctgcgagcatttttctcttagaaaactcagtggcttgtggaggagggcagtgtttacaaatggggatgggggactggcttttaggaaccagctgattcccaggtgccatggcagagctactagcagctttgttctgccagatgcctgtgttattgagatcatggtttcccgcagctacctctgcttttcctataaaaactattggtgaattgattttctttggtgatggtccttgagtcactcttggacatttcaatagagctatatttcccctacatttatttttaggtaccattacttgttgtccttatctctaggaaccttatgttctagcagacaaggcaggtgccagccgtgtcttcaaaagccaggcgtctctaaccttggactgccttggaagtgtttcatggtggtgtctctcagtgcccaaacctgttcctaagatccatctctgaagggcagttgtattttagggatttctgcccactccagtgctgagggcttgatgtccatctctcccctttctgctgtgatggtggttcacctttacctcacaggcagcctgtactttatataacgtctgccccaagggtacagaacagtgtcacctttgccgtggggagcaggcagaagctcccctcttcagcagcgcaggaccagaggggggtcgagggtgtgaatgaggacatcttcatccctcgggctgctgctgtgagaattctgaggaccagttccaagatggtggtggtggggagctctgcctcctggaagagtttccacagacttgcgagatttatttagcagccttttttggctgcgcactgcagttatgcatgaaaaagaaatttgaggccaaaccggagctgggttccaggtggtttttttatgttgtcacaaccataaagtatccatttttataaaacaagagtgaatggcagcccgtctgtataaatattatatttctaagttttagaagtggtggaatcaagaaatagacgaatggcatagcccttcattgagacttgtatgggatgatttacttgctaattctttattgaagactttacccccaaattttacatattttacttcttccctaaatgtaatttccatacacatcagtcagaagttgcatcagccgtggtcagattccgattcttcatctttaatgcgtttaaggcccagtgactcgctaggtcttagttttctcatttataaaattagggcaaaagttgggcgtggtgacatgcatctgtagtccctgctactcaggaggctgagccaggaggatcgtttgagcctaggaggcagatgttgcagtgagctgagatggcaccactacactccagcctgggcaacagagtgagaccttgtgtcaaaaaaaaaaaaattacagcaaaagtatatatctcataagttgtcataaggcataaattacagacacaccttcaagatattatgggtttgtttccagactatcacaataaagtgaatatcacaaaaaagcaagtcacatgaattttttggtttcccagtgcatataaaagttatgtttacactatactatggtccataaaaggtacaacagcattatgtctaaaaaatgtatacactttaattaaaaaatactttattgctaaaaatgctaacaattatctgagcctttagccagtggaaatctcttcactggtggaaggtctctcctcgatgttgatggctgctgactgatcaggatggtagttgttgaaggtcagggtggctgtggcaatttctaataagacaacatgaagttcacagcatcagttgactctccctttcatcaaagatttctctgtagcatgcgacgctgtttgacagcattttagcaacagtagaaaatctttcaaatttgcagtcaattctctcaaactttgctgcagctttatcaactaagtatatggaatattctaaatccttgttgtcatttcaacagtgttcacagcattttcactagaagttgattccatctcaagaaactgctttctttgctcatccataagacacaactcctaatctattccagtcttcttatgagattgaagcagtttagtcacatattcaggcctacttcttattctagctctcttgctatttccaccacacctgcatttccttcctccactgaaatcttgaacccctcagagccatctatcagggtttgagcttcttccaaactcctgttgtgttgatatgttgacctcctcccatgaatcacaaatgttcttaatggcatctagaatggtgagtcctttttagtttttatttattttttatttttttatttttttgagatggagttttgctcttgttgcccaggctggcatgcagtggcatgatctcagctcactgctgcaacctccgcctcctgggttaaagcagttctcatacctcagtcccaggagtagctgggattataggcatgcaccaccacacccagctaatttttgtattttcagtagagatggggtttcatcatgtgggccagtctggtcttgaactcctgacctcaggtgatctgcctgccttggcctcccaaagtgctgggattgtaggcttaagcctttaggaggtttttaatgggttttggccacatccatcagaggaatcatgatctaaggcagttatagccttataaaatgtatttggtttttttggggcatgttttttggggttttttttttttttcgttttttgtttttgagatgcagtctcactctgttgcctaggctggaatgccgtggcatgatcttggctcactataacctacacctcccgggttcaagtgattcttgtgcctcagcctccaaagtagctgggattacaggcatctgctaccacatccggctaatttttgtattttagtagagacagggtgtcatcatgttgggcaggctggtctcaaactcctgacctcaagtgattcacttaccttggcctcccaaagtgctgagattataggcgtgagccactgtgcccagccataaaatgtatttcttaaatagtaagacttgaaaggcaagatgactccttgatccatgggctacagcatggatgttgtgttagcgggcatgaaaacaacattaatctccttgtaaatctccatcagagctcttgggtaaccaggtgcattatccatgagcagtaatatgttgaaaggaatcttttttcctgaacagtaggtctcaacagtgggcttaaaatattcagtaaaccatgctgcagacagatgtgctgtgatccaggctttgttgctccatttataaaacacaagcagagtagatttagcataattgataagggccctaggattttcagaatgttaagtgaacattggcttcaacttaaaatcaccagcaacattagctgctaagaagagagacaacctgtcctttgaagctttgaaggcatgaacttctctttatctatgaatgtccaagatagcatcttcttgcaatagaaggctctttcgtcaacattgaaaagctgttgtttcgtgtggccaaccccgtcaatgatcttagctagatcttctggatagcttgctgcagcttcttcctcagcattttcttcacttggacttttacgctgtgtttgagggatctttccttaaacctcatgaaccaatctttgctatcttccaacttttcttctgcaacttcctcaccactctcagccttcatagaattgaagagggttcgggtcttgctccagattaggctttggcttaagagaatgtcgaggctggtttgatcttcttttcagactactccctatcgctttctccctatcacttttcttggtaaggctgttttactttcttatcactcaagtgttcatcagagtagcacttttaatttccttcaagaacttctcctttgcattcgcaacttggctaactgtcacaagagtcccagctttggcctgtcttggctttcaacccaccttccttatcactaaacttaataatatctagtatttgatttaaagtgagagacatatgactcttccttttgcttgaacacttagaggccaatgtagggtataaggagagagagagagagagaacagccaggtggtggagccgtcagaacacacacaatatttattattaaatttgctttttatttatttatttatttattgagatggagtctcatgctgttgcccacgctggagtgcaatggcatgatcttggctcactgcaacctccgcctcccaggttcaagcgattctcctgcctcagcccccccagtagctgggattataggcgcgtgccaccgtgcccagctaatttttgtatttttagtagagctggggttttaccatgttggccaggctgatctcaaactcctgacctcaggtgatccacccgcctcagcctcccaaagtgttgggattacaggtgtgagccaccgtgcccagcccaaatttgctattttatatggatggggtttgtggcactgcaaaacaatggcaatattaatatatcaaagatcactggtcacagatctccatgacggatataaataacaataacgaaaaattttaagttggaaaagtttgacatattctgagaattaccaaaatgtgacacagagacatgaagtgagttcatgctgttggaaaaatgattgagaaatagacctgctggatgtcaggttgccacaagccttcagtttgtaaaaaatcacatagtgcaactcaacaaaacaaggtatgcctgtatataaaacatgcagagtgtttggcagggtgcctggcacagagcttttatctttatgaataatttcatggagttttaattatgcagcatgaatatatacatttttcacttcatttttcttttttaaaattttcttatagaatgggggtctcattttgttgcccaggccggtctccaactcctggcttggatcgatcctcttgtctcggccttccaaagtgttgggattgcagacgtgagccactgcacccagcctgtttttatacatggtttcatgtatctatgtgctcttctttgctttttaaaagtgacctcatactattttgcagttaatgttccataattcatctaaccattccttaattcttgtgtatttccctgttacaaaattctgctgtaaatacctgtatatagctttgtttcttgagtgaaattcttaagacaaaggatgtgaattttaaaaatgagctctagtgtgtattagcagaccgtctttctaagaggatcaatcatatatccaaagtagtataaaatattcataaagtggtatatgaggtttattttttctgcagccttgtaaatatcggtttataattttttgctaatagtattaagtgccacctcattggttaaaaagtttaacctcgttgcgttttctcatttactagttgcttaactatttcttttttcttgtgtctcttttcatagtatttgatcatttgtccttccgagatttagaagtttattttagaggtttatataagttcttagtatattctaggtacaatttttaaaaattgtagtgaaaaacacataacatgaaatttaccatttaaaccatttttaggtgtgtaattcagtggcattaattataatcacaatgttgggtaactataaccaccagtgtccatttccagaactttttcatcatcccaaacggattctctgtatccattaaacaataacatttccccccaacctgaccggcccccgcccacagcccatggtgacccctattctcctgtttctgcattttcttattctagatacctcatataagtggattaacgtgtccttttgtgtctggcttatttcacttaatgtggcatttttgattcatccatgttgtagcgtgtgtcagaatttccttcctttttaaggctgaataatattccgttgtatatacataccacattttgtttctccattcatctgtagatggacatttgggttgtctccaccttttggctgttggaataatgcgggtgagaacttggctgtacaagtatctgagcccaagatttcagttcttttggttgtatacctaggagtggaattactatggtgattttgtatttaacatgtcatgcccatgctaatgggcatgacgtgtgtagctgcaaattttatctgttacatttataagttttcccatatcactgttttgcattttatcttacttctgtgagtattgcagaaaaggatttaagaattttaaaaataattaggcctgtgcatttaaaaaatgtgtataatttcggtttttgcgtcaataatgtaaaagttcttatctataaaatgagatacttttttttttctttatggccacattggttctgcagagataaatacttttttctgttttcgcttgctttcttcatgatgttacgttatcaaaataaatatcccattagaatttatagtgttatatgtgtcactataatatataactataaatatgtatttatacataatatatattatatagacatgtatataaaatgaggactgggtctaaattattttctatgctgggatcctattgtcacaaagacattaagtaaacagtgtcattttttactgtgattttttttttagtgttgatcacttttaacattcttacatacagtgagaatttgtttcttgttttgagtaagtcccatatgatttttattactgatgtgttatcgtattttctttaatgtctggaagagctagttttgcctttttttcctccatgatattctttgatcgttcatacattttcaaaacaaatttcagactttgaattctttgaagcacagtaggatgtaagtaggaactgtgttcatctgtatatacaccggggaaggattttaccttcccatcaatcaggtaacacagtatggcttcgtccatttttaagttttgctccttttttcctcacgtaatataactgtttttctttatatgagcttcactcatcccatgccgtgctaattacgaaatctttgtccagttttggttgctgtcgtgaagagccgactgatcagctgccttggcagtgcagttgcttgtgtttcacgggtgaaagacaccaactgctttactgtggcccacatgttacgagctgatcttcagtagaaagaacttctgttgttattggtgctggctttctacgtgcctgagtgcagggccgagaagtcctgagtgtccaccacgagtctgtgatacaccacacgcacctaagcatcttggaacacacagtggactggcagtgtctctaggattaagcaaaagaatttccaattcctgatcttttttttggctaactgtgactagagtgtgtcccagtcctgaatgaatatgtgattcataaagttagaatgtttcaccaacatcacagagggaaccttgtgaaatacccaaggttatagaaagcagaggccatgcaactgccatcttactgcttaccatttggtaccccactttccctccttggtaccccactttcccggtccttgataccctacttttcctcccatttgggaaacatcaaagctgtcttcgctccccacgcccactgtttttacttcgtggtgttctggtttgagtactggttctgctacttgctgactgcacaacacctctctgagtggtccctctgtgagcctcagttttgtctgcagtgaaatgggaataataatatcttcctcataagggcattgggaggatcaatgagctaataaaagtaaacttgctaaaggcaatgcaggatcctgggttggatcttggaacagaaataaaacattagtgcaaaagttggtgaaatccaaataaagtctggagtttagttaatagtagtatactaattattattttagcattggcaaatgtgccatgattatataagatagtattattaagggaaactgggtgaagaccatactatcttttcagattttctgaaagtaatatccaaaattattccaaaataaaacaaaaagaacctgtggttttaaattttttaaattttttattttttagatagagcctcactctgtcacccaggctggagtgcaatggcatgctctcagctcactgcagcctccccttcctgggctcaagcgattctcctgccttagcctcccgagtagctgggactacaggcacacgccaccacacccagctatttttttctatttttagtagagacagagttttgccatgttggccaggctggtcttgaactcctgacctccagtgatccacctgccttggcctcccaaagtgctgggattataggggtgagccactacgcccggcctaatttttgtatagatggggttttgccatgttgaccaagctggtctcgaactcctggcttcaaatgatccacctgctttggcctccgaaagtactgggattacaggcatgagccaccgcgcccagcctaagttttgtatttttagtagagacggggtttcaccatgttgaccacactggtcttgaactcctgacctcaggtgattcacttgcctcggcctcccaaagtgctgggattataggtgtgaaccactgcgcccagcctaaagaacctgttttgtaaatgatattgttatacaaatgtcaggtggttttatttcaaatatctttcttttattttttagtttttaattttttttatttcttttcttttccctttgaaactcacctattcaatcaaatatctttcttttgctagattattgggcttattgaataagtatttcttgaacaaatatttatcaaatgttaagcattacggacaatgtaaagcatataagataaggcctctgccctatgatcttgttccagaaaagaagttgaaaccacacatcagcaaagtcaaaacagcatgtcacaggggctgtgcgactgtgtagctgagaccatgggtgctgtgggcttcacagtgtggagtgctttccctgggccgcaggggtcgggagggcgtccagggaagaaggccgatgtgggcaaagagatgcagcaagaacacaagggacagagagtggaagtagtgaaaaatgcgggaaacaaatctgccctcgctctcaagatgggtgcagtccttttggggagatatgggtgtacatcaaataattaggattaaaagttagagaacattggctatattgaatacagttaaaagttaatacagcagaccgggtgcggtggctcatgcctgtactcccagaactttgggaggctgaggcaggcagatcacttgaggtcaggagttccagaccagcctggccaacatagtaaaaccccatttctactaaaaatacaaaaattagccaggcgtggtggcactcgcttgtaatcccagctacttgggaggctgaggcaggaggatcgcttgaacccaggaggtggaggttgcagtgagccaagatcatgtcactgcactccagtttgggtggcagggtgagactccatctcaaaaaaaaaaaaaaattaatacagcaattctgtaaggcatgatggacttgtaactccttgtcttcgacaatccagtttttctatttgaagcctcattagacttgagtatggtgccctgtccctggttgaccagggtgaccgtgggccagtaatgtattgttagaacttaatttctgctgactatgagttgtgatggggtggattgactcctgaggttctttcaagctttcatgttctaagaatgtgcgcacacacacacacacacacacacacactcatttactcctactttttgagggcagaagaagggtactcgtgagtattcgtgggcacagaaggcttgtccatgctaggatatctagccttcatatttttctgtttccaaatctgaactcaaggtatagcacaaactttctttttttcaactttaagttccggggtacgtgtacaggatgtgcaggtttgttacatcggttaaacatgcgccatggtggtttactgcacagatcaacccatcacctaggtattaagcccagcatcggttagccattctttctgatgctctccctccccgcaccccaccctgcaaaaactgttaaacagaagagctactatgggtgaaccaggttgactcagaggctcttggttaggcctgtggacatgtacagccctggagggaaccttcctaactagatttgcagctgcataaacagtcagatccgagtagtgttgattggagggtcttctgccctggcatgccatgggggctctgcttttgttcttttcgtggtcagctatttcgtaataattatttttaatagttatatgttactaaaactttaaaaaaataaaagcttagacagtataaagaatgtctttttcctattctgctcaccttcagtttcctcctccaaggcccactgttgtgtttcttgcggttctttcaaagatattcttggaatatacaagcgtatgtatatatattccttgaaaaaacacacacatgtgtatgcacacaaactcacaaatgatagcacaattatacattgttctgcactttttcgtttagtagttatcttagaatgttcccatagtatttgaagctaacttgaagagcttcgttcacctcccctttccccactaactccagccaaggatggggacaattttaggatcaaaaagaatattaggctgggtgcagtggctcatgcctgtgatcccagcactttgggaggctgaggtgggaggatcgcttgagctcaggagtttgagaccagcctgggcaaaatagtgagaccctatctctacaaaaaataaaactaaaaattagccaggcatggtagcatgagcctgtagtcccagctgcttgagaggctgaggcaaggggattgcttgagcctgggaggtcaaggctgcagtgagccataattgtgccactgcactccagcctgggtgacagagcaagaccctatcttaaaaacaaaaaacaaaaaacaatggattgaaatattttaaaacatatttgaatccagtgcctcataaagattcttaaacaaaatgaaacctcattgttcatttttagaggatgcaaggaaatcaactcattctgaagactggtaaacaaagggaaagaagcaagcatttctcctgccttttctttacaaactgaacctccaggaagccaaatagttgatatggggaggtttctctttacagaagtattgtagctaataaatgaagaaggtgtggtagaattagaatattactattttgcaggcttcagtgaattatttaattatttaagcctatttctgaactttcttattaattgacacttgcctattcatacatcagtaccacattgttttaattgctgtagctttgtagtatgttttaatactttagaaactccccctacacacacacaccactcttttacaaactcctcctacacacacacacacacacacacacacacacacacacacattcttcttctttagaatgttcatggctattcttgtgtatttagttttcctaataaattttagaataaattcatctagctctgaaaaaagtcatagtgttttttttaaaattgagtaaaatgtatagctgtgcataaagtgaattgccatctgttgtgttttactggcttgcctgagatagaataggaatataaatatcaagccttgcatttctgttagggaaacattaattgcacaagatttagtcatttattaaacaactaatttagcctgtgtaccaggcaatattttatatacttcagagaaaacaagcaaataaatcatagccaatttctagcatcaggctcttacctgtttgttaagatctagcttggtatccatcacatcatatgaagaaatttgactttcagctgaccaccagttccatgtgtgccaatttttacatggttgctaagagttattataatcttcggttgaattagaggatgtgcagagagggagaagtggagcatagtgacaagtggtttaggctctggaggcagacaccagggtgtgaattaggtgctatatgaccttgagaggtgttgtagcctctttgagctatagtttccttaagtgttaagtggggatatcaattgtaactaacttgtggggttgcgtgtgaggcctaaatgagataatctaaagtgctttgcacctttcctgcacatgctggtgttctggaaatgttacctggtatttaagttggtaatctgactctgctggcctcatggtatctgatttattatgtttagttcctgatatgattagctagaagaggcagtagatgatatctcgaagagggcagccagatgatcgggaaaggggggttgcctagaaacactgaagaaatggtaggcctctttactagaagagggaatactaacatgaaacagtagccattgattggttggttgattgattgatgggtctcaccctgtcacctaggctgggttgcagtggtgcaatcatggctcacttcagcctccacctcctcagctccagtgattctccctcagtctcctgagtagctgggaccacaggtgggcaccaccatgcccaactactcttttaaattatttgtagagatgagtcctcgctaggttgcccaggtctggaattcctgggctcaagcaatcctcctgcttcaggctcccaaagtgctggaattagaggcaaagtatctaggtatccggcctagatactttgaattgctttggagatagagatggggagactcagaccaggtaatagaatcagcctcacatgaagaaaaaaaaaaaccaaacaactttctgggccaggtgccctggctcatgcctgtaatcccagcactttgggaggctgcagtgggcatatcacttgaggccaggagttcgagaccaacctggccaacatggtgaaaccccgtctctattaaaaatacaaaaattagctgggtgtggtggcgcacacctgtaatcctagctacttgggagactgaggcatgagaattgcttaaacctgggaggcagaggttgcattgagccaagatggcgccattccactccagcttgggtgacggagcgagactgtgtctcaaaacaaaacaacccctcaccaactttctggcaagtacatctgttcaatgatgggatgattctatagtgagctccctgtaagaaacgttcacgaagaatctggatagccacttgttagggatacaacaaaaagaatttctgcattaggaagatgaggctaaatgatgactaaggtgttttcctatgaatttctagtatacatgtacacatatgcaatcatatatatggaaaattctctgcatatagcttatcacttccaaaaaaccacagttctttgaaaccttatttgatccttttttgagttagaggatattgcaatgcaccttggggtccttgtgaacgtaagtgatcatcaaagaggtgaagagatggtgaaatagggagacttggggactagtgtgtttcacttctgtctcattgtctattatctcagagagaagacccttagctatgagcccttcttgcttcctactttgagcatgagcctttacaagaatgagcacattactggaagttttctgcctctttagtgtgtatgagctttttgaaagaaggtgctagtcatgtctagcaaacaaatgacaaatttaaagaaaaggatgtgaccctataaacttggccttgctgcatttagccccaacactttttttttttgagacacaattttgctgtcaggcaaattttttgcaaggctggagtgcagtggcatagtcttggctgactgcaaactctgcctcccgggttcaagcgattctcctgcctcagcctcccaactagctgggattataggtgtgcgccaccatgcccagctaaattttgtatttttagcagagacggggttttgccatgttggccaggtggatctcgaactcctgacctcaagtgatccgcctgcctcagcctcccaaagtgctgggattacagttgtgagccactgcgcctggccccaacacattcctgttatgttgatctttcctgctactcttttgttgcaataaatgtaaatgtaaccacagtatgttagaaaaacttgataaagttatgtaaaaaaggtagtgttaatatatttatttcggattcatcctgatttcctttggacaggcattaatgacttgctgtacttttcaaagtcatgttttgtaaaactttttgctgtcgcccaatacatgtagtgtaacattgtagataccatgttagcctattaagtgaaaaacctagcaagtataaataaaattctcattcttagttgatctttaaagtatgatttgtgcatcttcagtgaatgatgaacccacaacagccactgatcccgaagaaccttccgttgttggtgtgacgtccccacctgctgcacccttgagtgtgaccccgaatcccaacacgacttctctccctgccccagccacaccggctgaaggagaggaacccagcacttcgggtacacagcagctcccagcggctgcccaggcccccgacgctctgcctgctgggtgagtagtcttctgtcccataacagatctctcctcctcaaagactgaggctcctttacgggggtggaaacaacgtggttatttattacctagtggctagtagcctctggggaggctgctgtgcattgaagcaagggaggtgtggaagaactgcttgttctacataaatcttaaaaagaatctcagtcgcctggggcagaatcaatgctaccttgtactgtgacttgaaatgaacagcttgactcaaagagtgtggcttttacggaacaaggagctcattttgctttcctgaatcattggaggatgttcgcctagatcctgcctagaaaacagcttttctctcttgaattttatcgtatcagcccacggaggagttgggttttaggctgtgaatattgctgtatgttattctcataatcgggacttaagttaacataaactacaagttttcttgccatccttttttttttttagagatggagtcttaatctgtcacccaggctggagtgcaatggcacgatctcagctcactgcaacctctgcctcctgggttcaagtgattctcctgcctcagcctcccaagtagctggggctacaggtgcacaccaccacactggctaatttttttgtatttttagtagagatatggtttcgccctgttggccaggctggtctcgaactcctgacctcacatcatccacctgcctcggcctcccaaagtgctgggattacaggcaggagccaccacacccggccctcttgccatcctttagttcagtcagatggcgtggtggctcacgtgccaatcaattccattgctttgggaggctggggtgggaggatcacttgaggccaggagtttgagaccagcctgggcaatatagtgatatcctgcctacacacacacacacacacacacacacacacaaatgtgggcacagtgacctgtgcctgtagtcgtagctactggggaggccaaggtgggaggattgcttgagccaggagttagaggcagcagtgagctatgatcacaccactgtaccccagcctggactatgaagcgagacccctgtctcaaaaataaaaattaaatctgacagcaaagaccttggatgataagaagacagcccctgtaagccaaagggaagttcaagtttggttatatggtgagtggagattataagcatggacctgtgaatcagacagctctgggtttgaatccccccaccatgtgaccttggccgaatgacttagcctcttgataaggtggagataatcatcatacatatctccccaggaagttaagggactcaaataagatggtgaacatgaagccctcactgattggtgggtgttacacctggtaagtgatattttccgagtggttgtgaaggggccctaaaggaagggcatgcttctgaaccgggaggtgaagtcccttcttcgcagctctgatcatggttggggccagttttcactgcctctcctggttatcagtttggtgtggaggaaacccacatctgtgtcactctagttgctggtgatctggttgacgatgacttggtggtgtgtatcctgtgaaccgttgtgattcataaaggaaaaaagaagggtgtaaggcctcttacttgactacaaggtgctgtattattctttttttcactcccttatcccatctctttattctattattaagccactttcattgttgttgttgttgtttgagacagggtctcactctgttgcccaggctggagtgcagtagtacagtcttggctcactgcagccttgacttcctgggctcaagcgattcttccacctcagcttcccaagtagctgggactacaggcgtgcaccaccatgcctggataattttttttttttttttttgtagagacagggttttgccatgttgcccaggctggcttaagccactttcaaaaacccagttgtcaaaacaaaaatcttttatcggaaggcacatgtgacctttactacgtacgtattgttttcctagcatgcgccacgctacctaactcccgtctgttcagaaagtcctgttccacatacctttgtacctcaaacctggagagaattggcaggattgagaggcagctctgggatgtttttttgtgaggtttttgattttagtgaaggttaaagtgaaaagctcactaatcaattgctttgtgtccagctactccctatagagatatttctcttttgtatgtggtaaggaatactcgaaagacctttgtttggtttgtaatttcaagcctgtatgttataatttggggggaacaatgcagaatcatgttggcagaaaggagagaaaatggccgcctgtgtccccagtgagctgtttgttttctttccgctgagcgaatgcctggaaggccggcctcactcctgtgtcagtcacaggcaattagggctaatggctcaacatgtctttatgtagggcgtgtgtgagggttactgttctcggggattgggcacttcctgtttccaggcagctggaaaactccaggctctgaaaacgctctttattctaagtctggcagatcgagcagcccagggaagccgattcccctccctcatcctgccagaggctgaaacacgtttctgaggtagagcctaaacagcatcttttccttggggcatttagaacgtgatgagggccacatgtgggcctggggaggctgctccccacttgaacatgtacgatggtccagagaagggtgtcggagacccaattttccaacccagatggcttccacgtgctcttctctaagatggctaggagggctctgtgggctgactcggggcctggagatcgtcagccacctacctggagactgactagcactgctgagtgtctaagagggagcatggcaggcttttggttggctgatggaagccagagagagtactatttctgccagcgatccttccagttcataggcctgccagccccaccccagtttacttaaaagtttaggagatccaggcaaggcgggttattaatttacccctggtgttccagagtcaggggaccaatgagagaaggaaatctgtcatttctaattccaataccaacaaagggtgtgttgtggcaaagggattggagtgctatctcttaggaactgcatcttcttgagtttgcagaatgcctttatcttttatgaggatatataaatgcagcagctgaattgagtatctactagtgcccaagttctatattcgaggttttacactgttgattctttcattagacagaatatctgttactatttaagagacagcaggtcaggtactgggtatggcagatgcagtgctaaacaagaaatggttcttgctaccagactgtttcatgatgcgtgccctggtcactcagttctccccctggctcgactcagccattcccttggctgcctctgggatctgatgctaagtccatatctgcctcttgagcccagttctctcctgactcactacctggacagttccatgtagctatctcaacccaacagaacttatcatcttacccatcccatccgggctagaacctggtccccctcctgggaatggtgccaccatttgcccaggtgaccttcaagtcatacatctttcccctgaccctgacatccgttcagtcatcaagccctgcctctgggcctccagactgtgctgtctcagcttcccatactgatcctgctttgcatttatcacaggtgtaatttgcatacgatttattaagtgaccatctcctccaccatactctaggtgccatacgggcagggattgtgtctttcttatttgcctctgaatgcccagcacctagcacatatgcacctagcctggcacatagtgggactccaggaaatagttaaatgaaacaatgattctctcttttttttaatttaaaattttattttatgatttttcttttaattatactttaagttctggggtatatatttgcagaatgtgcagtttcgttacataggtatacacgtgccatggtggtttgctgtacccatcaacctgtcatctacattaggtatttctcctaatgctatccctcccctagccccccacccacccctgacaggccccggtgtgtggtgttcccctccctgtgtccatatgttctcattgaaacaatgattctcttaaacaactctcaaatctgcccacttggctacatgcttttgcaatattccagaccaaattaccatgatctgtcactcgagtgactgttcttaccctttcccaatctattttaacttttctttttttgagacattgtcttactctgtcacccaagctggagtgcagttgtgcaatcttggctcactgcagcctcagcctcacgggctcaagtgatcctcccacctcagcctcctgagtagctgggactacaggtgcctgccaccacacccagctaattttgtttattttcacagagacaaggtctccctatgtttccaaggctggtctcaaactcctaggctcaagcaatcctcctgccttggccttccaaagtgctgggattacaggcatgagccactgcgcccggccctgttttaacttttaaaaataaaactctgagcatgacctttcaccatttagaatgctccagtggcttcatattgtctttggggataaattcccaaatccttaataaggcctaaaaaggcctgtgtaatatgaccccacctacccttcaagccttcggtgggatccactccacatctctgcctaagccacgataacttaactttaatttgacaaatgcatcaccctctctccggacttaggatcctcccccatgctggtcactctttctgaaaccttccttgccatcttgtccattaattcctatacatcttcaagtgtcaacttaatcagtaaatcctctgggactccctcccggatccctggtggacaagaagaagtgtgtccttcctctgtcactcttctcacacctgtcattgcttgttttctgcctctctgctattcttggctctgcacaccaaggtggccgggagcctggcacagagtaggctcccaagacatgtttgcaatgaatggatgagtgcttttaaatgccatctttttttttctttccttcacctagatgaatgttttttgcctctttgatgcctcaaagaaagaacagctatgacagcaatattgcattttcttcccaagggcaagaaagttgagcctaatgctgtcattcactggcttgactggctttgggttcaaatatgcatctctcatagttcagaatgctgttttttttgtttgtttgtttttgtttttgtttttgtttttttgagatggaatgtcactctgctggtccaggctccgtctcccaggttcaaacaattctcctgcctcagcctcccaagtagctgggagtacaggcttgcgccaccacgcccagctaattttttgtattttttagtagagccagggtttcaccatgttggccaggctgtgctcgaacgcctgacctcaagtgatccacctgcctcggcctcccaaaatgctgggattacaggagtgagccactgcacccagccctcagaatgctcttctctgttcataaaggatcgctcttcctgcactggcagatactgtgcagcacggctcctcttcactgaggcatttgagctaagcttgattgctttctgggccctccaggggactctgtctttctaactttatcttctcaactcatccagtctccctcactgagtgacaggagcaaggttctcttggggatctcatggctgtatttttcaggttgctgcattttttttttttttaactgagatggagtctcgctctgtcacccaggctggagtgcagtggcaagatcatggctcatggcagcctcaaattccaaggctcaagtaatactcctgcctcggcctcccgagtagctgggactacaggcgcatgccactatacccaggctatttttttttttttttttggtagagatgagggtctcactctgttgcccatgcggatctcaaactcctgggctcaagcgatcttcccgccttggcctcccaaagtgctgggattccaggcatgagccaccgcacctggctgcattgtctttttgaaatatgcagcagatgagactttggccatatgtggttacacacgtctgcacgttttaagaactgaaggctgctgaaacctgggctgaagatgtccaaatacagcactccccatcccttttctctgtccccatctgtaaaccctcctgctttccatagcttttaaattaactagcgtgaaagaagccaactggaagggtatgaagttttcaggttgcaaatgtctgtgaaagaaggggtgccaggaaggtttgaaggggctagtgagatagtggttcaggccgtgggcaatgggaagcgaggctgctttggtctgcaggccctgtatctgttttttctcagcgctcagcccactttggggacccagtgctcattatcaatgagccaactgtgtgtacatggcttagataaactccaagtgtgtcccttacagtctttgcagctccctcggtcccacacacacagaggcacattattttgccctggcagccagcacgccactgtggtttcttacataacggagggcgttgtgtttggactgccgacttacttcagctctgccatttcacaccatgctttttctcccgcagccattggctgccccgtctgtttcctgcctccgagtggaattaattgaggagggatgttttctggatctttcggatttgccatctcctctacccccctgcccaattatggatatccagaggcactctcttgagatggcccttaagacactatcaaggacgacagccttgtaagagttcttggatgtttgtttgtggggacactctaagagatgttggaatttggagcttctctgctaagttataaaccaggcgctgccattgaatttcattccaaactcaacttcagcactagccaaagagtcttacccaaggagttttaacactgagctgctcaaaactatttgtgagaaaacagtcctttttggttgttgttttgttttaatttattttaaaatagtctgtctattgtgaatcctttaattctatactctgttcaatgagacgaatctattgagcacacatgtggatattacagcaatgtcagatcggtacaaaagttcctaaagtgggccaggctcatgcctgtaatctagcactttgggaggccgagtcaggaggattggttgagtccaggagttcgagaccagcctgggcaacatagcaagacttcgtctctacaaaaaatacaaacaaaaacatcagctgtgtgcacctgtgatcctagctattctggaggctgaggcaggaggatcgcataagtcccggaagtcgagcctgtagtgagctgtgttcaagtcactgcccttcagcctggatgactgagtgagaccctgtctcagttaaaagaaaaaaaagtttctaagtgcttagaaacttcagtacttttctggtcacagaacagtaacagtttgggctgtggaccattctttgagtagcatcagattaaaggattacactgagcgtctgtgtctttcctccagtttgtttctttgcttagtatggttagtttgtgactctgcagggattgttacatgcttaggtcacatggaatagtgtgtgtttctggcttcctcatcaccatctcagaacttaaactcttatttccaaagattctactgttgtcggaggctgggccatgagatgttttcaccttatgtgtatgtattcatgcataattattcattttcatttctactgcactttctttcctttttttggagacagggtctcattttgtcacccaggctggagtatagtggcgtgatcatagctcactgcagcctcaacttccttagctcaagcagttctcctgcctcagcctcccaagtagctgggactaccatgcgccaccatgctcagctaatttttgtactttttgtagagacaaggtcttgctatgttacccaggctggtcttgaactcttggaggctcaagcgatcctcctatcttggcctaccaaagtgctggggttacaggtgtgaaccaccgtgcccatccttactgcaatttcttgagagctcctcaagagtaaagaatattgtgtccgtctttgtgttccctgtacccagcatacaacttggcttccaaagagagggagtgatgtgttacatgagtgggaaaatgatatcacattctcagtggcccttaaaattttttaaagtttttttctgatcttattataaaagcccattgatggaaaattagaaaaaaataggaggtgggagaagaacagtacataataacaacagttaacaaacacccccccagagctgaccattggtatttcttctgcagcttgtgtgtattttttttttttttttaaacactaactacagctaccatgtattctaagtgtttctaaggtgctggggactgcccagtttcctacctggatgatttcatgcagtcttccctctgtgagagagctacttttatcctcatcttgcaagtgaggagaacttaagcaatttgcctggcaccacatatacagatacacgtataacacacatctaccaaaagttgataatcttccagtatatgcttttaaaatccattcgtttttattgtaaaatattgtaagcatgcagatacaaatggagaagaatgtaaaaaatacctgtggctcatcatctttggctctgtgctgcatttgctacaggtctctccccgtctttttttttttgtttgtgtgttttgtttttgagacagaatctgtgtcacccaggctggagtgcagtggcgtggtctcagctcactgcagccttgacctcccaggctcaggtgatcctctcgcttcagcctctcgagtacctgagaccacaggcacatcctaccatgccaggctaatttttatattttttgtagagatggggttttgccgtgttgctcaggctggtcttgaactcctgggctcaagcaatctgctcccctaaacttcccaaagtgctggggttacaggtgtgagtcactgtgcccggcacctgaggaggtctttttttaaccacctctttttaaccccttgatgtataagatgttaccagtacagctgaagcttccatgaactctctgatctcattccctgtatacagtgatacatggaacttgggacatgcatttaaactgctatacggtgttctgttacatgaacagataaaaatttatccatttacttgtttcttgacagctagaaagaatggctgcagtaggccaggcgcagtggctcacgcctgtaatcccagcactttgggaggccgagctgggtggatcacaaggtcaggagttcgagaccagcctggccaatgtggtgaaaccccatctctactaaaaatacaaaaattagccgggtgtggtggcgcatgcctgtagtcccagctactcaggaggctgaggcagaagaatggtttgaaccagggaggcggaggttacagtgagccgagatcgtaccactgcactctagcctgggcgacagagtgagactccatctcaaaacaacaaaacaaaacaaaacaaaacaaaaaaaacacaatgaaacaatggctgcagtaaagttttcctgtgcatgcctttttgtgtatgtggttttttctttttcttttctttctttcttttttttttttttttgagacagagtcttgctctgttgcccaggctggagtgtgcagtggcacaatctcggctcactgcaacctccgcctcctgagttcaagtgattctcctgcctcagcctcccaagtagctgggattacaggcatctaccaccatgcttggctagtttttgtttttttagtagagacagggtttcgccatgttagccagggtggtctcaaattcccaacctcaggtgatctgcccacctcggcctcccaaagtgctgggattacaggtgtgagccaccactcccagccagttatttcttaaagatttgtacagcaactggaatttctgcattataggaaatgaagatcttcaacttcagtaggtattatcaaattgcctgagtcacctaaccaattcatactcctgtgagcatgcataagcattcctgctaaaacttagtgttgtcaggttcgtttcatgtgggccagtctaatgggcatgaatggtacatctttgaggattcagtttgaagttccctgattactattgagattgaacctctttttacatgtctttattaggttctttggtttcttcttttataaattgcctatttatttttgtccattttttatttgtctttatatatatttatttttaatctgcaggattcttttttgttgttgtttttgtttgtttttgagacggagtttcactcttgttgcccatgctggagtgcaatggcgcaatcttggctcactgcaacctctgcctcccaggttcaagcagttctcttgcctcagcctctggagtagctgggattacaggcatgtgccaccactcccagatactttttctgtatttagtagagacgggaattcaccatgttggtcaggctggtcttgaactcctgacctcaggtgatccacctgcctcggcctcccaaagtgctgggattacaggcatgagccaccacacccagccaatctgcaggattcttaataatgctaggtacaaattgcttctcaattatacgcattgcaaatatttgctcccagtctgtggcttgtcttttcaatttgcttatggtgccttttattgtacaagagttaataattttaaatagccaaatctgtaatctttttcatgtgtcttttgtgttttgtctaaaattcttccctactcctaagttacataaaaatgttacaggccacacttggtggttcttgcctgtaactttagcactttgggaggcttaggcaggcagattgcttgagcccaggagttcaagaccagcctggacagcatagtgagatacccatctcagcaacaacaacaacaacacaaattttatacacattccacattttatttattctgatatgcatgttatttcacattttaacttgtttaaaaaatcaagatgtgggccgggtgcaatggctcatgcctataatcccagcacttcgcgaggccgaggcaggtggatcacctgaggtcaggagttcaagaccagcctagccaagatggtgaaaccctgtctctactaaaaatacaaaaattagccaggtgtattggtgcatgcctgtaatctcagctactcgggaggctgaggcagggaattgcttgaacccgggaggcggaggttgcagagccaagattgtaccactgcactccagcctgggtgacagagtgagactccgtctcaaaaaaaaaaaaaaaaaaaaaaaaatcaagttgtggtttataggcactggggtggcataatttaattggcagtgttttttttcttagtgttatgtttaataatcttacaatcgatggcattttagatttgatgaaaaacaatatataatttctaaacaaaattttgattgtcttagtcatattactttaaacttgccttttctacccaatatattgtaaatacctgaacaagtcaatatttatctacaatgttatttttaaggaatgaatacccattataggaataacatgatttatttgattaactctccatttgggggtgtttaggttgcttccagtttttctgtaactgctgtaatatgacgtaacagatgcacttatagctaaatttttgacacctaattatttctttgggatatgtcctagaagtaaagtagctgagttaagggccattcacaagaaaaataattaaacggtattcacataataaaggttttttggccaaattgccctttggaaagagtgtacccatttttgctcccattgatcgttcttgatagtaactgtccctatactgccaaccttttatctgcaaaaatgttaaaaagaattttttagaggctgggtgcagtggctcacgcctgtaatcccagcacttttgggaggccgaagcaggaagattgcttgagcccaggagttcaaaaccaccctgggtaatatggcgagactctgtctctatttttaaaaaagataattaaaagaattttttatagatgcatatattttaatgttgccaacttttttttttttctttgagacagagtcttgctctgtcacccaggctggagtgcagtggtgcgatctcagatcactgcatcctccgcctcctggactcaagcgattctcctgcctcagcctcctgagtagctgggactacaggtgcgtgccaccatgtctgcctaattttttgtatttttagtagagacggggtttcaccatgttggccagggtggtctcgaactcttgacctcaggtgatctgcccgccttggcctcccaaagtgctggaattacaggcgtgagtcaccgtgcctggctagtgttgccaacctctattgaggagctttggtaaagataaaaaagataagaagaaagacttaattcaggagctttggtagctgctcccatgccatcctgtgtttggaggcataaagtgctggttgttgagttattaaaaggttagtgtgcttagatttaaaggctagttccttatttcaggaagggtccttcggggaaggactgagtttaacacatttcctacccagtttacaaaggacctactgaagcactaaacacagtgcacaggaattatattccactgcagacagattgctgactcataaaacagcctgaaaacatccctacagaagaaataaatcttatggttctccccggaagtggccaaagcttggaggaagaataggacttggctcagaaacatttattataggagcatagaatacaaaaatgtgattttatgtagcttttgcctgtggggcattgaacttctgaagaggcagctttaagaatacttgagtacttccagtgtattcttcttaagtttaatttttgtctaagtaaccagcaagacatcttttctttaggatgtgaaagggttcaggtgtggtcttatttccttttctctgagatggagtcttgctctgtcgcccagtctggggtgcagtggcgcgatctcagctcattgcaagctctgcctcccgggttcatgccattctcctgcttcagcctcccgagtagctgggactacaggcatgtaccaccacgcccagctaatttttttgtattttgagtagagacggggtttcacatggtcttattttctaatggagagagtggattttgattgagttagctttactaataatgcccagtgcttgtgtcagtgaaaagtaagcaaattaatgaataatacaagctgataatgctcttaccaagactgaaattttgaccattttggtgtatcaatttataagggccacttgaaaagaattgctgttagccaggcgtggtggcgagtccctgtaatcccagctactcgggaggctgaggcaggagcatcacttgaactcgggagatggaggttacagtgagttgagattgcaccactgcactccagcctgggtgacagaacgagacttcgtctctaaataaataaatatataaatagagaatttatctaaaattcactcgaactctttgcccagctttaatcccttttagcttaatcctattcttggtgaaatgttgatttggttcaaacaggtgaatctgaccaagaaatatggtgatcagaatggttgaacacacactgtaacaacgggtaattgagcattaatttcctgaagacctttgggaaacctttgacaagaaaacatggttcaggagaccagatgatttcctgtctgataacatgagagagatgctgatgtcattctaataatgagatggagatgtttagcctttaacctgtgaagatggcaattgtgagtggattgggacgtagggttggaacatggttcatatacaactgaaccaagggcagctacaatccatcagtgcaaaggtaatttagggaaaggaaaaagtacctaagattaattgcagtcagacggagactgcttttaaagtactttgaagtacaaagacctcgtgtagtccatgatccaaccaaatgttactcattgaaggccaaggagcaatgtgttgggtagggactgaaaacaagcttggtgctttgaacactgttcctgagagcatcaacggaagctatcgagggggacaggagatgacccatgtgaccaagatgcagtgttgagacccgtgggtagtttgattgaaaagccttttaatctcagtgtgaaggagttgcttataagtgacagaaatataacctctgacagggatgcgctgatgaaaaattgataccagtgtcactttcttggcatgggggggaccaaaccaagacagtcggaggctccatctatgtgagtcagcggccactgaggaggaacaggaatcaggaggctcgtctggttggtgatagaatccaccgactgtgctgcctgaatgaaggggagagatttgtgtgaattatgaatagccatgcaggtgagggaggagtgaggttctgtgagaaagggaggcaggccaggtcatggatcagggaggacccgcagggacatttaatctgagcaggggtccaactgcaaaaggaaaaaatgatatcaaaaaaggtgatggaagaaaggtcttgttcctctggcaactattcttctcgctaagccagttgagggggttcatagaaggacattgagctttgcgggacaataatagtccctgaaagagagactttcatttccagcatcagccgtgatcaaagatggaagggtgggccttatctgggcctgtgtcctctgaagacctgctgaaactgttgaatataagggaagaggactcagcactgatttcatttctggcagtgtgtgggaataccactgtgtcaattacagacatttatttcatggaatttgaagcattagcctaccttcatattaaaacgttagccaaagtgtaataaaatcagtgtttctctccttgtctcaaatgaacataaaagatgtcaaaagtggagactgctgataagatgaaagttgaaagaatttttggaataaaagaaaaatggccgggcgcagtggctcacacctgcaatcccagcactttgggaggccgaggagggtggatcacaaggtcagaagatcgagaccatcctggccaacatggtgaaaccccatctctactaaaatacaaaaaaattagccaggtgtggtggcgcatacctgtagtcccagctactcaggaggctgaggcaggggaatcggttgaacccaggaggtggaggttgcagtgagccgagattgcgccactgccctccagcctggcgacagagcaagaatctgtctcaaaaaaaaaaaaaaagaaagaaagaaaaatgtgtttaagttttgtttttaagctccaattgctacaacagatattttgtctttataaaaggggcagcccacccaaatattagagttttccaaatagtgactgaaaaatgagcgtactagtattagggcttttgtgccacaaaactacccaaagaactgttttcaaggaagggaaggatgcagctaaattcttcgggagtgctggagagttctcagctacttaaattgcattaggagcagatgttataaaagagaggcttgctgccattggcgctcagcgctttcattttttaatacttatccttaagccaaatatctttctcaggactttcttcatttccaaattcagatgaataaagagggtatcagatttgctcctctgttaccgagcagacagaaggtatttggagaattgctgtgaagctacagtatgtcggctgtcttctgtgctagaaggccctgccaaatccccacagacgaaacaccagcctcttgagctggcaatattgttacccctttgcttttaaatcagaagggcattcagagggagaagatctttaactatacccagtgcgcattttctttttttttttttttgagttggggtctattgcctaggctggagtgcagaggtgtgatcacggctcactgcagcctccaactcctgggctcaagtgatcctcctgcctcagtctcctgagtaggtacgattacaggtatgtgccagcacatctgactatttaaaaaaatttttttatagagatgggatcttgctatgttgcccaagctggcctcaaactcctggtttcaagtgatcctcctgccttagcctcccaaagttctggtactgtaggcatgagccactgtacctggccctagtgtgcattttcatctggccacttttgccagatcctgcccttttggtaaaatactaaatgaaatatgaagatctcccttttgcagtgggaggaaccagggcatctgggtcaaatccccaggagtctcatcagtcagagccttgagcaagaatgcccgggagagaaaacatccctacatgctatttaatggtgtttgtcatgttaaataagtaagcaagaggccgttagcctgaagctgtctccatacttccagttcttacatagcaaactacaacctaacttagtacgtaaaccaaccaaaacccaaattaggagtatatgttttttgtaacaaatagctgggttccagccagtcacaggcaggcagctgatcagaccacgcccaaataaggcagacgcccagctgtagctgtttagatgatttctctaccttgcttccgtgttcagcctctaaagacttgccgctcacactgcttggcagcgctctctgagcctctcctggttctgagtgctgcccagttcctggatcattcttaaataaacttggttaaatttattttgtctaatgtttgtctttaaacagtagcactctggtcctcaaccaagagttgtccgctttggggggtgtgtagaacctccagatctcactgttcttggggccagccctcctagtggtgcaaaatgtgtaccttcttccaggagatcagatctgagcagaagattgtgattaaaatggagcctagaaatgtctgtggacccattacaggttgagtgttcctgttctgaaatgcccccaaatccagaactttttgagttccgacatgatgcttaaaggaaatactggagaatttaggatttcaggttttcagattagggatgttcagctggtatgtattctgcagatattccaaaatctgaaaacaaaaaatccaaaatctgaaacacttctggtcccaagcatctagagaaggggctactcaacctgtataattcctccctagtcatcttgatcctacctcaatgccagtgctagggaaggctgctcactttgagatcaggattgggaagccacctggcacatggccatgtagtagagtccttataaatttcagttcatcttccttttctgcccattcttcctttcagcaaagcatggtgaaactcatgggcttggggggcagagctgagtttgaatcccattgaagagttacatagtttctctgagcctcagtttcctcagtggtgatggtgattccaccttaaaggatgaaggcaaggattgcatacatggtgttagcctgtagctcgtggtagattctcagtgggtaatggtgtctcctctgcttctttcttaccttgaaaaccttatgtatctgtttctttttctttccttttcttttctttcttttttttttttgagacggagtcttgctctgtcgcccagactggagtgcagtggtgcgatcttagctcactgcaagctccgccttccgggttcacgccattctcctccctcagcctcccaagtagctgggactacaggtgcctgccaccatgcccagctatttttttatatttttagtagagacagggttttactgtgttagccaggatgatcttgatctcctgaccttgtgatctgcccgccttggcctcccacagtgctgggattacaggtgtcagccaccgcacccggccttacgtatctgtttctggactagcttctgaggggctgatcaatgcagtccactaaccagacatcccagtttaaataagaagtggcagtgagtacaggtaatatctatcagtgtagatacatcaggcttaatagtagaagttaggacttttttcttcatatacagttagctctgctataacatatgtgctcctaaaagtcagcacgtgatgcaaaattatgcagttaaaaaccatagagggtaggcacgttggtttgtgataccagcactttgagaggctgaagtgggaggattatttgagcccaagagttcgagaccagcctgggcaaagcaagaccctgtctctacgaaataaaaagattagctgggcctcgtggcatgcacttgttttcctagctacttgggaggctgaggcaggggtatcacttgaacccaagaatcagaggctgtagtgagctatgatcacaccaccacactccagctcgggcaacagagcaagactctgtctttaaaaaaataaaaagaaaaatatgttaaaaggataaaaaccacagggcttgtggggaaaagtgagtaggaatgtaatactaaaaatatttgtcaatgacacattaaaaaggaacctaataatgatagcagttttacacatgttaaatgattacgaaatagataacactacagtaaatatggcattttctcttgagaagacctgaagtttgcttgtggaagcaggtgtcagaagttggagcttgtgagtattactgtgaactggtgcatggagggctatctgaaatcagatgggagttgtaactccagatgttgacggtgtagcctattaatacattgtaaactgaggaggttgctagatgcctgtgggttttgtgcattcttgtgtaactaggtttagctgggggaagtcttctgtgttcatctagtgtttctcacagacaaaatcacgcataagcaaatagaattcccattatgctcacatcgtccgcttctatatcaatagcattggaacaaatttgcattttcaaagcaagcattaccgcagaactgactgtagtagcttcccagaaaaggtcaacttctcctagacagtacccaaaagtagaagtaaataaattcagtgtaaaacataaaggcccacagcaccattaatatccttgagaaagtggtaagcattatataaatacatttttgcatcctttatatataggttactatattctgggtaagtagagttattgtcagactgcatgcaaataacaggagtgtggggataagtggtccttggctgtattttgtactgatcgggcttgtgtattatctctgaatcacctgctaccttggcattctttcagtagtgcacataagccatcctcagcaccttgatcttatattagcttacaaacagatttgacttcataggtagagcagtataaaataaccatatgttgtgtttctgtattcacccagatctcgtttaagatactctgtaaatgaatcttatattacaaaaataaatgtgagcatgaatatatatgatgctcggaggagaggggtagtcatagaacctgtgactttaagccgggtgcggtggctcactcctgtaatcccagcactttggcaggccaaggtgggtgggtcgcttgagctcaggggttccagaccagcctgggcaacatggtgaaacccgtctctaccaaaaattaaaaaacaaaaatagctgggcatcgtaatgtgtgcctgtagtcccagctactcgggaggttgaggtgggaggattgcttgagcctgggaggtggaggctgcagtgagctgagattgtgtcactgcacttcagcctgggcaacagagtgagaccctgtttcattaaaaaataaataatagtaaagaatctgtgactttaacaggttgggtagacgaaaaagcctggagggcctatagatgatcttgtggaggggtctatgaaacccagaaattgcaatacaaatttttgtcctaagtgcattttgaagggaaagggtcctcagctttcatcatgttcctaaagggacctttgtgaaatggtggagaaatgctgaatttttttaaaaaatccatggaatatatattcctgtcagtcatttagggaaatttagagtgatctatagtggatcctggtccattgattccatacaggggagctattatagtttcttcaagaagcactcctggctggcaccctcagccacagcaggaactggcttcgccattgggtcggcctcgcatgtcatctttgatgcttcctgtaaattagccacatgagtgatgaaggtcttcctttctaacaggggcctatgcctttccactgtgtgtctcatgctacccttgactttatttttcagatgggaacagcgagagctgcccaacggacgtgtctattatgttgaccacaataccaagaccaccacctgggagcggccccttcctccagggtaggtcatcaactgagaagacctgagactctggaactgacaccatgagtcacccaatggcttcttgaaacggtccctttctgcggaggtagcatagcacagtgacgtttattccgggtcacttgattgcttttcctatccacttaccttaatattgctcccatgtcttaggacatattagaattattagaagatctctgggaaacaaaaggcgcatgggaggccaagatttagagtgttgatgcattccgccgtaccctatgcccagcctgtccctaaaggcagagtgcttcttattcggcagggcttcgtgagaatgccgccaagttatccaaaaccaaaggatgagagaggcttccaagagagggaagactgtccaagttcaaggagaaggggtttggttccctgtctgccagggacagaaagttctttccacatgtgtctcctggtcccgagagctttcaaaaggggatgtattctgctccaagaaagaatcacctcccagtaaagtagccatgaagggctcctgtataaaatatgcacacttcccctgccctgagtttgtggagggaaaggctgtcggaagtagggactcttaggagagcccgtgtgccctgtttggttcagctgtcaggcgtgtgccacacacatcccacctcatcttctggtcccataattctccatggatgggctgcttttagctccagttttccagtagaatgcttgagttttccttttttccgtacctcctggaggatgaaactcataacctgtcatcatcagtactcactgtgttttccactttgacttgaagtcaaatgaagttaccaaagttaaacatggacttctcaaattagaaaaaaacaaacaacaaaaaaacaggttaagtgttttgttatgaaaattatgaaaatgttcttattattatggaaaatttcaaatagatatagagagaataatgttacaaacccccacatactcaacatttagcttcaaaaattatcaactcatggcgggttttgtttcatctgtacaaactagtcggcacactatgatggcctgtggacaaaatccggccctctgactgtttttgtaaataaggttttattggaacacagccacacatatttgttgacttattgtttttggctgtttttgtacttcattggcagagttgagtaattgcagcagactctatggcttgcaaaacctaaaataattactttgtgtagcgctttatagaaaaaatttgctaactcccgatctgtaacccccaacctatccgccgcaccctgatctaggtaattttgaagcaaatcccaaatgtcacatcatctatccatatttcactatgtatttctaaaacatattcttttattcaaaataaaactctaatatcattaacagtattttgtttatattatcaaatacccagtcaatatttgactttctataattgtgtcacaaattaaacattgactttaacagtatgtattacacacttgtactttgtgtactttataacatgtgcactttaaaacagcaggagctctgtgtactgtggcttttttttttttagacggagtctcgctctgttgcccaggctggagtgcagtggtgcaatctccagctcactgcaacctccacctcctgggttcaagcgattctcctgtctcagcctcctaagtagctgggattacaggcgcccgccactatgcccaactaattttttgtatttttagtagagacagggtttcaccattttggccaggctggtcttgaactcttgaccttgtgattcgcctgcctttgcctcccaaagtgctgggattacagatgtgagccactgcgcccagcctactgtggcttcttcttaacctctcttgtctaggagggacgtaggccttgacccagtgagcatttgcatggaatttaagtaaagatattcagtggtaccttctaaggatcgctggggacttgctctcctctaggtgttgaggtgggacactactaatcaagctgtcttatttcagggtagttttcatgttttcctgggagatggctcacctgtacgccctgcatagcttactagtccttcctgagttttaggtcaagaactttgagcctctagctctcatttctgctctgtaatcacaggggatccagagagaacagaatgaatgcttaagctttcatttctcattaatggcagaagtcctgcctccagggaagtattaaccatggtgaaaacaattttgaaactacagatggagccatgatctcaacagacctagtccctggggagcaagattgaaccaccgattcacttaatcatggccgtccctgcataggaaacccacaggaaacttgtatgagaatgggtccttctatccgggagcaataagtattggacctagtagctcagggtgaatgcatccatttgctcatcagtcactcttaagcagtgttcagaccacaggtaagcaaagagtgatcactgtgaaacaagaggattgaggaggcctcacagagggaagtggctccaactcttgcaagaagatgatccaggttggggggacagtggaggtggctgcctgcatatgggaagggaaaggatgtgtttggggaaggatgcatggggtggttatgctggagtggaagggttgtatgaagtaaagaagtccaagtgtgcccggtggggctctcaggtttgggggagatgcccaccagagccaaagagggtggaagggctgactgggcctccagtcactgttctgtgcaagatttcaactgaaataaagagtgcaatcgtgcttcttagaagtggaaattcaccacagcagagtacttttagttaaacatgtggcttgaacatgtgtttatttctattcttcctgaaaacccactaaaatagtaataaaagtattaaaaaggcataaaccttcaacaataaagggatggaagaggagaaacagcatatgggagatgttaatcaaagtttagtttctgatagataaatggcagagccgagagaatgaaacccacacctgcaggatgaggaatccaccaggaagccggctgatgtgcaccatggggctctggaaagcctcagcgattagaggcaccaaggatgggtgtggaatgagattaaaaccttggctgggctcggttgctcacgcctgtaatcccagcactttgggaggccgaggcaggtggatcatgaagtcaggagattgagaccatcctggctaacacggtgaaaccccatctgtactaaaaatacaaaaaattagccaggcatggtggcacacacctgtagtcccagctgcttgggaggctgaggcaggagaattgtttgaaccccagcggcggaggttacagtgagctgagattgcaccactgcaccactctagcctggacgacagagcgagactccatctcaaaaaaaaacaaaacaaaacctcattggttttagatcagttggaagatgagttggaagtttgtgcagggagttagattcacacacacacacacacacacacacacacacacacacacacagcctcatgactgcctctgacattgagaagctgcagagagagtaggaggaccaggtcgggggacacaaactatagctgaaggccaggatgaactcagaaacaagagattaaatgcggatgctatctccattccccaggctgaaaattggagggtagttttgtttgtttgtttgtttgtttttgctggggaaagtgatagtctaagagaaagaaacatagattgtgatatttgggaaccttctagtgaaatagctgagactcttcctggtcactctacagtctgcagccctcatctgaggatacagaactcagtcagtgttttagtggctcactgttaaatgcgaatgaacacagctgggcacggtggctcacacctgtaatagtagaacttccagaggccaaggcaggaggatctggaagtagaacttccagaggccaaggtgggaggatcgcttgagtccaggagttcgagactagcctgggcaacatatggagaaccagtctctacaaaacaaaaaaaaaaaaaaaaaaaaaaaaaaaaaaaaatatatatatatatatatatatatatatatatatatatattttttttttttttttttttttttttttttttttttttttttttttgagacagaatttttgctctcgttgcccaggctggagtgcagtggcgcaatctcggctcactgcaacctccacctcccaggttcaagcgattctcctgcctcagcctcctaagtagttggggttacaggcacatgccaccacgcccagctaattcttgtaattttttttttaaagtagagatggggtttcaccatgttggccaggctggtctcgaactcctgacatcaggtgagccacccacctcggcctcccaaagtggtgggattacaggcgtgagccaccacgcccagccaaaaaaaagttttttttaaattagctgagtgtggtggtgtatgcctgtgttcccagctacttgggaggctgaggtgggagaatcagttgggcctggaaggttgaggctgcagtgagccgtgattgtgccactgcgctccagcctgggtgacagagcaagaccctgtctcaaaaaattataataataaataaaaataaatgtgaacaaacagccaaagatgagcagacagaaaaaagagacttggtgaaaacaatataggaagctgaaaaacagctttggaaaggaaaaccagattataattgatatcctcaaagatttgggagaaaataatggcatctgtgcaacaagaacaggaggccatgaaatggaccaggcagaaaacaggagcttttagaaattaatatatatgacaacagaaatgaaaaattcagtagaatggttgaaaggtaaatttgggctgagcatggtggctcacgcatgtaatcccagcactttgggagggcgaggcaggtggatcacctgagatcagaagttcgagaccagcctggccaacatggtgaaacccccgtctctactaaaaatataaaaaattagccaggcgtggtggtgcttgcctataatcccagctactcgcgaggctgaggaaggagaatcgcttgaacctgggaggcagaggttgcagtgaactgagatcacaccattgcactccagcctgggcgacagagcgagactctgtctcaaaaaaaaaaaaaaaaaaaaaaaaaaaaagaaagtgataaatttggagataagaagatgagaagatgtgaccaagacattcaatatctgaagaatagttctttagcaagaacttgcggaatagcaggaaagaacagagaaacaggcaataggaaatcattagaaaagaaaattgccagaactcaagtatccagattcaaacagctcaccacacgcctagcccagaggataaaaaaagactcaccccaaggctcatctgattgaatttctgagtgccaagagacagcctcagaaacttccagagggaaaaaacagagtacctagaaaggatcaggaaccaagagtgccatccttcttctcagctgtagagcaggaccttcacaattccgatggaaaatgatttcctgccgggcacagtggctcaaacgtctaatcccagcactttggggggccaaggcaggaggatcgtttgagtccaggagttcaagaccagcctgggcaacacagtgagacactatctcttagaaaaacaaaaaattggccccgcatggtggtgcgtgcctgtagtcctagctacttgggaggctgaggtgggaggatcacttgagctgggaggtcgaggctgcagtgagccatgatcatgccactgcactccagcctgggcaacagagcaagaccctgtctcaaagaaacaaaaaagaaaatgatttcctgtctagaaatcaactttgagttattttaacatttgaatatgagagtagaagtcaaggcatcttcagacattctgggcttcaaaaaattaaccttgatacatcctgtcttggaagctactccatgatttatcgcaccaaatcccaccaggaagccaagaaagaagaatgaatgggatgcaagacacagggaacttaaccccgaggccatggaatctcccaggaggaggagaagggaaggcaagtcaggtcaaggacacagagcgggtgtgagatggacacacaactgtccccgtcagatgagggagagatgtggccgagagaggaaggccactgccaggccacctgtcccgtctgagaatctggggatgcatcagtgataggttcttgaaaaccacacagaagacgacaaggaagttctcacctccagaaaaaagaaaaaagttgttacaagtaaggaaatgtacttatagtattctacattgtcatccaaaccctgaatattgatttaacggtgagtttccatattgagaggacgaggggaggagatagttgagggatggaatgcaatacctatatcctcatccctcatctttggtagtggaaagtccataagcgatagcaaatatggcaaaaatcaagaaataatgagccaggcttggtggtgcacacctgagactactcagctactcaggaggctgaggctggaggatagtttgagcccagcagttcaaatccagtttgggcaacatagtgagatcctgtctctgtattaaagaaaagacaaaaagcaatgaaatagacatgttatttagagacacagatgtacacatatactagtagaagcaattgagagttgaaagtggttgccttcggggaacaggagtcagcaatggggcaagagaccatcgtttttcattatattccctgcagtcctgtttatgtttcaaaactatatacatatgacttcgggccgggtgcaggggctcacacctgtaatcctagcactttgggaggctgaggcgagaggattgcttgagcccaggagtttgagactagcctgagccacacggggaggcttccatgtctacaaaaatttttttaaaaaattagttgaatgtgatggtgcattcctgtggtcctagctattcaggaggctaaggtgggaggatcacttgagcctgggaggtgaggctgcagtgagccatgatcctgctactctactctagcctggactaacagagtgagaccctgtcaaaaaaaaaaaaaaatctttggtaacaaaaataaataaaaatcactagtttagacaaattatgagaaagctaggaaggttccagatttttgtgagccttgtgtacttactaaaggattttgactcaagggcaatggggagtcaatggaagtgttgttgttgttgttgttgttgtttgagacaggatctcactctgtcgcccaggctggaatgtagcagcataatcatagttcactgtagccttgatctcccaggcacaagcagtcctcccacctcagctgcccaagtagctgggaccaagggcgcacactccaccacccccagctaatttttaaaaaatatttttgtagagatgggggtctccctctgttgcttaggctggtcaattgaagtttttgagcaggagtgtgaccgaagggctcagtctagtgggttactctgatggctatttgtaggctggatggagtggggaggttaattctggggtaggagcagtagtccaggggtgaggtgatacagatctggacataggaatggaaaatggaaagtcagtggcagggagactgaaaaagcagcagtcaggctgaatgattgatagcagcgggaatgatgttggcctggtttcatccctgggaggagaattgacatgaggagactgaagaaaggcctgggtgtggggagagagctgtggcattcaattgaatgaagggtgacagctggtcatgaaggtgaggcactctagcaggcagaatccagacaaaatctgggaactgactgtgggtcctaggaaccacttgaggggaaaccatttttagggaggccttgagtttaaaaaaaaatcattgaggccgggtgcagtggctcacgcctgtaatctcagcactttgggaggccgaggtgggaggatcgtttgagtccaggagttcgagaccagtctgggcaacatggcgaaactccatctctactaaaaatataaacagtgagactctgtctcaaaacaaaacaaaaccaaagaccatgcaacatgtttacactggcaccttatatcaggtgagtttcagttgcaagtaacaaaagttgttagcaacattggcttaaataaggaagggaatgtattggctcatgtaactgaaaattctagatatcaatcctgattccaagcgaagcttgggctactcaacaatatcaccaaggaattggcttttctcccatttttctgctctgccatccactgggtcaacttcctattgtcttcgggtccaaaataatagccagtggcccccaggaccacatgcttcctcagtcatattcagaaaggatgagcaactattatttttcctagatttgctagcagatgtcctgagattggctgtggctggctcaacatacatcacatgtgcacttctggtccaggcaaccatgcaactctgaggttgggaacagagtcagcttccccagaaccacatggatccccaaattagaaattgagagctaatggcaaggagggattgggtgctgcagaggcaaccacagatgtctgctataatcagctaagccccagcaacctctgtgacagggcctgcccggctgtgctaggcatcctgagacttttctagaattgggggatgggagtggggtggtcattatattcattctgaggttcctatttccagctgggaaaaacgcacagatccccgaggcaggttttactatgtggatcacaatactcggaccaccacctggcagcgtccgaccgcggagtacgtgcgcaactatgagcagtggcagtcgcagcggaatcagctccagggggccatgcagcacttcagccaaagattcctctaccaggtgagagggcaggcgcttggcccgaggtggggccgcctccctgcgcttgcgaatgtgcagccacgtgttctctgttgacctgcttagtgagcagggaaaacagcgtctggcaacgtcagtgctctgcccctggagattttactcatcacagtgaaattcctcaaattccagtgtgcctcactcagcagctccatatctagcctctgtgtttaaggaatcaacgtgtctaaaactgaattccccgtctttcttccgagatcggctttcatttctgcccccttcattcaagtccattttccctgacttgcaccctgacttgctttgacttctcccatccctcacctttccagatgaaagcaatcaccaggcaacatagtgagaccctgtctctaaaaaaaaacaaaaacaaaaacaaaaacctgctactgttttttgttagatctttattatctgacacattctcagggatgaaggatccttgggctcatctagatcagggattggcaaataatagtccatgggccaagctggcctgccacttcattttgttaataaagtttcattgaaacataagaacacccagcagtttacatattaatggtggctgctttcgtggtacaatggtagagttaagtatcacaataaagactgtacagctcagaaatcctaaagtagcctaagcctactgtctgaccctttgctgaaaaagtttgttatctttggtctagctgagcctccttctttctgatgcttgatcatcttctgccccttcccatctgaattgctagagcagcctctaaattgttctctccattggccttctctctcttccaatccatctggcctgttcccctcagagcagtcttcaaacgttactgtcattgcatccatttactggctcaaaaccttttgtggtctttacctaaagagtaacatttaaattttctttttccttttctttcttttttttttttttttgagatggagtcttgctctgttgcccatgctggagtgcagtggcacaatctcggctcactgcaacctctgtctcctaggttcaagcaattctcctgccccagcctcccaagtagctgggattacaggtgcccaccaccacacccggctaatttttgtatttttagtagagatggggttttgccatgttggccaggctggtcttgaactcctgacctcaagtgacctgccctcctcggcctcccaaagtgctgggattacaagcatgagccaccatccccgaccacatttaaattttcttttcttttcttatttcttttttttaagatggagttttgctcttgttgcccaagctggagtgcaatggcatgatctcagctcactgtaacctccactgcccgggttcaagcaattctcctgcctcaccctcccaagtacctgggattacaggcacacgccaccgtgcctggctaattttttgtatttttagtagagacggggtttcaccatgttagtcaggctggtctcgaactcctgacctcaggtaatccgcccaccttggcctcccaaagtgctgggattgcaggtgtgaaccaccatgcctggcccacatttaaattttctcgtccagaattgtgggtgctctggtttcaaactaactgcctaaacagtctcctataccgtgtccctgtgggaaccctcccagttccacctgctggagtctccatcccattagagggtccacagtgagctggaggtggggaagcccagctgcaaagcctctttggtagggagacgtgggactcccaagttggctgattatattttctcagagcactttagatgcgaaggttgggatctacagcagaactaacacaggatatgatggtgcattgcaggctggaaatgttttgagctgggtccctgactttttttttttttttttttttgagacaaggtctcattctgtgtcacccagggtggagtgcagtggcatgatcatggcttattgcagccttgacctcctgggctgaagtgatcctcccacctcagccccctcaagtagctgggactacaggcatgcacagtcacacctggctaattttttgtatttttagtagagatggggttttgccatgttgcccaggctggtcttgaactcctgggctcaagcaatccacctgccttggcctcccaaagtgctgggattacaggtgtgagtcaccacacccagctgatggacccccgacttttaatcatcagccataagtcactgtagcatctcccttggttagttctgtctgtggggatggattgctcattgtacagggaggaaaccatggaggacctcagtttccttagcagaggtgagcagaaagtgtggtgtttgtcttagtaagttgctccagggtcgacgatcatgcccctctccagccagggccccgctgtctagcccagtgcgctctgcacactttcttgggctaggcttcccacccatgcctgccacacatgcctgacatccaattctggcatgtttcagaattggatggaatctggtctttcaccacatttcagagattgctccttttgagctgggcccaaaagattttgcctgccattttcttgggtggttgtggctgcaaaactgggaaggtctggggcatctttcttctttgacctatctgtcctttgacttagagacaaggacgtattttaggagtttcacatggtttttgtctacctgattatccaaaatttctcattaaaaaaaaaaaatggaaccgaatgttgtggtgcacacctgtaattccagcaacttggaagactggcgggtgggaggatcacttgagcccaggagtttgaggctgcagtgacctataatagtgccactgcactccagtctggatgacagtaagatcctgtctcaataaataaataaataaaataaaatgcattaaagcaatttttttttcccttaaaagccccactagttaggttctgtgggttgaccaagatgttggtgtgtgaaagggaagattcccagattctggagctcacatctgcctggtctttttggagtcttccttcctgcctgcctctcttagcaacattattctgggtttatagaggtagaactttgacttggagggttccctagaagtaaaaattaaacactaaaaaattcttctttctgagtactctaaaatggttttctcaggctcgctggggatgtgggagggttctgcatggaggtgatagttaccttttctccatgaaacaaaactcatattgaaaaatgtggcaggaatctttctttggtctgctttcaatgtctctctgttgattttcctccccctctggcattggttttctcctcttgtttgctatggtgccatgtcctggttacaagtaagaagggttgctttcatatagttattttggggtttggcttaggcccagagtttgactcggaagacttaagacccaatactagactagctagcggcctcccctcctcctcttgctgggcttcaactgagaccttgttcttctttgctgcactgcagagaacatgaaatacagttcaaaatggaaatcaagggaatcccagattgcagtctcctgtaattccttcctgctgtctgcctcaacacacaccttctccagttcctctaaattctggttcttagtttttctgccatgtttccctttcccaactcctagtgtgctaatgttgcccgtgatcatcgtgtatcttttcgtttgcttgcttcaccgttgcagtttctttttgccgtcttgtgtcgtgttcctgctgggacccactgaagatgcctggcacagccttgcacattgtgctgttgtgacgggactatcacacggccgacaatttctggggcatctctctctgcagtattgaaacagattattttgactgggcgcggtggctcacgcctgtaatcccagcactttgggaggctgaggcaggcggatcacttgaggtcgggagttcaagaccatcctggccaacatggtgaaaccctgtctctactaaaaatacaaaaattagctgggcgtggtggcgggcacctttagtcccagctacttgggaggctgaggcaggagaatcgcttgaactcgggaggcagaggttggttgtggtgagctgagatcatgccactgcactccagccagagacacagagtgagactccatctcaaaaaaaaaaaaaaaaaggtaaaagaaacagattattttgtggctcttagggtgtggactccaaattgcattatcgagaaacagacaacttgtttcttactctgcaatgagccccttgcattgaattctcaagcacctggattttgttctgcatccgtctggtgcatccttaaaaaaaaaaaaaaatgcctgcgttccacgctgcaacctttatgcccttcccagacctttcttaccctcagctgtatttgctagacattctttatttctgagtttgtatcttaaaatattactggaactttgtgcttagttcccaagggacttgaactctcatgagctctctggctcatggcctgcaccccagatctcccaacccagggaccattacccgggaagaggattccacagtgttcttttctgttcctagtgatagagaacatctaggatctcccttctggctgcagagtcccgctttcccccatctccatccttttctgctccacgtaacaccttgacatctctcattttaggggaatgtggtagaagaggaggggcagccggttggctcattggaggtgtggggtttttggcttttggttttctggccatgatgcatagtttttatttttcatttcttcttgttccttccttctggctttatttttcaagttgtactgcgtaccttagggaagaagtatccaaaatcgtcaagtgcttctatttaacaatgaaaagtaaaattgttgtgaggatcagctcccattgattctgattttattaggttggtgcaaaagtaattgtggtttttgccacgactcttttttttttttgagacggagtctcgctctgttgcccaggttagagtgcagtggcgcaatctcggctcactgcaacctctgcctcctgggtttaagcgattatcctgcctcagcctactgagtagctgggattataggtgcctgccactatgcctggctaatttttgtattttcagtagagacagggtttccccatgttggccaggctggtctcgaactcctgacctcaagtgatccatccgcctcagactcccaaagtgctgggatcaccagcctgagccacggcacccggccgccatgactccacaattacttttgcaccaacctaataaatgttgtttgtgtttatcagtctctggtgtctctccctttcctgtctgcctcctcttctcctcgcttcttataggtgtgtgtgttgggggggtggggggggtgcgttctgatagaataacaaacagaggataccaaggaaattttttaaaaaccctttaacgaaagagagccaacattgcatgaaggctgagattttttttaaaaggcaaggattcagaaaagggctgatcagtattttctgatcctagttcagtgctagtcagggagactgtcagtaaagacctttttggtctgttgatttgtagaattaagcaaaagatgaccatgcccctgtggaagctgggttggtaccagctggtagctgatttcccaggagaaccctgaacgctttacagatgatctactgactccaaaacaagacctgaagcagcaaacacttttacaccaaatgcgtcttcttttaatgtcttaaaataaccttttctatagtccttcccttttgcaaggtcactgctgtagctcagcacttacccagtgcctctggctccatgatgtagaatacgtgtgttttctcatttgttcctttgcctctgttgccgaatgtttttaatgtgttaactacaaaacagagttggaggaacttggattttatgagatgctgtaccctatctcccccaaccccccaacacacagacacacgcccccatgacttggaattcgggagatttttttcagtaatgattcaacgtgatttgtgatggagaattttaggcacagcttgagatcaatgataaggggccctaaatcaaggtgagcttcccccacctccgtgcacttgcattctgtgtgggcaggaggccctgccctgaaagggggctccgtcctgtcaagagcctatggtttcaagacttaaacatctttgttggaacttgcttggaagaggggcctgtgttgccaccttggaaagaaagtttctctgtcctttcagctgggggtggagggagggctgtggaagggggcttgctggcagttgagttccaccaatgttttctcaagccgacactgagccccattcatcctcctgcccatgtgtggctccggcacccctagacggggccagcccagcagcctgaagtccgcatttagaacttgatcccctcttataacgattaaattttagtaagtaaaataaaaatgcttcagaaagaaaaaaaagaaaggaagaaagagtggaacaatacttgttttatttaacgaccagaactttttgacaacaccccccttccccgcaggatatgagaatgcctggtccactgcagtccatccccagggacctcgaagcagaatttggctggagggggtgtgggggggattctaatgtaaacagtgaccctgaagccctggagccagttcccccttctttcccctgtctccccttctgtcttgctgccccacccccagccccaacaccccccaccccccccacccccaccccgagacaaacacagaacactgagcaacttcaggttcaggcaggggaggaataaaggtgctttgtaaaggggaaggaaaacattcctgggggaggtgagggcttggggcatgaatgtgccctcagtctgggtggacgctgcacacccagatgggaggttgggggggacgccgaggtggagggaggagggccgggccccagccaggaagctctgggcgtgggcagggcttgtgggaatgatttcattggaaaggcctgcgatattttttcccctcctgcgtgtggttcttggagaaagttggaggtggtggtgatttcagtcgccttggccgccttgagccggagctgagcggaggcactgggccgagcctgcttcccgggccttcctaccatgccagggctgctccctgcctccgccaccctggcacaccttcacccgcgtaccgcctcctccccgtcgctctgccttttccaaaactcacttgggccctccgtgcgcagggttcttttttggtttttctgtaaaaatcaaaacaaaaaacagagacttttgagaggagcagatgccacctaaagtcccactgcattccctgcaaagcgctcaaatgtggaagccagtcattggcatttttattttttattgattgattgattttttcaccagtggctttttgtaacctctgtgttctgctgtgtttcttgtgtttagtcttcgagtgcttcgactgaccatgatcccctgggccccctccctcctggctggggtaagtactgagttctcttcctggcccttggccttccgtcagccacggtgctctgtcctctcctcccgcgtgtcttccttccctgttcctgtccctctgttttccatctctcccctctccagcacactctctgggcatgccccaccagagcaattacaggtgatggagctgggcagctgggaaagtaaccaagctccaccgaaccactgtagcatccacccaccatcgctaaaggagtgtgaccctaagaaaagatgtccctgagcagctggggggctattggcttttggtcttgagtttcaaggtgtctactcaagagtccatgctaccactaagatattttgacactgcctaactcccaaatggatttgtttcagatctgtgaccgtatggttggaatgatccaccctaacaaatctttctttgcagctgagatgttggaggactttggtctaattttgactaatagaagccacctttttatttctgacatagctgtgaaagaggccagagggaagcagatacgagagttgaatgccaggtggtgactctggaaacgcatcgctgctagttattatcgccgtgtagatttctcctcgcgcttggtagccgcctcttacctatcccaagtccttgatgtgatttgctgacagtgagttaagggatggacatccatgacttaggagagatgataggcttcatggctattctaggaaagagtagccatgcaaaaagggtcattagagatgatgagacttagcgcatttgatagagctggggcagagttttatttaatcttgtgagagtcactgggagcagaagaaagcagtttttgcgggaaccagcatgtgttgggtttcatttattggttaggccagcagaagacggtaaacgttggtttggtggtgttgacagatggtgtgaaactgggagggggtgcgctcgacaacaaagatggagaggtgcatcctgggaagttggcagtgataggatgggcatctgatgcctggaaacatgcaggtttggagctggatcttctcgatgcagacacttctgctctcgggtagttatttaagaggttgtgtcaaccctgttatacctgcagggtaccacttagtcaatgagcactgcagtccagtgtgccagaagggccttctggtccttctgattggagagatcatttagtgaagcttccacacatttgttgatgttcagcttggggatcccttacgcagatagctgccccacatggctccctggaccaaagaaagatcattagtatctcagagattggcagcaactccaatgcgagagagtaaaactctgaagaccctgcgtcgtcagtaggcaggggaaaatgcgtcagattaaacaagaatctgtactgctgtttagtagccagtggcatagaagccggggacttctagtgtatttcaggctctgtagaggcaggtgatgtagcccagtcaagtgggttttcatgccagttctgctgagtgatggtcaccaggtaagcacagctgatggagacttgaaaacagctctcgaatgctaagtgtggaaatatttgagatagaaatggaggagccgtggtcagagtcgatactgttaatgaacgatcagaaaaaaacccacaaaactgtcatagtctagaattaagaggaagaacattctggctaaaggccagggctccttctgaatctcagatccttggggatctgtgttggctgccccagggctgtggctggggccggctccccagggctcaccgagaatgaacaggaagaacagccagaccaagtgagagtgatcggcagcttgctaacccagcctgctggtgtccctctctgctgccccaggagagaccccgcatcttccccacacactgctgtgggactcaggacacctcgggttcagatccacatctgccctcggcagccctgaccctgggcctgtggctgaatatgtctgagtccctttgtcctaaaatgaggtcgagccaggtgttcctggggtctttcccagcccccaactgaaactgaatgccgcgaggcagccagccggccttgggaggcctccacacagcagcagtgccagaaatgacgacacaggcctcaagcccgctggacagatccccctggccctgtggttagccttggctttggcccttaacagggcagacgtggaggatctagttcaaagcagtagcttcggggctgggagcagcccctcccctggaaacctcttgggaagccttccttctgtgtgttctgaggtggtggtagctctgtaacagctctgggcacctcctgttctttctttcctttggctttcttttatttattttttatttacaaaatagagatgaagtctcgctgtgttgcccaggctggtctcgaactcctgggctcgagcgatcctcctgcctcagcctcccaaagtgctgggattacaggcgtgatccaccgtgcccagcctgtctttatttttattttatttatttgtttttccagctttactgaggtatgattgacaaataatgtctgtttgtaaaatttcagtcgagtcatagataccaggtaaggcagagagtgggagggagactgaggccttggtctggtgttgggagcactgcagctcgagtcttggagtcaggagggggttgttgcacttccctgttctgctcctttttcagctttctggttccctgtagcttctggaactgattatttttgtttctttaatgctgccctgtcttgtaaaaggagagccattagcatcatttgttttcaggagagaagcagatttgaaggctcaggaacttcctgggaaaggtgacctcttttgagccaagagctttaccccctagttttttgttttttttttctcctgtctacctggagctgagaggttatccctttcaatccctctcaaggtccagaatcaccagctagggttgggtctgcccctggagcacagactcctcccttggggaccccagagcccttatcagtatatcagtaaagggcaagagaacagagattgttcagagcagaggaaaagtgtatttgttccccagccccactccatgaacattcccctgtctcaaagcacatacttaggcctaagaacaggataggcaggccaggcacggtggcttattgcctgtaatcccagtactttgggaggctgaggcgggaggatcacttgaggccaggagttcgagaccagccaggacaacatagcgagaccctgtctttatataaaaaagaaaaaaaagatacaagtctaagaagaggctgggcagtgtaagtgtcctcagccccagatatcatttatttgcttataagcaagaaagaggcgtgccagggtatgagagttttagaacaagacttagcctgtaagtgggagaagagggagaacttggagggtacaggggcgcagggtgcagagcactgatcagagaggtgcgagggaaatgcagccactccataaggaccacgccctgtaggacagaggcgcccaggttagctgcatgcagtgcagagggtcccaggaccagggatcagctgtgagggacttgggtggggggcctggcgggttagggactgcccggcttccatgctgcacacagctgggagcaattatgcctctggtttgagctgtgctgctccctctgggtggccacaccaccccctccctccgaccaatcaaccaaagaagtgcttcatctcgagttggaagtatgtcacccccgccccccaccaccaacaaggaaggaccctctttgtccctttcccagtgacaagtgtgagtgagcttggctttggctggttcttctctaacaggctgacaacagggagataaactcagacccagcacccaggaggtgggaacctcagggaaaggacaccggctctccgtgtttgaatctgatgttctttctttcttctcatgtggcagagaagagacaggacaatggacgggtgtattacgtgaaccataacactcgcacgacccagtgggaggatccccggacccaggggtaaggacttgggctgagaggggggccgggctgggctgggtctctgtgcagctccagcactgggcaggtggctttggactgcatcgtcccagagggctgatgtcagggacctttagccacacacaagtgtcttgagactctcaccgtacagatacactgttggcctgatgagagcttaaaaggggtttcttaaatagaccttcctggtggatggagggcggcccggctggcgggtgttgctggtctccatactgattgtgctggctgctgataattggattgcaaaaaggttgagggcatcctggtctcccaacacccccaagtgaagctgtgctggggcacagggtgcctcaggattgctggtggctgctcagtccaatgccatccatgcagggctgggtttttggccatgagataataagtgacctctccgtgctgcagaactgttctcacgacttgggtcatgcttcttgggtgcatgtcctcaaagtccctcatgggctctgcagagacaaagccacactttgaggacccagcctccaaccaccaaggtccagaaggtggggccagcccttcacccttttcttcccgtgtttccaggatgatccaggaaccagctctgcccccaggatgggagatgaaatacaccagcgagggggtgcgatactttgtggaccacaatacccgcaccaccacctttaaggatcctcgcccggggtttgagtcggggtaaggactttgtgcaggtagcagcagtgtcaggagccgaggcccaggctgtccttgttctggctctgggaggcccactttgggtggcccctgtggtgcgttctactgcccttactgccctctagtggccaatgttgatgtcatattaaaggggatgggaggatagcttgagcccaggagtttgagaccagcctggacaacatagcgagaccgtgtctccacaacaataaaaaagattaaccaggctgagaaaaatggcaagaccccatctctacaaaaaaaaattaaaaattagctggatgtggtggtgcatgcctgtagtcccagctacataggaggctgaggtgggaggatcccttgagctcaggagtttgaggctgcagtgagctatgatggcaccactgcactccagctcaggtgacagagtgagtccctgtttctaaaaaataataatacatttaaaattagctcggtgtggtagcacactcctgtagtcctagctacttggaaagctaaagcgggaggatcgcttaagaccaggaattcgaggccgcagtgagccatgatcacaccactgcactgcagcctgggtgacagagcaagaccccgtctctagaaaacgaacaaacaaataaataagatgggatggggaggaagggactatcctgtttattccgaatgacactagagttatttctctaaaagcaagaagtctggctttatttctagattttcttttttattcttcaaggatcttaatgacagtcacttcctcaccttacattactaatctttaaattaacatagcaccagctttccttagggctgacaaagacaaattgttcattttctgagaaatcgcatgaacccctgaacatctttgctcttcctaggacgaagcaaggttcccctggtgcttatgaccgcagttttcggtggaagtatcaccagttccgtttcctctgccatgtgagttctggtactggggctcccgtggcagttggggttattgagttatttcagtgtgagttcccggcacagcagcaggtatcggaatgtttgtgtcttaggcgggcgcaagacacttgtctaacccggagctggctgtctctaggaagctagttttcattcctagggcacatgctattgcctcctggcccagcaggctggggaatgcctgttcatacagacaggagaacagatgaccacttgaggctcgatttaaagttcttttcttttttttttttcagtcaaatgccctacctagccacgtgaagatcagcgtttccaggcagacgcttttcgaagattccttccaacaggttagatcatggtgcccgaaaccagtggcaggccgacgccctcctcccagcaccccatctcctatcgcgtggcctgttaaacccacactgcagactttccagggcgtgagtcttggtgactgtgtctgctggatattgggccttagagtcccctgtccctcccgcccctgcctgctgtggaagggagagtggcaggctggcccgatgctctgtcttcccagatcatgaacatgaaaccctatgacctgcgccgccggctctacatcatcatgcgtggcgaggagggcctggactatgggggcatcgccaggtgagcttgagtgccccggaaggctgccctgtaccccgcttccccaggctacagcatcaatggccagaaagctgcctgccccctgctcacattccctcccaaagctctcatgcatcttcaggaatgggcacagtgtggcattcaaaatacgtgaacccgccaggcgcggtggctcacgcctataatcccagcactttgggaggctgaggcaggtggatcacctgaggtcgggggttcgagaccagcctgaccaacatggagaaaccccgtctctattaaaaatacacaattagctgggcgtggtggtgcatgcctgtaatcccagctcctggggaggctgaggcgggagaatcgcttgaacctgggaggcaggaggttgcagtgagccgagatcgtgccattgcactccatcctgggcaacaagagcgaaactccatctcaaaaacaaaacaaacaaaaaaacaaaatacgtgaatccatgtggccagtccattgggcctggaacaggggcctggggtgccccactgggctggacattaagcctttagttactgggtcatgaggcgacggaggactcctgggaggggcgagagctcagtacaatggctctgttatctaccaatgtgtcatgtttctgtactttaacaaccaggccagcagcatctgggcagttgaatataggggccatgtggtcatccattagagttgaccctgggatcccctcctcttaaggcagccagggcaggtgaagtcaggtgtccccgtgtggataagctgtgtcacgatccacagggccttgagcagggctcaactgcatgtcacatgcctggggtcagtaaaactgtaacggcttatgtcaccctaaaaagagtccaaagcattgtcttgccttcaccctggtccacccataaaagttaacaggccctctgggaaatgctgccttggacagcagggcagaagggccccggcagagagagagagcgctgtggcccgcagcgacctctccgctcgagacctctcccggtgtgggcatgtcttcccgcttggtgttgggttaacttgcttctggtcctctgttcggtggtggcgttgccttctgcgctggccccgtggatggatgttccttttttccgtggtgacctcctctccaggctctgcttggtgggcttctggtgtggccgcgccctgtgtgtgtctctctctgtgtcctgccagtggttttaccctatggtaggttacgtcatgctgttctaccacagggtagaaccacggacaggataccggggcaccctctgcgtcgacggactcctcgtctgcccagccacaaacagcccagcagctggggactggcccccttgggacatccccttgctggtttagctcaagcccaaaaggactctgaattcatgcctgaggctcgcacccagggcacgggtgttggttcagatgaatgcgtggaagtgtgggaacggggatggtgttggggtctgggggtgaagggagggcaaagtgcaagagtgttgcatagctggtgggcatgaggtttctcatctgaaggcagcatggattacattgtcatggatcggggttggaaatgtgttgctgtgtatttacgttatgttgcccgcccaggtagagtggaaacagggtagttactattcaaacagaacctttgcagaaaaattattgtaataaacatgcatcgtgcccttgtgcagtgcacagcctaggcaactgagcatggtgacccagggtacaaggaccccctttaccattagaagctctggatattgtgatgtaaagtcttggaacacatcacctgggagccgacaatcacacgttttcccaaatatcatcctcaaatgcagttgccgccctggttcactgtaggtctgagcctgccctgttcactgaccagctgttcatataggttagcccgggtgcttgtcacagggctcgactccctgggacacgtgtccccatactaacctgagacacgatggtgaagagacacagctcctgtgcagatgtgcacgaagggacccattattcttgtcttttctgtctcttccctcacagagagtggtttttcctcctgtctcatgaggtgctcaaccctatgtattgtttatttgaatatgccggaaagaacaattactgcctgcagatcaaccccgcctcctccatcaacccggaccacctcacctactttcgctttataggcagattcatcgccatggtaagggggccccaggggtctgcctagttccctcctcctctccctcctcttccctctcctggtgaagtgtgccaggggcaccaggggaatctgctctttctctgagacctccaggaaggggcagcattggaggaggccctgggcctgttcaccaggaggcagcgtggcgtgaacggcagcccccgtggactggctcaccctctcggggctccaccctttgcccccatagagctcgtaacctaaaaatgcaagaagctagagagagttctggagaaaccagagctttctcagtggctgccctgtaggtagtgaagagtttccatgttgctttgtacaggacttgtcaagagggagcccagggtcgctgggccacagactttactgaacattaaatatgtgctctgttgagggccttgggatgacagggccaggtgaaaccatagctgcccacctgctgcctgtctctgggaggtgacactgtcacggcatttgggaatgtcccactgagacactaagccttctggaagggcatttggaatcaacactagtgtagaacaaaacgtaaagtctgtggcccagagaccctgggccccctcttgacaagtcctatgcaaagcaacatggaaactcttcagtacctacagggcagccactgagaaagctctggtttctccagaactatctccagctttttacatttttaggttaccagctctatgggggcgaagggtagagcccagagagggcgcgccagtccatgggcgctgccgttcacgccacgctgcctcctggtgaacagtagactggctggtgcagggtgtagggacatctgtcagaaagtgagccagttctggggaggggcgtcccagcgtctgtatttaactggaaagagggacacaatgtgaatatggaaagggaggtcctgccacgtgccccgttgagggtcctgggagcgtggagaacccggattgagaagcggagcccgtgggaggcacagcgcgggagccacatgcatagctggagatgtttcaattctcctttccttcgcttcttcccctgccttcctgagtgtcccacccggctcccctcttaggaggacccaagcgccccatgagcctgtgactaaatatggccggcccttcccatcgtcgaggagttcttggccaaggtgctgggctctggaaatgggcacattcttcccaggtctagagacccgcctggcccagcagccagcaggacagaccggtaaaaccctagactattactcaccattggccgccagctctcgctgtcggcggtgtctgcattatttttggctgcctttgccacccaccctgagcgccagtgaatcagggctgccacctgcagctgttcagagcaagccttttctgtgagcgtggggcagacctttgctaggccaggagccagccggccagcgtgcggggcagatgcgggcccggacgtgggttcccgcaccagctggctctgcccagtccttgcggtctgcagggcagggtgggagtccctctgtaggtacaagtcaggataaaggcgttgtttactcctgaggccctcccgctgcgtccgaggcagctgctgctgtagttctgtcagggaaggaaggcgggtagcggtagcagagtttgataccgagcatctgagagctggtcttggcagtgcccagggaaggccaaacctctgtgctgtgcctcttccttcccaggcgctgtaccatggaaagttcatcgacacgggcttcaccctccctttctacaagcggatgctcaataagagaccaaccctgaaagacctggagtccattgaccctgagttctacaactccattgtctggatcaagtgagttccctgcccccttgccccaccgcgctgataggagggacgtctctgggtgggaagcaggtactgatggcctttattttgtctgccagtgtggcccctgagctcttttccagcctctataagagcttgtggagaggaatgtcctctgggttccctggggacagttctagaaccttctccttgagtcaaggagctgtcccctgtcactgttcaggattctaggccacctgtgggcccttggtgtcccacgggcaacagagcaggatccaggaaagaccctgacacggtagacatctccccacttggtctcctgtgcccccagagagaacaacctggaagaatgtggcctggagctgtacttcatccaggacatggagatactgggcaaggtgacgacccacgagctgaaggagggcggcgagagcatccgggtcacagaggagaacaaggaagagtacatcatgtgagtctcaggcgccgggggctccgctccaggggtggcgtggagatctagtgggttgcagagaaagatgggcccccacctgtggcccatcggtcactgtggatgccatttgcatttgccttgatggtggctgctggtgggcggtcatgtgatggcgcgagctgggggaaccaaagccgaggtccttagttaccgactcccagctgtgctttttcgccatgtgggagacttcaagcctgcagcgtggaatttctttgaagtggcatcaagctgagacatctgcatctttctccgggccgaaaggatctctgtggcctgtgtgcctagacccaccgtctcacgtgtgcccgttctccgtgcctgttcctcaggcctcttgctttagtctttatctccacgcttccatacgtctgaggttcagtcggcgctgggggcaggagcaggaggaggtggtggtgaggatgatttcaaagactccggtgtctgcaggtcactgtgaggttttcagggcctcactctaggtcctccagcaggctgggtctgggtgtgcgaagtgggctctgctgatctggtggtcctgcgcggtaacggccacgcggcctggccgggagccacccctgagcagtgggtctcagactccacccatggctgctctttggtctcaggctgctgactgactggcgtttcacccgaggcgtggaagagcagaccaaagccttcctggatggcttcaacgaggtggccccgctggagtggctgcgctactttgacgagaaagagctggaggtgagtgtctgaggttgctgggaccctgagcccctgcctctggggcgatcctgctctgtgatacgctcactgtgtacccacagacactcagcgtaaaactcccacttcggcagggcagatgggtttgatttgggacccacccttccccagacacttgtttcaagaaagcagggacttacattacccatattattaacgctgacaccaaaaatagctagttgaatatgtttggggtaatgtcaagtgctagcgagtggacgatgcgcggggagggacctgccggggatgctgactgccgcctctccccagctgatgctgtgcggcatgcaggagatagacatgagcgactggcagaagagcaccatctaccggcactacaccaagaacagcaagcagatccagtggttctggcaggtgggtcccgggcccaggccttggcagggacatttgggccatcaaccaaaggaaacgggtcctgaggaggcctcacgcgcaaggaccttcagctttggccctgtccttgcctcccacaccttgcaaaaggagacgatagaccagccttgggatgaacggggacagttccagctgagtggtggccagtggatgtgacaggaggtcgtcagtggtcagccttgggccagctggtgtgcagggacagacctgcaggcagacagcagctgccactggttgagaggtcccctgccagccagatgggacaggaaggcaggggcttggctccagaaaccagaaagagctgtcatcctatgtataattaatgtgttgattcttttatacgtatgggttttgttgttgtcgttatgaaatacagcatacaaaaaaaaatagcgattacaggtattcttagtacatgtctgtgtgcatatgtacgtatacaaattttttgtggaggtgaaatttgtataacatacaattaactattaattttttttttttcaatagagacagggtcttgctatggtgcccagcctggtcctgaactcctgggctcaagcagtccttccatctcaccctcccaaagtgctgggattacaggcgtgagccactgtgcccaacccatttaagttttttaagatacacaattcagtggctttccactttgggttccttggcttcccacccaggccgaggtgggcagatcacttgaggtcaggagttcaagaccagcctggccaaaatagtgaaaccctctttctactaacaatataaaaaattagccaggcatggtggtggacacctgtaatcccagctactcgggaagctgatgcatgagaatcacttgaacctgggaggtggagactgcagtgagctggaccgtgccactgctctgcagtgagctggaccgtgccactgcactccagcctgggcgacagagcagtggcttccagtacattcacagtgttgtgcacctggcaccactatctaattctggaacatttcatctccccaaaaaccttatacccattaagcagtcactcccatatttagtcatctctaaaagcagaacgtggatgggaagagaatacccagcctgaggtgtccctgagacccagagatgtcccatggactggtgggaatctcatgcacacacagcctcttagcaaaagcacttctggggtttctcaggttggaggctgtcatcccctggccaacctggctttgtgttctcagccccaaagaggggccccgctgagctagagagctccacgttcgggcaaagtactgggccccgtgggttgcctgactgtgccttgacttgcggacttccaggtggtgaaggagatggacaacgagaagaggatccggctgctgcagtttgtcaccggtacctgccgcctgcccgtcgggggatttgccgaactcatcggtatgttttctctcgccctctggcgtcctggctggcagtgcggacagctcagagggagggggaaacctagtctcttcctggaagcacgtcagtgggatggagaagagctgtggcctctgcatcctggggccgagcccatctgtgggtggagccggaggatcctgctttgggaagggacgtctctgctgacgtcggcgtgttttaccttggatcacaggtagcaacggaccacagaagttttgcattgacaaagttggcaaggaaacctggctgcccagaagccacacctggtgagcctgctggttttagtgggaggtcggggggcctcagacccgatgagctcctgggacagcccagtgggtgtagcagcttcatagcctcgagtctggcagcttttgcgtggccctggggtgttgggttggagagatggggctgtgatgggcatctgatctaccgggttttacatatgaagcacttctgttccagtagtccaagagctactgccccaagtgtcccccgcaaccaatttccagctgtcctggcccctcccttaacaccccatggtccaggcacctgcaatgtgaaggcctgactggcagcccctgagccctagccagtgtggtgcaagccctgtggccctgctgcaggcaggcatggtggggctatcagagccctggcctcctagggctgactgtcgtgcttccccactctcaatagcttcaaccgtctggatcttccaccctacaagagctacgaacagctgagagagaagctgctgtatgccattgaggagaccgagggctttggacaggagtaaccgaggccgcccctcccacgccccccagcgcacatgtagtcctgagtcctccctgcctgagaggccactggccccgcagcccttgggaggcccccgtggatgtggccctgtgtgggaccacactgtcatctcgctgctggcagaaaagcctgatcccaggaggccctgcagttcccccgacccgcggatggcagtctggaataaagccccctagttgcctttggccccacctttgcaaagttccagagggctgaccctctctgcaaaactctcccctgtcctctagaccccaccctgggtgtatgtgagtgtgcaagggaaggtgttgcatccccaggggctgccgcagaggccggagacctcctggactagttcggcgaggagactggccactgggggtggctgttcgggactgagagcgccaagggtctttgccagcaaaggaggttctgcctgtaattgagcctctctgatgatggagatgaagtgaaggtctgagggagcgggccctggggcgaggccatctctgcctgcctccctagcaggcgccagcggtggaggctgagtcgcaggacacatgccggccagttaattcattctcagccaatgaaggtttgtctaagctgcctgggtatccacgggacaaaaacagcaaactccctcagactttgtccatgtataaacttgaagtggttgtgttgtagggttgcaggttttttgttacgctgctgtcactttctgtccaggagctggcaccccaggtgttctgagaccttgagggacccagacctttgggtccaagagtttcccaaacagccacgcctctcaggaacccacctggcggttccgtgagctcaggcaggcctgacccggcggcacagcctggcagggacctcgtccccaagcctggcagaatgagaggggttgaggtcccgagcgccactcctagccttgccgccttcaatagagaagaaatccctttgctagatagggtcccccaggcagtccccagtggcgggacacaggggtccggctgtggagctcccctgccagcccctggagctccaggagggcctgttggtcccctgttcagaatggagtgcagcccgccagcggaaagtgttcattctgcataggtgtgaggctttatctgcacacaggacatgaaaaccagcagaaaggccctgagctgctgcatagccccatctgatttctgcagttcccgccagcctccaacacggggactctgccgtaactggaatcttcataggtcatattgaaatcttcaaggtgaccatgccccaccggggtgctggggcagtagtcatggcagactcccggcctgggcccccaggattctaggacccccaggcagccccttggactggtcccgggtgccttccaagcacagtctccatgctcccagattctcgaccttcccccggcccgggaggtgcagcctgcgtctgcctctgtcgtgtgtgctgatttgagtggcttagcttgccacagcgcagcctcttctgtccctttcagtcatttgctgtacttccctgtggcacgttaccatggaagccgctccagggtgggtcagggtgcaagctgctggtgaggtttggaagcatcaggctcacgggtgttcatgtgtgttcgtgcgtgtgtgtgcgtacgtgtatataactgaagtgtctgtacggaatgccctttgctagccatgggctggtcaccagattgttttgtaatgcccgccccttgcctcgatattgccagtttcttgtgcaataaacaatcagcagctgtgggtggtgttgttgtggatgtttacaaagccacagtcctccagtcaagaggactccgggcctcacagaccctccaggcctggataggggtggaaattccctgacctcgctggttttgagaagcatgtgtgtcatggaccgaggcagcccccgacttctgggctgggcagctgagtcctggcccaggggtcaccggcttcagcccttggtcagctgcctcaccgtaccctttcggcaccctctgcctccgcctgctggacccgggggtctccaagcagttgctgtggggtgcagaacaataacagctacagactgggtgggcttccgaaactggcttgcagggagagtgttccaggcagtcattcatttgggaaatactcaggtttcacaagttccacgacggtcgagggactctgtgatcttgacctcagggtcacgtaagggcttgccacccacttttttttgtttttgacagatcaccatgctggcgggtcttgatgcatttgacaaggaagtgactttgtcatggaccaagcagggccccgactgtgcctccgatgctcagcggggcagacctgttcagagcgagctccctcctgggttcgtcagctggactcactgcctccagctccaaaaccttattttcaggcaacaggccaaggctgtacttggacaaaattactggaaaaggtccagatgtctcatgataaattcaataagacatgccccagtggaaatcgttcccccaacccttgtccccagagggacctactattcacagttggcggtggcatttccagacgcttctgtgcgggtgggcaaatcgtttacacatacgatttttaaatataccaaaaatggaatattgtacacactgcgcaactcacttttttcattaaatgagatgctatggacccctttccatgttcatcgaagtagacactgcttaactctttagccacagtgtgatattctgtatgattgcagttctgtaatatgctcacctccttcctaaaggaggtggcagttgtgtcccacagtttgctggtggctgtggagctccgggaaacgccctcgggcaggtctgtgtgctgctgctgctgctgctctcctgctaggggacggtcctagaagtttgattgttgatcatgcacctttatttttctttaaaaatttggtgaaggttcagttgaaagatgcaaaggagctgctgtgtaaggcttcccttactcttctgtcccttggccaccctgatgccttccaggaggcaaccatcgctgctggcttcttttggatctttccagatatactttaaaaatcccagcggggacaggtgtggtggctcacatctgtaatcccagcactttggggatttttagtagacatagggtttcgccatgttggccaggctggtctcaaactactgacctcagttgatcctcccgcctcggcttcccaaagtgctgggatcacaggcatgagccactgcatgcctggctgtt

SEQ ID NO: 675 - DNA, 24374 bp, Homo sapiens
  source 1..24374: mol_type = genomic DNA
gcgctcggacagctcgaggccttcgggatagagcacgccgcgtttctggcgccggggcaggccggcgatgtccgagtcgtcgaagggcatgcacccggtgaccatgacgtagagcacgacgcccatgctccacacatcgtacttcttggggtcgtaggggatgcccaggagcacctcgggtgacgcgtaggcggctgagccgcagtaggtggtgctcaggtctgggtagccatgggcctggcggccgaagccgaagtcggtgagcttgacgcggcgctcgtccgggctcagcagcacgttttcgcacttgaggtcgcggtgcaccaggtgatgatcgtgcaggtagcgcacggcgccggcgatctgcgcaaagaggtcgcgcgcctgaactccggggatgcgcccgttgcgctgcacggcttgcagcaggtcggtggcggccgcttccatcacgatgtacagtttcccgttgcacacctcgatgaactcgaagacgtgcacgatgtgcgggtgtcgcacgccccgcaggatggacagctctcgcggcaggaacttgttgacgaagtccgggggcgctcgccgccggtccaccaccttgatggccacggtacccttgtacttcttggatgtggccaccttcaccttggagtagctgccctctccaattgtgcggcccagcttataaccgagttcgctcagaagtttgtctcccgacatggtggcgcctagggcgcacggggggcaggaggcggctgctgtcggggggcggccggactccaatctcgggtctaagccatggcgcttggcacctacacccccgcacccccatgtgcccactgccagacattggccgctgttgtgccttttattgccccgtaacaatttttgccttgtgaagtgactgcgggcgtcactccgccttagggtgggggtccgggaccccgccccggggccaccctagcctccctgctttgtgactcataatcatcctgaatggtcagtttccgatgagaggccactagcaagggatacccatcaccaccagggagcagaatccgttccagggattggggtgagtccgacttcgagcagcagctgccccccaacatcatgtacccagcccgtgactacgtggagccctgggcttcgcgtagagtccctagacggggcgaaaacgggaaaaggggccttaactggggcacctggctcctttgagagctcggagtttctgactggcctgcgcaacaccccagaggcaaggtgaacgcgagggcctataatgcaagaaccaaggcgagtcacgccctgtctgggcaaaagaggagtaaagacccctcagctgcagcccggcagcgcattcctacccagggtccgccgccagagctttcccgcgcggtcggatagttacactactgtccgggacttcctagccgtgccgcggaccatctcaagtgcttccgccacactcatcatggcggtggcagtaagtcacttccgcccgggaccggaagtgtgggatactgcgagtatggcggcgtcaaaggtgaagcaggacatgcctccgccggggggctatgggcccatcgactacaaacggaacttgccgcgtcgaggactgtcgggtcagtatcactctgcgccggggtctcagagtctgggcactcggggctcgggggcggggttccggggacacaggcgggcctcagttttcccggcggtgtgaccggaggcggagcccggggatccatcatagcttctgtaataacgctaagtgctgcagtttgttgaggtctttcccagctcctcttccttctcgtaacagcccaggaaatcggtccctctagttatttacgttttacagtgggttaaactgagtcatagcctgtgctctggccctcagccacccttggatttctaagatggggaaactgaggcccaaagaaggccgcggctccccaaggcaaagctgaggccgcaacccggaacctggagggaatttacaagatgttctatgcagtggttccctgctggcagcccccgcctgcatggtgtcacaggaatccatattctttaaattttcaattttttttttttgagacggagttttgctcttgttgcccaggctggagtgcaatggcgccatctcggctcaccgcaacctccgcctcctgggttcaagcgattctcttgcctcagcctcctgagtagctgggattacaggcatgtgccacaacgcctggctaactttgtgtttttagtagagacggggtttctccatgttggtcagggtggtctcgaactcccaacctcggatgatccgcccacctcggcctcccaaagtgctgggattacaggcgtgagccaccatgcccggcgtaaagttttcaaatgtttaagtaacacgttaaattttgttatcgggctcagcacagaaaattgaaaaagagaacttaaaaggcgcccatactcagtccccaggttaacagacaaatagaaacttttaaacgtaatctaagagtgaatacatacatttctttttttttttttaagacggtatggttctgttgcctgggctggagtgatttcttggcaacctccgcctcctgggctcaagccatcctcccaccccagcctcctgagaagctgggattacaagcatgcgcccagctttctgtattttctatagagatgggatctcgccatcttgcccaggctggtctcgaagtcctgggctcaagtgatccacccacctcggcttcccaaagtgatgggactatcggcatgagctaccgtgctcggcagaatgcatgtctcttaacaaatcaaactttacatttaaattacatgttatgcacattattcctcaattttaacacacacacaaaaatgagcatggtaattaaaaacgtaataattcagacagtagaaaaatcagtgtgaggtgaaaagtcctccccagccccttcttggtttttttattttttatttctactttttgtagagacagggtgcagctatgttgaccaggctggtctcaaactcctgggctcaagtgatcctccagcctcagcctcccaaagtgctggaattacaggcatgagccaccgcggccaacctcctcttgtttttcttgtatcccagaactgagattggcagactttttctataaaagggacagatgacaagtattttgggtttggctggccagaaagtttcagttactgagacaaccatttacaaatggaaagtgttcttagcctgggggctctacaaaaacagattgcctgtgagccaggtggctcatgcctgtaatccccacactttgggaggctgaagcgggaggatggcttgagcccaggagtttgtgaccagcctgggcaacatagtgagacccccacctctaccaaaaattaaaaaaaaaaaaaagaggcttcaggctagatctggcccatgagtgctgtcccagaacacattggaggaatataatgcattctatttcctcatttttcttttttcttttctttctttcttttttattttttgagacagagtctcattctgtcacccaggctagagtgcagtggcccgatcttggctcactgcaacctccacctcctgggttcaagcaattctcctgtctcagcctcccgagtagctgggagtacagttggatgccaccacatccggctaatttttgtatttttagtagagatggggtttcaccatattggtcagactggtctcgaactcctgacctcaggttatccacccacctcggcctcccaaagtgctaatattgcaggcacgacccaccacgcctggcgttgtttgttttttggttgttgttttttgtgtgtgtgttttttttttttagaccaggtcttgctctgtcacccaggctggagtgcagtggcgtgatctcggctcactgcaacctgtgcctcccaggttcaagcgattctcctccctcggcctccctagtatctgggattacaggtgggcgccaccatgccctgcgatttttttttttttttttttttttttttttgagatggagttttcacttttattgcccaggctagagtgcaatggtgcaatcttggctcaccgcaacctctgcctcccaggtttaagcgattctcctgtctcagcctcccgaatagctaggattacaggcatgtgccaccatgcacagctaattttttgtatttttagtagagatggggtttctccatgttggtcaggctggtctcaaactcctgacctcagatgatctgcccgccttggtctcccaaagtggtgggattacaggtgtgagccactgggcccggcctatttttttttttttttttgtatttttagtagtgacagggtttcaccatgtaggccaggctggtctcgaactcctgacctcaggtggtccccctgcctcagccgcccaaagtgctggtattacaggcatgagccaccacgcctggccgagtctcattcttctccggtgtaacctgggctaccccaccccttcaggtgtgcagcacaaggtctgtttccaaatatgcacctgtgtgacctgcagccagaccaggccacagaaggacctcaggcctggaggctccctgagctccctgcttccagcatctcatttttgtataaataccctggtcctctcccagttcaccacagagcagtggccccccctgtgccagacagtgccctaaataccactgcctggggttgtgtctcctaatggtgtggacttttgttacagcacatacacacccaccccagcctttcccggtggaggagtgaggaggatacccctatgctggtgtgctctttgtttatggccctgctttcattgttgagtgagcacatggttccgggccctgtccccaagcgctcacagctgagctgaagagatacaacacatcatgccaggatttctagttgttggtgaggcctgggataacctgggcccacttaagccaggatgtgccaggaggacctctgagaagaagcctgctctgcagaaaaagagcaaacacacaggccctgcctcctctccctctgtcctcctctcctgcctctcctgagccatggtccacagtggccttcccaccagacctaccttctgtgctcctgtccaaggcctggtggccccaagcctggcacccactcccttctgtctgcctgggtcagccattcactcactgccagcgtcccaggacatgatgggctggctcaggctgctttttgttctctttttttttttttttttttttgagacagagtcttgttctgtcactcaggctggagtgcagtggcgcgatctcagctcactgcaaggatggtctcgatctcctgacctcatgatccacctacctcaacctcccaaagtgctgggattacaggcatgagccactgcgcccggctggctcaggccccttttaatccatgccgcttctgaagtgacttcaccccacctcctccactatctcccacacccagttctcctgtccccactccctcctgagcctagcaggcagccctttccttttcatcttgtgtctttaatatatttattgaggttccaataccataccacacaactcacccatttaaagtctgtccaatttaatggctgtgagcggtggctcatgcctgtaatctcagccctttgaggacaaagcggatggatcacctgagctcaggagttggagaccaacctggccaacatggcaaaaccctgtctctactaaaaatacaaaagttagtcgggtatggtggtgcacacctgtaatcccagctacttgggaggctcaagcaggagaatcgcttgaacctggaaggcggaggttgcagtgagccaagatcttgcctctgcactccagcctgggcaacagagtaagactccatctcaaaaaaaataataataatatagtgaagtgtgtccaatttattgattttttagtatattcacaaagttgtatggccattgccatgatcagaatttagaccactttcattacccaaaagaaaccccgtcttccctattagcaatcatcccacccctggcaaacactaatctgcttccttctctgtggatttgcctgttctggccatttcctatcagtgaagtcatagaccgtgtggccttttgtttctggcaaattaatatccagcaccaagtgttgtgttttcattttttgatgggcacttgggtcatccacctactctttggctgctgtgaataatgtgagtatggctgccatgaagattcatgctgtacaggtgtttgtatggatgtagattttcatttttcccttgtgaactttcccctaagagagaaaccactggatcatatggtaacttcgtgtttaacattttgaggaactgccaaattgttttccaaattggctgcaccattttgtgcttccacctgcaatgtatgagagtcccaatttctccacgtctcaacaacactgattattttccatttttttgatcatagccaccatcctagcgcatgtgaagcggtatttcattatggtggagttttttaaaattctttttgggtctttttttgctcagttttctggtcattgatcgttgatttgcatatcactgctggctgatgatgtcgaacattttttcatgtgttttattatttttattttttattatttttttcaagagatggggcctcagtgtttcccaggctggtgtcgaactcctgggctcaagctgtcctcccgcctcagcctctcaaagtgctgagattctaggagtgaaccaccacctttgcatgtgtttattggccatttgtatgtctgtctgtgagaaacgtctattcaaatcctttatatatttttagtagggttttttgtttgtttgttcgtttgtttgttttgagatggagtcttgctctgtcgcccgggctggagtgtagtggcacgatctctgctcactgcaagctccgcctcccgggttcacgccattctcctgcctcagcttcccgagtagctgggacttcaggcacctgccactgcgcccggctaattttttgcatttttagtagagacggggtttcactgtgttagccaggatcgtctcgatctcctgacctcgtgatccgcccgcctcggcctcccaaagtgctgggattacaggtgtgagccactgcgcccggcttagtagggttttttaaattattgaattattgagttgtaagattgtgtatacatatgttgtcttctcagctaattgatagtttcatttacagcacaaaagtttttaatttcaataaagtccgggctgggcacggtggctcatgcctgtaattccagcactttggggggcagaggcaggtggatcacttgaggtcaggagtttgagaccagcctggccaatatggcaaaaccccatctctactaaaaatacaaaaattagctgggcgcggtggcgggcacctgtagtcccagctactcaggaggctgaggcaggagaatggcgtgaacccgggaggcggagcttgcagtgagccgagattgtgccactgcacttcagcctgggccacagagtgagactccatctcaaaaatacatgtataataataatttcaatgaagtccaatttctgtatttttccttttgtcacttgtgcttctggtgtcatatctaagaaacctagtttgaggtcacagagagtgacttacattttcttctaagagtattatagtttcagctcttacgcttaggtctttgatcctttttttttttttttttttgagatggagccttgctctgtcacacaggctggagtgcagtggcgcgatctaggctcactgcaagctccgcctcccgggttcacgccattctcctgcctcagcctcctgagtagcggggactacaagtgccagccaccacgcccggctaattttttgtatttttagtagagacagggtttcaccgtgttagccaggatggtctcgatctcctgacctcgtgatccgcctgccttggcctcccaaagtgctagaattacaggcgtgagccactgcgcccggcaggtctttgatccttttgagttaatttttgtggatggtataaagaaggaacgcatcctcattctttagcatgtggctgtctggttatcccatttgttgaaaagactgttttctctcccattgaattatcttggcacctttgtccaaaatcaattgaccataaatgtgagggtttatttctggactctcagttctgttccattgatgaacatctctgtcctatgccagtgccacactgtcttgtacacacagctgtgggataagttttgaaatactgaagtgtgagtctttcaactttgttctttttcaaaattgttttggctgttctggtcccttgcatttccatatgaatttcccaacctgcttgtcagtttctgcaacaggaaaagaaatggttgggattctgatggggattgcgtttcaaatctgtatcagtttgcacagcgttgccatctgcacaatgctaagtgctccaattcttgaacacaggatgggtttttatttattttggtcttctcttaagaatggccaaggccgggctcagtggctcatactggtagtcccaacactctgggaggctgaggtgggaggattgcttgaggccaggagttcaagaccagcctgggcaacatagcaagaccctgtttctatgaaaaatatatttttcttttttttttgtttttgtttttggttttgttttctgaaacaaagttttctctgtcacctaggctggagtacagtggtgccatctcagcccactgcaaccttgacttcttgggcttaagtgatactcccacttcagccacccaagtaggtgggaccacagatacgtgccaccacatctagctaatttaaaaatatgtattttgggccgggcatggtggctcatgcctgtaatcctagcactttgggaggccgaggaagatggatttacctgaggttgggagttccagaccagcctggccaacatggtgaaacctcgtctctactaaaaaatacaaaaatttagctgggcacagtggcgtgcacctgtaattccagctattcaggaagctgaggcaggaaaatcacttgaacctgggaggcggaggttgcagtgggctgagatcgcaccactgcactttagcctgggctacagagcgagactttgtctcaaaaaataaaataaaatacgtattttgtaaatgtttcactgtgttgcacaggctagttgcaaactcctagtcaagtgatcctctcacctcagcctcccaaaatgctgggattacaagcgtgagccgaaaaaatttgatcccaccactgcactccagcctggacaacagagagaggcccggtctccaaaaccaaaaacaaaaagaatggtccacacacccttttgtgcgtgcccctcaccatgttccccaccagactagcagttcctaaggcacagactctgaggcctggggccttggcccccctgtggttggcgaggaggaagagccctgtgcaggctgcatgcaaatacaagaggccctgcattgtttctgtcatctcatacatctctgttctatgccagtgccacgctgtcttgtacacacagctgtgggataagttttggaatttatttcttctttggaatttatcttacagatgggcctgcgtatgagtgcgcaggtgtgagggtgcaggttctccccaagggcccattttctgcaccagaaggctgagggcagcccaggtctgtcccctgggttctctgtagccgtggaaaataatgagatatggccgggcacggtggctcacgcctgtaatgccagcacttgcaggtggatcatgaggtcaggaggtcgtaaccagcctggccaatatggtgaaaccctgtctctactaaaaatacaaaaattagcctggcgtggtggtgggcgcctgtagtcccaactactccggaggctgaggtggaagaatcgcttgaacccaggaggcagaggttgcagtgagccaagatcttgccactgcaccccagccagggcaacagagtgagattccgtctcaaaaataaattaattaaaaaaaagaaaagaacgagatatgaccagcctgggcaatatagcaagaccccatctgtacaaaaattagttaactggacatggcacacacctggggtcccagttactcgggaggctaaagtggaaggatcacttgaacccaggagttggaggctgcattgagccatgattgcgcccctgcactccagcctgggtagcagagtgagaccttgtctcaaaaccaaaaaccaaaaaaggaaaaaaaaatgaacaaggcagctgatgaaacctcccatgtgctagacaggaggctgagagctgggagctggccctgagcaccctgggcctctccagagatgtgcctctgagcccggacccagcacaccctcattacctgtagtatggaaatgtcttagccctgacttgggcttctaacaggttaaataaccaggtacaaatttgagccagtttctcatttatctccgggtctagcagaggtgcccccgtgagctccatgctggagcagagctgaaggcagaagagcatgacaggtgcagagcagggcccggcaggcacagagtagccccagcaggcatagagcagggccagtgccctggaggcctggagatggccttgccttccacctgctggtcatttcctgggtgttgactggagcctggcctacctgagcttttcattcatcccaccaagtgcaaagcctgtccagagaagagactggggctggaaggatctggagggtgcagggtgagcctgggagccagatcccagacagcccaggcctctctgaagatcccagtgggcccccagcctgtcagtcaggattagagcaaggccccactggtgctcagtaaatattcatgatggcctaggtccttcctggggtgcagggcagggggcttcaccctgcagagccaagaggtagcacggccacccctagagtccggggggtggctgggcagcccccacagggcactgcctgtccctggcagctgtgtgcagcccccgcagggcagcacgcggaactgtggcccaggtggccgggagccaccatggacactgtcagaactgcccttccacttcagggccagcctgccgcccagggtccaaacagccttctagaacacgatggacctggggcccccctagcaaccaccatctagaccctcaggcctcctgaggttgctgcctggcttgtacctttcagaaaacccctggcatgggggcagaggtgtcacagtccaagcagcctcactcctgagaagccgccagtgtcccctgattgcagagtgggcagcgcctggagctgtggaggagggtgtctgggggcgggctggcccgctgagcagcgcctctcttcacaggctacagcatgctggccatagggattggaaccctgatctacgggcactggagcataatgaagtggaaccgtgagcgcaggtagggcccctggtgggcgttgtctgaaagtgcccccccggcgagttgtcggggtcctgtagcattccgctgttgtctgtgctggcgaggggtgaacgggccccttggacttggctgtgcaatcccaggccccagaaagtgcagatccagacccagcacttccacttctaggctctgtcctcgagatgtctccatgtctgcaatcccagcactttgggaggccaaggtgggagcattgcttgagcccaggagttcaagaccagcctgggcaacagagggaaaccctgtcctcgccaccccaaaaaatgtgtctagtgaggagggttgggacccgtggatccagattaggacaggatatgagtggggggcctgcctcgggccctctaagcaggattttgtcagaggtgaccaggctcaaaccagaccacaccaggcagtggacacacagggccagatgaactagggccaggcgcccccctctccctgtgtcacaggctgggcactccttccccacccctcccccaaccccaacgcaggccaggcaggactgggagatgggggtcattgcagggaacttggaaactgccagaaagcagggagaagaaaggaaagattgtggccccgcctgccccagcctcacacactgattattttgagatgaaggggacgtggttttgtgaggcccagagccccgtgatgaagtcaccccctcttcgtcgcgatcatcaggcagagttatttttaggataaaaaaagtttttaattgaaaagaaagtagaaagccaacagtcttgtgggcagtcacccgtgcagctgcctgcacccgccctcctctcaggctcctggtgggctctgcccacagcccttgcccttcccgcgaccctcgccctgccccctgcctgcctccccgcccccctccgcctcttcccccagcagcaccctggcccctgaggtctgtgctgcctgtgctcccccgacctagcctggtctgacctgagtgtgggtttcgggctttcacaggcgcctacaaatcgaggacttcgaggctcgcatcgcgctgttgccactgttacaggcagaaaccgaccggaggtagcaccgcaggggccaaggttgggaggtcactggccggaaggccccaggctgcagggcctgacctgcatccccgaaggtggccagaatgcacgtgggggccatcgccctgtgccgtcagctgcatcctcaggcgtggagacttagtggagacccaagggggcgaaccggaaggcttcctggaggaggaggcagcactggggttggggcaagagaaaagctaggagttggctgggggaaaaggagacagggtcggagggaggcttgaaggggtgctactaggggccctaggcaggggcccctcagggcactgaggccccacccccaccatcggccccatccccacaggaccttgcagatgcttcgggagaacctggaggaggaggccatcatcatgaaggacgtgcccgactggaaggtgggtcccggctgggagggcagaggtgccagccacggcagagacagggcctggggttggggagctcccacagctttctatagaaaccccaggaccaagggggtggtgggtgccaggtcccacaagggaaggctgtagcgcctgccacgcacaggggccactgatcctgggggatgggtcctagcaggctgtatatgggtggctgtgcctctacccataccccactgtccccacaggtgggggagtctgtgttccacacaacccgctgggtgccccccttgatcggggagctgtacgggctgcgcaccacagaggaggctctccatgccagccacggcttcatgtggtacacgtaggccctgtgccctccggccacctggatccctgcccctccccactgggacggaataaatgctctgcagacctggcctgcctgttttcctggggactgggggaaagaagggggagagggcccagctaggcaccaccggatcacatgtagcatggggacgcagcagatatgcacagggtgacctcaaaacacacctaggggctgcccctggatccactggcggcctcctctctgcctccgatatacctggactctcctgcctcccttttgaaaccatgcctgtcagcagcccacttacctctccaggctgggggcccctgggtcagctttgggtcagaccttctccacggaggtctggagagtggggggagccttgacctcccggatacaagtgatcctcccgcctcagcctcccgtgtcactgcgattacaggattacaggcgtgagccaccataccttgtgcagccctgccaattgtaggcatggcgagggtatttgtctgcggaggggctcctcgctccctgagagggaagctcagagacacggggatatctgcagggaaagtaagtcgggggaagcaaccaagattggccaggtgcctctgctgtgggctcctggcacgaaagggtgaagtccgtctgagtccaccgaccaatggtgacgcgcagcgccttcgcggcgcttcctgattggcgggcatgcagggtgggcgggagggaggagaagagggggcgtcccctccctccacggatgcgcttaaaaggcggtggcggtggcggcagcgcccggcgcccgggctcacctcggccatgagcagcgcagccggcccagacccgtcggaggcgcccgaagagcggcatttcctcaggtcagctggggagagggaagctggagacgggcatggttcccatggggccaggagcagcccgtaggaccggaggcagggtcatagctgggacagaatggggtccggggactggagacgggcacagccgggatggaggttcaacggcagaggcatgaccacggtggggaaccggaggcagggatatggccaagacgggcctgggaatcccgggaatccgagaccctcctggcatcttgctggagacactaagctgcgttgctggggaaactgcctccggggcagcccgcccctcatgaatgattcatcagcagcgctggtcgctcccccaccgaaccccaaccgtggcccacccccactctccatctctcccagggccttggagctgcagcccccacttgccgacatgggaagagcggagcttagctcaaatgctaccacctcccttgtccagaggaggaaacaggcctggggaaggcagtcatggctagagcagatttggaacgcagggcctgtttgccagaggttggtgagtttgggatctagaactggcgccgtggctgtgactctcacctcatcctcctcagcctttgtgacatgggaccccaggcaaggctgttgacctcactgtgaaccagatgcgtccaacagctcctgcccactgcccacctagcagggcacgtgtcccctcagccgatgtccagactcagtctagggaagagtgttttaggagctgtgacttcaccttggggtgaaggggtgaggtgaggggggcctcaaatgctaagtgaggggagtgagggggctctcaggggtgggtaggagctagaacgtagtggggaactggctgacgaggctggagacacagaagggcctcttaggcatggtgaggagtttggagtttgaatgttcccagagccctcgggagccatcagcaggtttgggacccggtgatgcaatctggtgttcgagttttcaaagcccccccaggctcatgttgagttttgggggcaggaggctgctgtgtgcggccaggtgatcccccgtggtggtctggtgggcagaggtgtgaggtggagagaagcaggtaggactgagagcagggtgagtgtggcatggccaccctggcctgaggtttcacctcccagaaagccccctcctggaagcatttggcgagtgtcaggcccagttccctttggacccaggccacttcaggcctcctgggtctgacagggaaatccttggggccttgaagcttctctcatctaggggccgagattcgggatagcaaaaggcaccactgaacacccccagaatcccacaacagcagaagggacctgccctgcctgccaccctccttcaccaggctccaattcccacgcagcctcccacccccaccccacagctgctgctgtgccccacccccaggttcctaacctggacgaccctctgcccacagagcccccattattctaatgaccagttagacaggaagagaatgttccaagtggctgctagaggccaaagctttgggacagaagaagaggaatgcatcgccctcccgccctccacttcctccctgcaccctcctgcgggggcagcagtcagagctgtcacaagatggaggtggaggaatgagccatgttcccagcctgccagattcctcaccccgaatgcaaacgcacctcctatgtgctttcctgggagctgcgctggcctgccccggggggactctgtctgacttcaccatgagctccttttcctcaccccgtccttcaacttcatcctatgtcagctgcagacaggctgaggtttgaatttggctctgtttactggggtgtcccagggcatgtgactttcctgccctgagtctctgtctccgtctttatgtgtggacccccgaagtgtcctcttcaccatgttcctcagtctgggatttgaggctctgcctgccctgtccgcttgatcactctgcttcagcctcccttctgccccttgaacataccaggctcctccccaccccagggccttggcttttgctattcttgcccctgcattacctgccacgatgtgccaggcctcctcctccaggaagccctcgctgactcccatcccatagcagtcctccttctcctgcactctgcctacctggccttatcatgctgcaaaattggccagagggcagacatctcccactcagagagttgaaggaaagagtctcaggattcatcccctcaaaacatccaccatctgtaggtctggctctatgtctttgttcatgtcctgtggctctggagacaccaagggggaaagacccagtttcccaacttgcttcctgcatgatcctgggcaagccactcggcttctctgaatcattagttgtttttccaacttttctaggcctggctctttttatttatgtttgtgttttttattattatcttagagacaaggtcttgttctgtcgcccaggctagagtgcagtggcgtgatcatagctcactgcagcctccacctcccagattgaagtgatcctcctgcctcagcctcctgggtcaccgggattacaggtgtccaccaccacgcccagcctagtctgaccaattgtgtaggtcacccgaatattcagttttgctccgagaggtggagacggaccccagtcattcagtgaagtggatggcagagcttcacctccagctaagtagccacattttctggcaacaaataaccttttttttttttttttttttttttttttttggagacggagcctcactctgtcacccgggctggagtgcagtggcacgatctcggctcactgcaacctctgccacccgggttcaagcgattctccaggttcaagccttagcctcctgagtagctcgtactgcaggcacccaccaccatgcctggctaattttttgtatttttagtagaaacagggtttcaccatgttgggcaggctggtctggaactcctgacctcaagtgatccacccgcctcatcctcctgaagtgctgggattacggatgtgaggcaccgcgcccggcctggccacaaataatctaattatgtcactgcccctgaaaatcggtcaccaaagggtctcatagccccaggccccaaggcctccccgctgagtgtgccatcaaacactgcagccttaaaaacccatggaccccagatgcccccagtcctgtccacccctttcagcgtcctgaagcttgttccgtggctcccactgcctgaaatcagcccatcgcccccatcgaagtccttcatgctccattcccctttcttggttccctccgccttgggagctggggacgtctaggtccggttccgtgtcccacgctttggagcagtagaaccaacgcgcggccagcgcatcttctgccaccagagggcgcccgcgcctcgggctttggctcccacaccgcggcccgccaggcctcgattcaacccgcgcgtcgcacggtgaaactgagggcatccccagctcaaggctgcagacgctactcgggggtacggggtgggagggtggcattgggaccgggttcagaagcttggcggaacatttctggctccatctgaggctctgtctctgtgtgtctctgagtgtcccatcccactctgtccccagcaccgcggaggcagccgccctggagcgggagctgctggaggattatcgctttgggcggcagcagctcgtggagctgtgcggtcatgctagtgccgtggctgtgaccaaggtacctgacccctgacccccaaccctgaccccaaccagacggccaactctcctgagctgcatgactgctgtgaccagggtggttcacccctcaagaactccctttttgcttgggcctaccccagcctgatgggtaaactgaggcccagagaggctcatggctggtgcaggccagatggggacctgagacccctggtatcagagaaggccagggtggaggttattgcagggacagtgccacgaccctggaagtgcaacccctcctgcacatgtgacccgcctgcttctgccacctcctgggtcttgggcaccagggacatctgctcctgcgatctgaacacccctaaacaaccctgttctgcaggtggggaaactgaagctcagaggtggcgaggggcctgccctgggtcagagggggatggaagcagagctgcaacccaggtgtgtctggctctggagtaaacccccacacctcgaggggccaggaggatgacacaagggtgatagcaataatcatactatggagtgcttcaccgtgcagccagcagtgctgggcatcagtttcctctgcaacagcataataaatggtactgacgagtcagtccctaaacgtgaacgcctcagaaaactgtcccatacagtcgaggctctagcgtgactgcctcctcttcctcccctgccctcctcatccccctcgcctttctcctccttcctcctcctcctgccccctcctcttaccctcctcctcctttctctctccctcctcctccccttccgcccctttcttctctcctttctccttcctctccctcctcctccccctcctcctgttctccttcctccttcccacttaccctacctcctccccatcctcctcctccccattctctccctcctcacccctcctcctctttttcttcttattaccacggtatactttttaaaaactcaatgtttttcttcatgtggacttaaatgtttgtatttccaaatgaaatagatcccgggtgaggcgcccaaaggagaaggaaaatcaaaaccccagaaagaaacccagtagtcactactcgcctggcgctcagtggccaactgtctggtttttgcactgaaagccccttgtctgtccagaagcccctcagtcccagtcttgggtcttgggctctgggcccggtgtggctgggatcgcaggcatgttcatggcaggtcaggactgcgctaagcctttggggaggatacttgaaaggggagtaatctgctgtctgtgtggttggagcttaaagtacagctggggctcaagagacacccagagtgcctgtcaggcggtggcactgtcatcgcatttgataaaggccaaactgagtctgggagagaaggggctggggccacgcagaatcagggcagggctggggccaaaatgcctggagagacagagtctgagagatacagagatggccagagacagatggagagagacagataacagagagatacagagacagccagagacaaatggagagagagacaaatggagaaagagagccagagacatacagaaagacagagacactagagtctgagagatacagacagacacagagacagccagagacagatggagagagacagagacacaaagagagccagagacacagagagtctgagagatacagacagacacagagacggccagagacggagagagacagagacagacagacagagacacagagagtctgagagatacagaaacagccagagacaggtggggagagagacatgaagagagccagagacatacagagagacagagacacacagagagacagagacacggagagtctgagagatacagagagacacagagacagccagagagagacagagaggccccagggcatcgtggctaaggttgggctcccctactccacagcctccaggaggggctgaggtctggaaacatgggcgggggtgggcccgcggtgagaaaggtggaagaatgtctgcaactcaggcggagaataaacaaaccgcactccgggcgacgggcagtggctggatgcacgtttttcctgcaccgacctggcagagcctgagaccgggcctctgcatctccagcggggaaactgaggccccaagaggcccaacccctcatccagaacagctcacctcctgtcctatcctgttgcctccaggcccaagccccatcccttcccctactccgggcctcagtttcctctccaggcaaggaggaatctggactgtgcctgtgcctttgctgtgtcccctaccaccaggcgttcccgttgcccgctctctcccggaagcagaggacggtgctggtcgtgtgtggcccggagcagaacggggcagtggggctggtctgtgcccggcacctgcgggtgtttgtaagtagcaaggaccccttcgacctcccaaagtccctgcccctgcagaaatcactgccttcttttgatagcttcccagggggacattgacgcagggccaggttatagaatatgcccagtgcttgtcccaggcagggtctggtgctggtgaccaggtcaggggagtctgaccccctcttctcccacccccaggagtatgaacccaccatcttctaccccacacgctcgctggacctgctgcatcgggacctgaccacccagtgcgagaagatggacatccccttcctgagctacctgcccactgaggtcagcgctgggtggcaagcaagggggacatggtgtgcagtggccctgggccaccctgaccctgcctgccttccccaggtgcagctcattaacgaagcctatgggctggtggtggatgccgtactgggccccggcgtggagccgggcgaggtcgggggcccctgcacccgcgcgctggccacgctcaagctgctgtccatccccctcgtgagcctggacatcccctcaggcatgccaggcagaggggggcacattggggcctggggggcttgggtggaggcccctgtgccccagctcctggtcgcccctgcctgtctgaacctcaatctccccagcttggatggacccacacttggctgaggctaagggtcacacccatccctctgatggggaagatcgaggctgccaccccaggtgaccccaggtctcctctttcctccaccccagtgcccagcccacatgccctctgcccacccctggcccagttgcctgggcagacgtgagctcactcggcaaaggccgcgcccgccctggctgccgccccatgcctgttggaaccattaggcgacaggcagacggaacaaacagccgctggccagccggaccctccgtgggggtggctggactccgggggatgtcccctggctctcgggatcccagggacatcccagcaggtgccacagagcaggggcaccaagggaggcggcgtgctgtctgatctgagtagggaggctgcaggctcagcctaggacagagagggtggctctgtcaggtcagaggggatggttaggaacctctagtctgagggtggtggctagggtcagagaaggattaaagtctgagggaggatccagtgtcttctggtgagtggccccagaatcaagtcagagataggagagaaggcaaggctcctaggctgaaagtggaggctcattcaagaggtgacggaggctgggtgcaggggtcacacctgtaatcccagcactttgggaggtcgaggtgggcgggtcacctgatgtcaggagttccagaccagcctggccaacatggcgaaacccagtctctacaaaatacaaacatttgctgggtgtagtggtgcacgcctgtagtcctagttacttgggaggctgaggcaggagaatcgcttgaacccgggaggcagaggttgctgtgagctgagatcgtgccactgcactccagcctgggcaatagagagagactgtatcttaaaaacaaacaggctgggcgcaatggctcacacccataatcctagcactttgggaggccgaggtgggcagatcacaaggtcaggagttcgagaccagcctggccaatatggtgaaactccatctctactaaatatacaaaaattagccaggcatggtggcgtgtgcctgtagtcccagctactcgggaggctgagacaggagaattgcttgaacccgtgtggcagaggttgcagtgagccgagattgcaccattgcactccagcctgggtgactgaagacagaggctgggtcagatggaggagggcgattgaatagtaggataggagcagaagcagaaagtctgagtgcagaagctctggtctgattgggagggaaacacctccaaggactgggagagacttgtctgagggcggaggcagagttctagggggcgacaagtctcaccaggacccatgtgccagagagaaaaggctgggtctgatgggggaggggaagtgggggtggggcagcaggactctggtctgagggcagaggctcagtgttggaggggagaggagaggaggcagggacaggatggactctaggctgagggcaggccaccctcccagttcccaatccccccggaccctcctccctcaggctgggacgcagagaccggcagcgattcggaggacgggctgcggcctgacgtgctggtgtctctcgcggcgcccaagcgctgcgctggccgcttctccgggcgccaccacttcgtggccggcaggttcgtgcccgatgacgtgcgccgcaagttcgctctgcgcctgccgggatacacgggcaccgactgcgtcgcggcactgtgaccgccacccgcggccacaccgcagggaccctcgccaataaacagccctcccaccaccgccgcctcgcctccgcctcctttgtgcaccgggcccgctgcgggggtgggcacactcgaagagggacttcacacggtccctgggtgatccaaggcggggagcatgagaagggcggtggagtgggacttcccgctggcctagaaaacttcagctagggctgggggcggtggctcctgcctgtaatctcagcactttgggaggctgaggctggaggatcgcttaaggccaggagtttgggaccagcctgggcaacatagcaagatcccgactctacaaattaaaagaaaaagaagaaagaaaactcgagccagaagaatggagggtagattcagggtgggactcccagactgtttggggtggcctaaagcctataggatcgaagtgagacgcgagacaggacttccagccacctaaagcgggtccgagcagcttgaggctggattccaagtgacacttccctcaggcagcttgggatgcagcttggaggactgagtgggctcggggagggagttccagcaggccacggggaacccaggacagcctgaggacggaggcacagccagacgcaccaaggggggcgacccagaggggttgctcgagcgccgtcacccagggccagggggcgtggcctgaatggggcgtggccagggcgggatctgcggtcgcatcccgcccccactctcagtcccagcggccgccagacccgccggagttggacccgagcacgccgcggagcccggaccctccctcggacgctctgccccggccatggcgtcgctgctgccactgctctgtctctgtgtcgtcgctgcgcacctggcgggggcccgaggtgaggcgcctccagcccccgcgcccagcccctgaggctcccgagggcctggcagccggccttgggtgaagccgcactcggggagagaacccagggacccacgcgcttccccggggactgggtccccttcaccagtcggatccccgcgaccacctggggcgcggagcgggcctcatccattctcttccttggctaagccgggagtgtggataagaacctagggttcctcccggggtttggactctgaatcaccggccaggtctcccaccctggaccgaaggggtcggaactggcccctcccacctaactcccacacacgcactcactccaaccgctggagaaagaaatgcccatccctggaacactcaatggggcgggggacgggcccacttctcaagtgaggagactgaggcacccagaaggaaggggcttgtctgacctcatcactctgctgggagtatcttggacagctcctatcttggagaagccagtctagattccaaggacttcccggcagctcggactgtagtacagggatggaagacagactaagggaggggcttccagcaggccaagtggatgagggggagcccagcctgagggcagaggcacagccagctgaacttgattgatctcgcggcagctgaacatagtgggagggagactctagc

SEQ ID NO: 676 - DNA, 7113 bp, Homo sapiens
  source 1..7113: mol_type = genomic DNA
ttgcacaagcgagatcctctagatgaagatgaagatacagatatttcttataaaaaactaaaagaagaggaaatggcagacacttcctatggcacagtgaaagcagaaaatataataatgatggaaaccgctcagacttctctctaaatgtggagatacacaggagcttctatcttgctgaaatattgcttcatatttatagcctgtggtagtgcacatggttaacataaaagataacactggttcacatcatacatgtaacaattctgatctttttaaggttcactggtgtattaaccaaacgttgtcacaaattacaaatcaatgctgtaatataatttgcacctggaatggctaacgtgaagcctgaattaaatgtggtttttagtttttaccatcaccaatttctatgactgttgcaaatacagaatctattagaaaacagggtcttggaaatgtagaattttggcgcactatgaggaaaaacaagctatctttgtaaagcataattgagtttaatgtaattgttgtaaaaaaaaaagtgtgcttgctctacttaaaattcctcacaatgttgaattttgacctgtattcagaagaattccaaaacaggtcagttaaataaggaaatatagtatttgtcaaaccagtatcagagaaaagttacattaatgtatttgattacttgatctggtatctacttattaatgaataatcaacatttttctagtggacaagccatgttcttttcgactggtcttctgcatttatgtaaacacaccccaaatcaatttatcttttgtaggaatgatttggttgggaaatttttcagaaccgctctggagcagaacaaaacggtacctcccggtcaccactgggactgggggaagggacacgctccaggggagaaaacaattcgcctagatgaagatccctgggtggttctccatgcactcgccgagggggctcagtgggtagcctcttagagcagctctgagaataaacttatcatctgagttaacgggtaatagacccagaacagttcccaaaccttggcactttcgctcacttagccagaggcacccggcctggcctcggcttcccggtgagggagcgggggtgggggggatgcgcaggcacctggaacaatcagggcaccgggagaagccggctcagctgatgccggtgatgagtttctctcattgaaatcctcctcacctcgggcgccttggttcccttacggatcagccctttcatcacaaagaaagccctctttccagatcatctaagggtcattgtgccaacatccgggcgtggagagtttctgtagggagaaggacgaagaggggccccctcggcggggacgcgggccggtggcaggaagggcgtggagggcggtgcagcgtgcgagcccccgccgagggccatccccgcctccgctcggccgcccgggcaagtcgcctatttagggtgcggcggcgggcgggagcagtgcgcccatggcggccctgggggacgaggtgctggacggttacgtgttcccggcgtgccccccctgctcgtaccggtacccataccccgcggccaccaagggcaagggcgcggcgggcggcagctggcagcagcgcggcaggggctgccttcccgcctcctccccctgctcggcgggcgcggcctcgttgtccttcccgggctgcgggcggctgacggccgccgagtacttcgacagctaccagcgggagcggctcatggctctcctggcgcaggtggggccgggtctcgggccgcgcgcccgcagggccggcagctgcgacgtggcggtgcaggtgagcccgcgcatcgacgccgcggtacagtgctcgctggggaggcgcacgctgcagcgccgggcccgcgaccccgagtccccggccggccccggggccgagggcaccacgggtggcggctctttctcccagcagccatcccgtcgaggcctggagcagggcagcccccagaacggcgccccgcggcccatgcgcttcccgcgcaccgtcgccgtgtactcgcccctggccttgcgccgtctcaccgccttcctggaggggcccgggcccgcggcgggcgagcagaggtccggggcgtcggacggagagagggggccgccgcccgcgcggcttcaaggcccagaggagggggaggtgtggacgaagaaggcgccccggcggccgcagtccgacgacgacggcgaggcccaggccgcagtccgagcgagctgggagcagccggccgacggtcccgagctgccgccgcgagaggcccaggagggcgaggcggctccgcggtcggcgctaaggagcccggggcaacctccgtcggcggggagggcccgagacggcggcgacggacgggaggcggccgtcgcgggagaggggccgtcgccacggagcccggagctgggcaaggagcggctgcgcttccaggtaaagcctagggcggtcagggcacaggggagcccgggggtgcgggtgtcttccttgggcctggccctgtgactgcttcgggcactcggaggtgcggcgcttccctaagcgtgggctacttccgtatttccgagacagccaatgaccgcgataggtgtcttccttgacagcacagtctcatgtccccgacatccagacttactcgtggcggctgctccacgggctggccagggcgacgcccttgggacgttcttataacccacatatttgcactgtaaacctcgcgcagtgggcgcataggccagccctgaccgcacggttggattacctatcagtaggcacaactgaacttcggagcacttgccggctggagagtcgattcccaaggatccctctctcccatttccgcactggatgtggcaaaaacccttcaactgctgggattctggtcagcaattctgatttctcctttacgagcttccaggctattggaaagctggagctcctaaaatgccccttcctaggaatttgctttgcttttaagaagcacccccaactcagaaatccaatactgcgaaagcatttggactgctcagtgttgctgcccgagggcagcaggctgaaactttaaagggctggggcacgcagagggcagttgtgacctagcagaagtggaaaggcacaagaggtggtaagaagcccgagggagtccctcgcggtctcttccacggccaccacaggctggtattccttttgaggggcggggttggtggcggtaggctgattgtgcgaggagtgaatcgagaggccagggcttcccagcgtggctgtgcaggagctgtgtgtgatcttaggccagtcataaccttcctggacttagcgcagtctcacaggtgagcagactgaattaagtgctccccagagttccttccaattctgaaaggctaactctaaaaacgtgtgcataactgcttgcttactgggagggaagaagggaagtttaagtaacactacttttgttcatattgaatatgaattatggcttacgtacgatttaggttcctggcaccactgtttgggagttaactagcagcatgaagaatgtgatcttgggtgaacctttaaagttccttagatgtggagtcttatttttcttcagcttaatacatgtgtgcatagtctaagatcaggctttatcttaaaaggccttcctacagaatcccaaactttagagaactgtttattatgtccctacttattcgtttattagccagccttatgaactgagttaatctggtatatgaactctaaggcccatgcttgcttaattgtttgactaggctattaagctcacttaattactgtattgaagaggcgtacccaaacctgacctgctttctttcatgatctgaagttgccaatttcaaatatcaagtagatccttcccaacgtctgaaatgaaggataattcaggtgttttgttggttaaattgacatatcctgttgttcagttcttagagcagaaatatggctattaccactgcaaggactgcaacatccgctgggagagtgcttatgtgtggtgtgtacagggaactaacaaggtaagaaataccaggtaactggcatcttcttgctgaaagtgtcaaggcgattttaagtttatcctctttgtcatcacaggtttacttcaaacagttttgcagaacttgtcagaagtcttataacccttaccgagtggaggatatcacctgtcaagtaaatcagatgttttgcattttgtctgacctgggcagtcgtcgagggtttttagtatagtttgagtatacttccaaaaagaggccaggcccccagaccttaggtttcaactggcttttgttaggagtggtagaaacaatactcagctgggaaacggggccttggtgttagcttctttctggccttgcaaatcttgctgttgttaacctcttctaaaactgttaacctcacttgcaatatggaagaatacttgtcttacttgctacttagtctaatgtataagaaaatcaacaaaaacatgcttgtcagctaacatgaggtagtcaaggttgactgttttaccgaaacgcttcttatgaagcacaaccttaaagtacttaagcacagggggttagtttgtcttgcctgaaagctcacaaagggacagtttaagataaatctaagttgtctagctttatggggagttgactataatggtaagcaagcaatatgttaactaagcattgcttaagcgcttgcttgctattaactgtgctaaggggcttagctaatctttaagaggaaagaagtgactacattcgcctcttgtcacacagctaatggagtctgaattgccagttgagacagcctaatcaatacacttgacccacgttggatatttaaaagcattaacaccctggggtggtggagagaaactaagtatggaaagccacttagaatcacttagatcagagctgggcatgtttctaaaagaggatgccttaaccactctgctcttggtgttcattgtcaaattcatccctgacttgttctctaccctttctcttaaacagttgttgtaaaagaaatttcacaattcataattggatctgatgcaatatagcagcagtacagcatggttaaacacccactattcctagccctgtcattgctacgtaggtagggatgtagagggaaaacaagattactatgggaccttgcttagagcacattcattaagtacttgaatggactagaaaaatgttgaagtcctaggaaatcactaagggtttatcttctgcatgcccttctgtatttttttcccccagagttgtaaacaaacgagatgttcctgcccagtaaaacttcgccacgtggaccctaaacggccccaccgtcaagatttgtgcggtagatgcaaaggcaaacgcctgtcctgtgacagcactttcagcttcaaatacatcatttaggtgaaagtcagtgttgctgtgcatgcgctgatggagtagacgagtgagcttttccgtgcctctcctccacctctcccttctcaaaatacttcatgaaaggcagtgtattctgaaaaagccttcaaataaaggtattgcaacacgatttatacattgcataaaatctgtctttgaaaataaagtttcaagagcgcttgtcttgtgctaacagtctgggcctgtcacttcacctttatgaatgcttgctgatggcatagagtgggccaggctctgagttaggctgcagccacttggaaaacaatttaggggggtgcttgtagacgaggtctacttatttaggcaggtctggaggactgaagcttagaaggaagttaactgaataaaaagccgcctagcgatcgcgccactgcactccagcctgggtgacagagtgagactccatctcaaaaaaaaaaagctgcctagctgtaacattaaggcattcttttgggagaggtggaggcagagccatttattggttgcatgagaccgttggaggttaacgttgagtaagaatgctgagtggcggtgatggggtaggtaaaggctttagtgtccaggtgaccttaggaggtaagctactaggtggagggaggctgggaaaactaacctggctcactagtcagtttcacaaatgtggcaaaagtggggcttggaacagggtggctgtgggcagctagctgcttttaagacactgaataacctatcaagtagactttgtgtttcttcaaagccttttttttttcttctttttttaaagtaggcctcctaaaatgcacttaaagatgtcaagttagaggtgtaggccttagcttttgtcttcactgacttagtgctagtcgggatgccagactctaactgcgtctagtagcttctcatgacaacactgaggccccactgccagaatgttcctagttgaggatgggactgagtttagagcctcaggtgcatctgatgaaattaaagttgtagtattggtttaattacagaaaccatataattggaaccatgtgctaattatgcctccaattctctaacaaacatcccacttaagtgaaccccttactaccttaggccataggactaagtcttaacatcttggacacttgttaaaagggaccaaagtgagtttgaggcctccatagaatccgtatctcaaggggaaaggcccacctgcatcaatgtggacagagatggtgcgtgtaaaatgcagattactgggcacctgtcctacctacatttaataggcgccccagctgttgctaatagaattgaagcatgagcacctgtgctcggtagagaagaggtggcatctcatggagcttccagtagagtgggcagatggccactagtttttatataaatgtaaaactgaggttctgacctgtgatctgcttatgtgcctctgcagtaagggacctgacttagggagatcagggaagccctgcttaaaagaacgatacctcagctaagctccagttcaaatgagtcgaatgaggcaaaaatggagaggggaaaatttccagattaggttaacaacaatctgcaaaagccctgtggtagaaaacaaccagggggaggccacagtgtgagaatactttggaggacatgacatgccaggt

SEQ ID NO: 677 - DNA, 193966 bp, Homo sapiens
  source 1..193966: mol_type = genomic DNA
gctcttgtgaacccggatcagttccgatgtgtaaactctaccgcctggccttcagcgaacagatacagatttctgccaccttccatgaccctacagttcatgggactgggtctggggcagtgccagaggcacgcatggaggtgtgattctaggtgagtcctgcggaaaacctctggcccacccgtgagtcacggacagaacatgcagactcaggccttggtgacataagctccgcattgctaaaaccgcgtgacctcgagggctgactggcctgagaaccctggatggcgctctcggccacccccacctcccaccccaacctcctgggcttcggtcagaatccacagcccgtgcccgaagagcgcttcccgcctctggcaccctaccttcgctcagctccagggaaaaggggagagggcagctttctgcagtcagaggaagagtacattttctttggctgctctaccctctgaagtagggcggccagctgaaggaggacacacttttgaggggcccagaggttgtccaagcttccccctgccccctgaagactgtgcactgagctgggcgcagttctcgggaactgtttccacccagattgctggggggcgggggggtaggatgagggcagagccgagaggctgtccaaggtttgggagagagaaaagtttctcccaggactcgaccttggcctccagcaatcgcgacagctaaaaacgggtgtctcgcttcgacaatagatccccgcggaccttctggcacctggttcactagcgcccgcgaactctgcctcgggagacttattgaaatccggatgctcaagccgggaggcgcgcagtaaccaggaggatgagagggccgggtttgggctaggaaagcggccttttaaaacagatgtcagggggactgcagccccgagccatgagaaaaaagttaaaggcgagatgacacgcactgaattggggcaaacattggaagaggagacaaaactgcgtgcttgagcaccggggtgcggggagggggggacaaaacccgtatccagtgcaaattaaaatcttgggagtaggtgggggctgctgcgcgcccttcaccctcagttcccctattaaggattctgagtccccatgcactcctgtcctctggctccttccttcctctccgctcggccggtgagaggcggccgccggcgccccagcagcagctagatgtcaggcgaagcccggagcgcggagcgcggggaagggaggggaagggaggggaggggaaaggaggggtggggcggggagcgcgcgcgggctcggccagtgcggggtggtgggcgggctgagcccggggacggcgcgggaggggggagggaaggggggcagctgtgggcagggagccgggctcggccgccagcactaaagatggagaggcgccggggccttgcaggggagggggctcggcgttgacgtgggacgcggcggaggcgcagcagccggtggtgatttgctaacctcgcagcagagaggagttgagggcgatgagagcgggtactgcgaactgccgggcgatgctgtcgctgccgccgtgatacggagagcaacagttccccagcaacacccctccccgacacaggcacacaccccccgacaggcacgcacacccaccccacagtgcccggctcggctgcggtgagtgaggggccgggaagaggcgcaccgcccagcgagcgccgcgcgccggggcttcccggggctggagaggtctggggggcgcgcgctcgcttcggccactcggccgctgggcttgtgccttttttatttggcgtgttcccttcctgccgctgcagccgtcgccgccaccggttgggggtcggctagaagggggagccccggctgtcagcctgggcgcagctgcctccccagcccttcctcttcagggcacggtcggggtgagaggtggggggcgtagcggtgtgcgggggctgagggcgtgagcagaggggtcggggatccggaggctttgtaccgccaggggctggcggagcaacagagcccgtgggtgctcttatgtatgcggaccggtgcgcgggcgcaagataaggttgtggtttatttatttgtgtgtttattcgccggccggctgggaagctagaatcggaggagctgacgagtagatctgggggcggaggggagcaggactgggactgcttacgttttgtttctctttgagaaaacgtggtgggctttttcttgattggacttgatccccaccccccttttgcaggggagggagggaagctccagagggtctgcagcgctgcgggccctcctcggctctcggcgggaccggcggtgacaccggagctcgccgtgcgctcccggccgctctcggtgggtgccggtctctgcacctgatgcgttcgggatgcctttcccaccctggcgcgcccgccgctagctcgcacagcgcctcgcacactcccgcacgcgcttgaaatgcgcacggtcccgccggcccgcggaaccacccggacgcacggagcgctccgcaccgactcgctcgccgcctccccgagacgctcgcaccgtgcttgggccgggcgcgctggccgctggcgccgctggccagaggcctgggacccagccggtcgctcccagggggtcacggccctgggtcggagagggagggcgggcagaccccttctcgcctttcctcccacaactcgctgcggggcttttgtgcttccccttcgccgcggggcgggtccgcctcccctgccgctctcgccgcggagtccagcccgcccggactgtcgccgttcctccccgtctctttcgctttccctcgtccctagctcagctctccttctttcaggagtctagctcctcgggaaaagttgcttccccaagtttgctgaagtcgtctccaagtctcggtgggggtcgctgggaactgggggggtgtgagagcgcggtcgatccccggagctcgggcgggttatcgccggctcttccccgcgccgcctggctggacgctgcagccagcgccagccggatcgcgggcgccgagcggcgggtgggggagacggctgcccgtgggcgcccagatttccctcaggacccaaaaggcttgtttcagggcgccaagcttccattcttttggctgttccctcctagttctcagaaaccccgatgtctgcgggaaagcacgcggtggctcggctcggctgaatgctcatcccaaccttgacggcctccgtccccaccccggggcgggcagcaaaaatgtcttgaccagccgtcctgtgaatcctttctgcgtgagcttggtggctcctgaactgatagagctccttctgggggtggaggcaagcaagcagtgttcgaagagtgagggagagaccttgctgttccttgctctcagtgcattcactgcaatattggtcgctgtaagacagacacggggagggtcctgggcctgcgcggtctttctaacactcctgtaagcgaggtttggagtctaggagccctcttattgatcccgaacaggctctgggagaggcctttgtttcccagccctgtcttcccttcgtactggttgtaactcacaccacaggtgctggtgccaatatcacttccagcgcctctgagccatgtccagcatcccttgctgcccctggtcacaggacttgcagactccttggagcctgtgggacacacgtggagttcacacacccagcccagcatgagcactcctggctgtaggggaccatatttaactatggtctctctccataccttaatgacccatccttcttcgttttttagatcctcctgtccaccgggcagttgtgggcaggagggtaggtacgacaccttacgtaagtgtgtgtgtgtaaacacacacacacttttttttttttttctgagacggagttttgctcctgttgcccaggctggagtgcagtggcacaatctcggctcacggcaacctccgcctcccggtttcaagtgattctcctgcctcagcctcccgagtagctgggattacaggcgggtgccaccgcgcctggctaattttgtattttttgtagagacggggcttctccatgttggtcaggctggtctcgaactcccgacctcaggtgatccgcctgcctgggcctcccaaagtgctgggattagaggcgtgagccaccgcgccctgccccacacactctttctgtctgtctctggctggtgtacatacacacagttcagattttatattatacatacaataactttgaggcttccgtgggtagaaatgacccaagttagtgtgtgggttgtgtgtgttcctgttagtacctagggatggggacaggccttgggtctgccagtgctttgcagccctgagaacagtagaaggccagaggccaaggctgatggtgagaggatagcctttgcggaggagagcccagtgtccatagatttctgtggccatggctacaggctcctggcctccaatgagtttgactctgcttctggggctcctgtagtgaggcagagtttggaaaaactgtttaaagataaggcttgacatccagggggctggcgtgaagctgacaaggaaggggctaaagtcttgctaattttaagtaagtgcacttcatcataatgaatgttggccttgcctagggagcccctactctcagacacagagaaagctgaggacttataggacttcactacaattttcatttcacttcatctaacagatgtcatagagtagtgaattaggcatctgctgtggcagaaccttctttttactctcagcatccctggcttgaaaggcagatttgtagatttctaggaagctacttcaattaaaatctctaagatcctcttgctaagggcttggcaacagggaggagggggcatgttgtagtggttgaattcttacttttagggacactgatgaatttgtcttttgttctctcatctcttttgcttcttcccctcttctttctcctagcctcctctattggcccaggaagcccacccagccccgccacgcagagcccagaaggaaagaaagcctcatgcctgagccgaggggagcaccatggatctgacaaaaatgggcatgatccagctgcagaaccctagccaccccacggggctactgtgcaaggccaaccagatgcggctggccgggactttgtgcgatgtggtcatcatggtggacagccaggagttccacgcccaccggacggtgctggcctgcaccagcaagatgtttgagatcctcttccaccgcaatagtcaacactatactttggacttcctctcgccaaagaccttccagcagattctggagtatgcatatacagccacgctgcaagccaaggcggaggacctggatgacctgctgtatgcggccgagatcctggagatcgagtacctggaggaacagtgcctgaagatgctggagaccatccaggcctcagacgacaatgacacggaggccaccatggccgatggcggggccgaggaagaagaggaccgcaaggctcggtacctcaagaacatcttcatctcgaagcattccagcgaggagagtgggtatgccagtgtggctggacagagcctccctgggcccatggtggaccagagcccttcagtctccacttcatttggtctttcagccatgagtcccaccaaggctgcagtggacagtttgatgaccataggacagtctctcctgcagggaactcttcagccacctgcagggcccgaggagccaactctggctgggggtgggcggcaccctggggtggctgaggtgaagacggagatgatgcaggtggatgaggtgcccagccaggacagccctggggcagccgagtccagcatctcaggagggatgggggacaaggttgaggaaagaggcaaagaggggcctgggaccccgactcgaagcagcgtcatcaccagtgctagggagctacactatgggcgagaggagagtgccgagcaggtgccacccccagctgaggctggccaggcccccactggccgacctgagcacccagcacccccgcctgagaagcatctgggcatctactccgtgttgcccaaccacaaggctgacgctgtattgagcatgccgtcttccgtgacctctggcctccacgtgcagcctgccctggctgtctccatggacttcagcacctatggggggctgctgccccagggcttcatccagagggagctgttcagcaagctgggggagctggctgtgggcatgaagtcagagagccggaccatcggagagcagtgcagcgtgtgtggggtcgagcttcctgataacgaggctgtggagcagcacaggtaggccccgctccagccccgcacctgatgtaggacttgaggccctcacacccctccttcacaccctggctgctcccaagttaggggcctggctcccctgtcttggcaatttgtgaaaaaaccagaacacttcttctaaagttctggcggggaggggagcaggttttttaaagtgtagtgagggggcctaggatctttccaaaaagcaccaggggacactcatgggcgcagcttcttaataggcccttccctttgttttttgcttttgggcccctgtttgttttttcggctgtttggtctgttctcctttgcttggagtgactgataaaatggagagaaggagaaaaggagtgggatgagggtctcttgggccctgcatctgaccatgttactaggtttcaggtcctcgggttcccatgcagtggtccctgtgaagacagcctgtccctttctgcagcttgggagaatgggagggtctgggggctgcttaagccacaagagcagctgcaggttctgaaccttattcctggtgaaagttaatctccttgctctgtctcccttctcattctctgatcctgcacatgcatttagggggaattgatttaaatgcaaggggaaaggatgggtataagagtcttggtcttgcagcctgtgaagtctcattcttatcccatctctgctcacactgaactaaatgccgcttcaggctagcattggcttccctccggcttccgtttccttctctatgaaataaccattcattgagctcttatgacatgtttggttcagtactaagcactttccatgagttgcattttcattacaacagccctttgagataggtaatgtccttcttttttttttggatgtgaagtttcgctctccttgcccaggctggagtgcaatggtgtgatctctgctcaccgcaacctctgcatcccgggttaaggtgattctcctgcctcagcctcccgagtagctcggattacaggcacgcaccaccatacctggctaattttgaatttttagtagagacgggctttcaccgtgttggtcaggatggtctcgaactcccgacctcaggtgatcggcctgcttcggcctcccaaagtgctggattacaggtatgagccaccgtgtccagctggtaatgtccttcttttacatggaacaatactaaggctcagatgtcaagtctcttttctagggtcacatagatagtaagaggcagagctggattcaaatttaggtccttaccccctggtactttgctgcctcttggagtcacttagacttgaagaggatcatgtctatggaacagagcgttttgaagattgcttataggaagtggagtaaataacaggggggataagtagcgagtttgttttttttttccttgcttctgtcataaaccacgtgcccatcattttatcctctagtttctgggtcagatgaatggagtcaagaaatccagctttctgttgtcattgacgacagcatttggctgcataccctgtggtctgctgttttgctgatcttgggtggattctccacttcctcccccttcacccccattcccctgttgctcgttcaggtacgggggatgtgagtgagaggggttggggtggggatatctggaagttgatctcatcacccctagccggaatctgctctgaccctgcctcctcgacagctcagaggcttaacttgtggaaagtgtggcagagctaaacgtagccgactttttccagtgggtgcgaaaaataaccgccactaaggtgtgtcttcttgatgcttgtaccgctcagaaatagactgaggttgtgtttgtttttgctcaaactttcctaaagaggaaacccgctccccaaagttgaccagatagatgtatcatctttccggatgtgaattatttcggctgtgtgctatgagaactgggtatggtgggaagtaattgtttttctggctctcatcaggtcctggttcctggttgcttttctttacccgagagggccacaaaagataccactctcctgagacttccaagttccccttcagcaagaccctcattcctctggggagagagggagagttggccatgttatattcgaaagagcctgggtattggaattggccatatttagtggtgagagcctgtgatacttatttaacctttctgggccttgtttcactcactacatttttttttttttttttttttgagacggagtctcgctctgtcaccgggctggagtgcaatggcgtgatctcagctcactgcagtctccacctcccgggttcaagcgattctcctgcctcagcctcctgagtagctgggactacaggcacctgtcaccccgcccagctaattttttgtatttttagtagagacagggtttcaccatgttggccagaatggtctcgatctcttgaccttgcgatccatccacctcggcctcccaaagtgctgggattacagctgtgagccaccccgcccggccttcactcacttcttaaaatggagacggtcaacagggttggtgctgaattaatgaagtaagatccagaaatcactagagctgtgatgggcacatagtcaccgcagcggtggagaactgaccatctgtcccttgtgttgtttaggcctcatctctgcatggtcctcattggctctgagttctagtgtgtagtgtccacagtgccaccctccatgagggttgtgttgactgtgaggtggtgcagagaatgtccctgtccttgtgagcatatgacagcaagacactggccctggaatcctccgtgtcacatgtgggctgctgacaggaagaatgtgcttttgttgttgttgttgttgttgaggcagagtcttactctgtcgcccaggctgcagtgcagtggcatgatcttggctcactgcaacctctacttcccgggttcaagtgattctcctgcctcagcctcctgagcagctgggactacagatgtgtaccaccatgcccgactaatttttgtatttttagtagagatggggtttcaccatgttggtcaggctggcctggaactcctggccttaagtgatccacctgtctcggcctcccatagtgctgggattataggtgtgtgccaccctgctgggccgagaatgtgcttttgactgagggtggaaagtcagcagctgcagcccaagaagttagagccaggggcagtgcctttgatgggaagcttgggggtctaaagaaatcagaaaggggagaaaataatcctgcgtgtgctcagccctcactcagatcaacagcccctcgggtcccagctagatgtactttgtagaaggctttttttctccccctcaccctcaaaactccaggattaatgtgctattcccttttttctactgttctctgtctccccccaacccatcagcagtctgagaaatgctatggtggaaaaaaaaaaacaacagccctataaccagtacaaacaaaaagccaagacaaaaaaaaaaaaaaaatcagaaggggagattttgaggccaggaagccatggcattcactggaaatatatcagtgataaaataacaggctacagggtttattttattttatttttaagtcaataggcctgagtgttggtaaagactagatacccagcagtccttcttgcatttcttcttggggtgggggggcagaagggaatggagaggaaatgaaggcggattgctggtaagtgaggcaggaaggcagggagtttattatggaatgtcatcggtaagtttccccatgatttgatcccaagctggtgtggagtgaagggtaagctgttggctcaacagatagtgagaatcaaacttagtggagttgtagagcctgtttcctgcagcggacagcaagatgtacaagccgtccactgcaggaatgacgtgctgtaaaagggatgcagtgtcaagtgtagtcatggatgggtgggaagaccagacaaaggcatccaatgggactgacttacctaaacaaaccagaaggaagtcagaacagtgggaagatctgatagataagcagtattctgcaggcagatgaaggagcaagctttgggcccccaaatcttcaccagtgcatccacattacagaggataatgcctgagggaggggaagatcatctcaggattctggaacactgggccctccctttcttattccaaaaggctggagcagttctgcatgtaggcttctctggaaatggtctaggaaccagctcatccaggccaggagcacctgatcattctcagagttacgtacatatgcgataagattgcagggaacagtatagttctatagacttaagtgtgaacatagtcctcatttatagtccctagtctcccatggctcacgcagcttggtctttatgtgtttctgaatttagtgctgcagaggcacaatggggtctggtttctggatcttatacagacaagcacttaggtcagctgcagtggatgtcctgcacagacaccgtcgcaactcttgcctggttcctttttgtttttggagatggagtctcgctctgtctcccaggctggagtgcagtggcgcgatctcagctcactgcaagctctgcctcccaggttcacgctattctcctgcctcagcctcccaagtagttgggactacaggcacccgccaccacgcccggctaattttttgtatttttagtagagacagggtttcaccgtgttagccagtatggtctcgatctcctgaactcgtgatccacctgcctcggcctcccaaagtgctgggattacaggtgtgagccaccacgcccggcctattgcctggttcttgaagggattctcaggaaccacagggaatgtctgagccagctttctggatccgtgtgtacagcccttcccagaggctttgtggagccagctgtacggtgcatgagctttgtggctaagatatcagagttctgcctggcccttggccttggtctctctcagatggtcagctgctctgtttttagtggttgatcatgtagaaggccaacaggtgttgaccttggtttaggctacttttgggatttttgaggtttcctgagactcttggttttctttcatcatcccgtccagaacctctgatgtcaaactaaattctgtttggaaaagggtatgctgtagaataatgatagccacagcaatgatattaataataccttttatcggttgcagcattttcttctttgcaaagcacctctaatgactttatctctcttgccctcacagccttccttgagtgggtacaggtccataatcccatatctgtgataatgaagtctgaaaagctctgaaaactaaaaagtttgcagtaaactcatttagtggcaaaacctgatctgaactgatgtgaggctatatttatcctgcttagtttgaatattcatatgttttgctgcaaaaatattaatgtgtttgattacagagtgctgccctagactctgctggggctgttaaacacgataggtgtcagagtacctttctttttttttttttttttttttttttgagacggagtctcgctctgtcgcccaggtcggactgcggactgcagtggcgcaatctcggctcactgcaagctccgcttcccgggttcacgccattctcctgcctcagcctcccgagtagctgggactacaggcgcccgccaccgcgcccggctaattttttgtatttttagtagagacggggtttcaccttgttagccaggatggtctcgatctcctgacctcatgatccacccgcctcggcctcccaaagtgctgggattacaggcgtgagccaccgcgcccggcccagagtacctttctaaagtctgaacagttttggtcgttgaagcacctgaaggttttggataagggattatgaacgattatcattctctattgacaaatgaggaaaatgagatttggagcaagtaagtgacttcccatggtcacacagctataaatgggtagaaccaggcactcagcttgccttctaattcacagtcctgggcgctctgcaccaggccatataagaacatgagcattgctcttctgggtcaaatccatctgacctagtctttggttgccatcaccatgcctaagataccaccattggaggctacaaccatcttccttgacgtcaatcctaaaggtcaggtgtagcttctcttagtagctatttatggctgccttgtcattcacagatttgccaaaatcctttttgaatccatttccatttccaggaagtatcctttttaggggtgatgaatgacaagtttataatctcctgggctcctggaaatctggtcttttggagagaggttgttggttgtgaagataggaagatggcagaaggctttgtagtggtgaggccaggtctagacctagctctgcgtttttcagctctgtcaccattgacatcgtttttttcatcgtgagccttaacttcttcatttttaaaactaggcacttcagtgagctctttctggattgttgcgctctttaaaaaattcttttattctttgtgtacccacttatatcttcatgaagtccttttggttaattgaattttgctgttttggaatctggattggcagttcagccagttaagtagggggtcagtttgatttgattctgtgtgttctgactttttttttttttttaaaatactttaacctgcttagggttactgagccatctgggatctagactgaactcttggaacttttgaagatgatttcctttattttattttcaatggaggaaagttgcccactctttcatctcagtgagaagtcccattttaatttgccatcactattggatggagccgctaattgctgggagggagaaagctatagtttagcaacacgttttcctcctgctcgttctaggaaaactattatgaatctttaaaatagtgattatcctaaactgttaaaatcaaattctattcacagctctttgatttcttgctaattcaggagagaaacttttccaatcactttaattttttttattaatttaaagcaagccctgctgaaagcccaagtatatatgacttagagtcttactaaatgaatacaggtgtgcctcagtttgtccattggagggtttctgaattttccataactaaagattttctattctgttttggctgggtgtgtggggtgaaagctcttactctctggcagttatttaagtagtaagaaatttgctacaactcttccccacccccacgttttacagataggaaatgagcactttgactgtccaggtcagacttctgattttgctacttactaactgtgacagtggttgtgttacttaacttctgtgtgcctgtttgctcatttgtgaaacagaaataatagtagtacctacttcattgggttgttataaggattcatcagaaaatatttatcctgtgtgaggaacggtggcacaaagtaagtgctccataagtgtttgctagggtatttttcttgtcattgtgtgaagtaggtcatgctagccatgcagggtgaaaaatgtgttcatgttggtccagatcctgctttctccctgagaccgttcttccgcataggcgtcaatccgtacagtgctgtaaaactgctgcctcgggcacctcatgtttggggctgagacattgcttctgcgtcttccccagaagctgatctcttgtactgtggtggccagggtactctttgtcccattgacctgaggcctggtgagtcattccagttctcgtttaaatttagccgggcagcgctccactgccatcgggtccaaatgccggggaggctcactgatgcggtgtcctgttgcctgtgcacgtggccaggcgtgcacatcactgtgcttatgagagagatgaagagcacagataccaccttactgatgggggtcctggggctgggcttgtgggtgttgggggttccagagctccttccctttcctgcctgtcagtgcaggatgcttctaaaatgtggactcagcagacattgttttgagtgcttgctacatgtcagattctgtgctaagtgcactcacagccagcatctctgtaagacctctagctgtcctgtaaggtgggtatcagtttcacattctcagatgggcggagagaagcccaagaggttagtggacttttctctagtaaagagttgtacaggccgggcgcagtggctcatgcctgtaatcccagcactttgggaggccgaggcgggcggatcacgaggtcaggagatcgagaccatcctggctaacacagtgaaaccccgtctctactaaaaatacaaaaaattagccgggcgtggtggggggcgcctgtagtcccagctactcgggaggctgaggcaggagaatggcgtgaacccgggaggcagagcttgcagtgagccgagatcatgccactcactacactccagcctgggcaaaggagtgagactgtctcaaaaaaaaaaaaaaaaaaaaaagagttgtaccaggatttatgttcaggtcttctggctccatgctctctgcagctgggtgaccagggggctcatggcttcaccagctctggcctcctcagttcctctggtggcttcttgcgaggaggaaggttactgcagagggttcagctctttaggggcccaggccgcatggatccaaggactagtacgtcatctcttaccaacacagagagatcagcttctagtgatagaggccttttatgctgacttgaaaaacagaaaaagagagaaaaaagaaacccatttacaaaaataaaaatcccatgctgttaatttcatgccagcataatcagaaattcccctttctactgtttccccttaaaagccccggtgtccttattatgctggtgcagtctggaaaaactatggttgggttttgcctacgtgaggcttatctctgcagctgcaaggaggggatccggtactttattgtcagcatggaaacttccgctaaatacttagaaaaaccttaattctaaattcctagctcactttcaactgtgtcctcgggacctgattttcttcggtgtgaacagattgtgttcagcattgcagtagaaagggtccaagttaggtaagagaaaggacttcctgagacactggggtgttactgagaaagttgttagaagactgtcacagacattttgatgaaggggggacattctgggccatttgaagtggtttttagagttctttcctctttagggccattcggttcccccagaaataagaagaaaagacatatacacgcacataaaccaccaccaccaggcttgctgagaacaagtcaaatgtgccaccaaaccatcgtcttagtgggagatggggtggcactgcaggggcagaaagactgacgtctgatggacttgggtttgaatactagtgctccatggtgaatttgggcaaatgacttcacctctgtgaagcagcagtatcctcttctgtgaagtgaggttagcccctacctctcaatgtggtttttaaagtatgttaatgagatcacttgtaacctaaagcacacagagtgtgaggccacctccctacttcctgcttctctcatgaccccagcctgacaagggagccgctgagccccctgccaccctcacccggcgttgtgctctaagtggattagctcagcgttgtgatcttaatgccattaggcctgttggcacggctctccttgccatagtgagaagcagatgtggccgaccataatggcccttagcgtgatccatcgggcccacagtgctggggcaaccattattagtgttaatttgggggagctttttatggtagctgggggaaatgtggagggattgttggaaatttatttaagctgttcagcaggttaggtgctgctggggtctactatggcaaaaccctcagctcccccaacccatctctttaaggaacgtccctccccaacaccgaagcccaggcctgattacttccagagttggagagacaacttagcaggctcttgtttcttgccgatgtaccttattagtagcacctggcatcataacccactaatgggaaccagtgctctcctcctgcgtggccagtgacaagtagccctgtcagccggagctcgccgtgcgaggaagttcctattagctttatggtcaggagaacttgtcctgttcaggaaatgaatgttgccgctaaaggtccgcggccctgaccctggcggcataacctgtgcgggccggggagaccctgtgcaggatgcttgggatttcagcccctctctggttcttgtcatatgtaaagagggaatcattgtggtatgttgcagccttgaacttttgatttatgcagtgagggcgacttaaccgtttccatgcctggacggctgtgcagtgacagagccgtgttgtgagcgtatgtgcctaggtacatgtgtgtgtggggtggtcaaggggaaggagagacccccacgtgctagcaggggctgttgctgggagtgggtggatttcatgggaggattccttttcttttttctttttcttgcattcttgcagcatctaaatttcctgcgattgttggctgcaaagtggtaagaagctggagagcattgtgtctggaattgaacctgggttcgaattaatcttctgtctcttagaggctgtgtgaccgtggcaagattcctcaccactcacttcctcatctgtgagatgaagttaataacttctgattcatactggtggtagagcagtgttgttaagtaggtgatgtatagagaatacatggcccagcgtccggccagtggtgtggcctcaggttgtatacttgaaaggatgtgtatacttcagtattttttccattgtaaaattaagggttttttttctttttttcttgagacagagtcctactttgttgcccaggcttgagtgcagtggcgcgatctcagctcactgcaacttccgcctcctgggtccaagtgattctcgtgcctcagcctcccaagtacctgggaccacaggggtgcaccaccacacctggctaatttttgtatatatatatatatatatttagtagagatggggtttcgccatgttggccaggctggtcttgaactcccgacctcaggtgatctgcctgtctcagcctcctaaagtgctgggattataggtgtgagccactgcgcctggcctaagtttttaaaaattaaaaagaatggcatagtgcttttttgctctttaacagatcaagaccaaaagttttccccccatcatagcccaaagtcctaaagaaaggctacttaagttgttcgttttcttttgtttctcccatgagtaatgtttctaagtgtgatttttgcagagaacagcagtgtctgacctcattcttgaggggaacttttctgcctgcctcttcttgagaaaaaatgtttgtgagttgtctggcaaatggatgcgttacttttgctgctgttgctgccgctgccgttttaaaggcccctggtgacaaaggagtgaactgcactttcggggaaagcatgccggaatctggcccagaaaagaggggccgctgggggaagggtttggagatgacgcctcctcaggaactttaaaagaaatctgtccatctgtctctggcatttatggcatcgttgacagcagttcaaggaaaaataaaaataagttcttatctgattgcggggctgattgcaaagccgaaggactagagtggccagcgagtcgggcggctggatctggagttttggagaaagggccactggctcatttctgggcacgcacgctcacggaggcaagttctcacctcctcgtgggcttctcttcactttacgtggaaaaactgtgtacgtctcaaattaaaagcagctcttgccccgcttagagccggtgaaagctgcttcgaaggcgtttgtagagtagggattggaaatgttcaatgcaaaagttaaatcgtgacagttgtcccctaaatgatctgctaaattaaggatccgctaacatttgtgagtctacctccctgcattccccccacccccacccccgcccccttggcagaagggataaagatggtacctaaaaacaatgtgaagcggctgctaaatcgagtgactctaaaaacatttttctttccttgaagttcagtgtggaaaaccagactggacttgtcagggatgcagacctatatagggcccatgtgcctggcccctttcctcactttctagcacaatggttttcattgccacctctcccgcgcctttccccccttcataattatccactattttactttctgtgtcctgacagctacaagagtagtttttgtttttttgagctgagtagctgctaaatattccccagcagccagattcaacggctgggggggagaataggccaaaccttggcatcccctgttgcaaaagtgaaaaatatttctgtttgcagttaattttagtggcaagcagatcatgttaactggatgtaattgcttccagatatggccgagggttttgtgtgttgagatgaagggtctggtaagtgcttacttcctgtgtaaattagcctattccattcagtctttcattctggccagccctggattctgtcattctgctcccattttccccctccccagcctgcagcctggtgtgagaagccgcttgctatgttcctctaagtgtaattcttttgtcacttggagccactctcctcttggttcttgatgtgagtttgcccttaaataatgagaagggtttgaaaagatgccacctggaccccaggccacctcccgcctctttcccagcaaaggcagatctgaagagcatctcctggtcatgggggttgcatcttggaacccagaactccttgttttctatgcatttttttttcctactgccctctgacccccgactctcacctgggagaacaccttctctttctctcaattagtccgactcctcctcagcctgaactaagcacgttccagtgggtccgaaatctcagaaaaaatgaaacggctgttgcgcagaggagaaggttgtggccacagaaaggagttgcctcatcagacgtgaagccgccaccttgccttgcaaagcaggctgcacctcctgacacacctgcccctccctgcaagaaagggaggggaaatcccacccaagagaaccttctccaggttcctgtgggtttccagggttgcaactgaagaaaagtgttaagattcatgttctcctaaattctgcttttgtcctgtggccagtcccacattcttagtgctatttgcataagaggttgctgtttatcttcctatatcagccccactgataacccctgtggtctgtttaacaacctatgaggagtagattacttgataaatgccagtttttccaatatgcaaagataaactgttggggtcagggtgaggggtggtgtgttatgaaggaggggacaggtggggagccaggaccctcttttagtgggctggagaagtgtgaaagagcctgatgaaagaaaacaggtagcttgtcacatacaacagctgcatttatcatacggttgatcagcttcctgccctcacctacttttctcctccttcatgtggacatgcagagtctctgagaacatttcatcaagtgggttgcctatgcccacattaatacaagatgggaaagggtggaggttatctttgctttttaagttcccatctttttctcccttggtcgtctcccacccctacaagttgttggctggtaagcaattgatgctcagaaaaatgatgttcatctgaaatcttaaatgagtggactttttctaccttccctgactttgcaggtgcttcttgaagagccaaggagaaaagaaaacttctgacctcatcacctagtcaataagctgtctgagaaacaaacaaaagagtttagactggctgctaaagctaggaacccagctgatagctttgttttgatgtccttgtaatgtttgcggatcgcagagggtgctatttagagcagggggcatctactgggacagactcactgggaagttgaaacagctagctcaaagtccaagagatgctaaagatagtgaaatacagcccaggaattgagggggagggggttcctcactcaagaaggagactttctaggagggggcgggcgtggtattttctagggacagtatggaatgaagggaagaaggttggctttagaaggaggcaccctgtgggaggctgagacaggtgggtcacctgaggtcaggagtttgagaccagcctggccaacatggtgaaacccagtctctactaaaaatacaaaaattagctgggtggcaggtgcctgtaatcccagctagtcgggggaggctgaggcaggaaaatcgcttgggattacaggtgcctgtaatcccagctagtcgggagaggctgaggcaggaaaattgcttgaaggaggcggaggttgcagtgagcccagatcctgccgttgcactccagcccaagactttgtctcattaaaaaaaaaaaaagaagaagaagaagaaggaggcaccctggatgaagactcaggctccagaatttactatctgtatgtcttgggcaagtggcttagcttctctgagcccctgtttacttttcttttgaaaatgaccaccttgtccatggtaatgaggataaaaaacgtgtaaagtgcatagcagagtgcaggtgtactgggtagacatgtatgattgcgctgtagccctgttatggcccggggagaaactatgaaaggaaccagtgaaatcttttgttttgggcactgctaaattgatgatagtactaaccctgtgctagcagccagctggtgaaataataggtgaataatgttagtacattgtgaatataaaagtttccatttgcaaagtgctactgctgttctaaagaagccacatttctaataaatgattgcttaatcctgtgatgctgccacagccccacagagtttgggaatgtttgggaattctttctgaagtgtgtgccgcattcttttgctttgccttttgggagggtagatgtgactattggaaatggtcaaaataatgcagtagcaaatctgttgactatagtgagtgataagcactgtcggctgctgtgtctgactcggaaggcagattctggaaggggtgtgtggggaaggcttgttggctcagcactggggtgagtgttggcctcacttcttaggtgggaagtggacaaggccaaggggcttttgatttccagctactatggctggactcccagtgaggaaggagtcgctgccatggattgcctgggactgggaagactccttttaactgctgtaatgtttctgcatttgtggtttggcctcctgtgagtttgggctccggggcggcacttctgttgttaaaagaacagaaaagaaaacaaaacaaaacaaaaaaccaggactgtcactgttagatgttggttgaggctagaaagaatggattgagttttgaccccctacaccccggggagtagggaggcctgggaggcacagtggcctgagtttgaattctgactctgcctctttggaaggctctggaaggttaaaggagcttgtgtgttcaaatcttagcctggtacctggcatatactcagcatgtatttttttcccctttcctgacaatgttccttgccccgaacacttgaatagtggagagaggaatgtttgcttttcctctccattgaaccaacactcgcccatccactgagcccaagattcaccttaggattgtctgttggactcggctcttttgtgacctaacagtgcaggggccttgtgctgagctgcacatgctcgctctcgctggtgctccctctctctctctctctctctctgcattatttatagtaaaccatattagaacagagtgttaaagaggaaggatgagtcattcccattgaaaccattgatgacataaataaaagcaaaatgcttactatgtgttttgtgcagtatttaaggccaggttgtgctaatttgaatgctcccaaactggatctgtgaaagcatacatatgtgggaaaaaattcaggtttaactagagggaagttatttattgaaaatccatttcagtatctgctttctcccttctatttacttcagatccatattcatatcatgcttgttgttctggctaacgagagggactggcttattcactagctaaggtttgtttattttcggaaggttgaggaatagcacagagaggttgtctaagtgtccctgtctccattcctcctcttgccacctgttgaggaaggcactctccacctgctttgcaggcgtgggctctcaatgtgtccaagaatcacagtcagagctgaagggcccttggaatcatttattgcagcatgctcatttgggaggagtaagtggaggtccagagaggttctgtgattttccctaggtcacacagcaagctagaggcaaaaccaggaccctcactcccagcccactttaattcttccttcacaagcctgcctgtgactgcccaggtctgttctctgcttctaccaaggggtaggcaagactagaatctgacttgagagcagtttcagatctttgtctgtgagggatgctggggggtttctggcatggtgacttgcctcctgggacactcattaacctctctgctgctgagcctgagcagactaatgtacatcaactccttaggatttacagacaatgccctatgttgggggttttgagacccaaagattgctaagacatgggacttttccttgaagagcttatactttgagttaaaatatgtatgttgatatctatgacagagaataggaaatggaaagactatgatatatatattcagagttgaaatgacttctgtctggagtgattcattttaaattttaaaaccttgttgagcacttactgtctgctgggcacctgggtaggccctgggaatactgtgatgagcaagatagacaagacgtctaccctcctggggctttcctaatggggaagaaagatccttacttagctagcagtcctgtccgtaactgtgtaagggtgattttgatacatgttgggagcctggatgaagtagcacatgagtaggatattaaaggataagtaggttttgaagacggggacagaaagaaggaaaattgtggtcagggccaggggagaaaacaaggagtaactttctttggcaggaatgagggtgattcatgctggaatggtaggctggggtcagactgtggtgctataaatgcgtggagagagattagagaaggcagcatgaagaatggagagaaaatgagtttgaagttgagcagacccgggttcagattttcatgctgccacttgcaaactgtgtgatgttggccatcaaggactgtgaactggctgggtgcagtggctcacacctgtcatcccagtgctttgggaggccaaggcaggaggattgcgtgaggccagaagtttgagactggcttgggcaatatagcgagacgatctttacaaaaaaaaaaaaaaaattaaaaatgcagctgtgcatgcccataatcccagcttctcgggtggctgaagagggaggatggcttgaacttataagttcaaggctgtggtgagctatgatcacgccactgcactccagcctgggcaacaaagtgagaccctatctctatttcaacacaacaacaacaacaacagcaacacacaccatgaactgtagcttcttcattcctacagtgcagttattgtgtgggatagcctgaggatttggggtagtgtacttaacacactctgcacagtgcctgtaacagtgtagttgctcaataaatataactgctgtttgttttaactgctgtttctttttggactttatcccgggagagttggagccttggaaggcatttgaaaaggagagtgacgtgactggagtgctccatactgatgtgacatccactaggcatgtgtctgactgccccctgctccttccctgccttcacgagcctgtctgaaaaggagtttagtgcgtgatcatcagctcctaaggagacctctcccctgtatcttgtacctggcactctaccaagatttgatgagaggacatgaaatggacccttgccacctctcggtgggcggggaagctgggagaggggcctggggagagggggtcttcagctgtcaggatcaaaggaagtgacactctgaagctggtctgccggactgttacccgtctctctaactctcttttaatagaaacccagtctcccctcttgcctccctgatagtgaacagcgacgctatctcccgcgggccagtctcggctgtggtcgtagcactacgcaatgtctgcaaaccgacagtggcatggggagataagggccccaacgttgtgtaacgaggggcatgggctgtttgcccgagtggctcctggcccctgggtaactgctaacctcaacggaggagcgggccggccttggaaacgccgttccagggcccctcgctggttccacggatgcctttttgtggttggataaaggaagctcatgtaggccgcccacagcgcagcatggccttgggctacgggtgtttggttgttttgtttttctcttttctttgtcttttttaaaaaaagaagttgaaagggggatagtcttgcttggcacctaccacctttaacccaaaaccaaataaaacaaacagttcctaaatataaattaaacttcaacctgcagtatagacatcctccttccctgcccgaaacccactggccactggaggctagctttaagaaattggttttggagactctggcttgaaaaggagccatgcccacttgtctcacgtcccagtcgctggctccagggggccgtggtagaacatatattgtacttcagctgcctttcccctccaagcttcctcagccacccacagccctttcagatgagctgagccctagcactgtgccctctcccctctgccctcttagggtgatagaatccactaccctgacatctggggttgccctgttctgctgtggtgggagatgggctggaagggacttcggaggctctcccgtgttctgtaccacccagcttccccttggatccctccacccccgcagccaggagagggaagtaactgttctttgagcaggacatttcattttcaaagtattcttgatgccgcccccccgccccaccgccaagaattctgctctgtgggtgatacttataaggtaactatatggcttccttatttaggcagcagtttctcttctatgattttagttcctctcatgattcttataaccctctctcagatacttccaggatgataaatcttctatcactgtttcatctgatcacatcagggtgattatatttcgtgacataaccaggtggctttaatccgttggtggaagaaccaggctctcacctccattgtttaagatgttatgtttctactaatctgtccactgagtgtctccatcctattgtttccattgcatgctctcaggttatttcctttgttcttggctgtctgattgctcccagaggctgcagttattttattttatttatttcattttttggtggcagtaggggattgatctctctcttgcctttagcttgaatgggtggtcatttccaggcttacacattgctccatgcccactgtaggggtctggcttagagatggtcgggggagagaaggtggtgatttaaaagatttggaggcggtggcttacattgattttagcttatctaaccctttagctagaggctgctcttccctcagagtgtccaactagctgtaacttaaagcaacagagaaatgtatatcatcccttttcttgcattaattagggctgagaaattcattatttagagggataagagctccggaggaggagggttttttgaactaatgtagagatctgtggccagctgtgtgattctcaggtagcaggtgagcgggtgggggttgatgagaggggtgagaaggagcaggtgccagggtcaggcaggggagggagcccccactccgtgcatcatcccagagccctgttcctccaagcccagattagacacccttctccacgtggggcctcaagttagaaatcctgggaggaggccttattgctcaggatcatctgggaatgttgctttctgggtttaaaatacagtcaatgtttagatgagctgctgttcaggcacatggtctggttagcaaagggttaaatcctgcatcccgtttttagtcatcaagctagctcagatctgcccaccttggagccctgtgctttcctgccttagtgggcagagtctaggggacctgtggcatgttcaatgattgaggactcttgtccagattccaaaaacctactgtgatgatgctgttctgaagctgtggtaggcggtgattgagtggagtgtgtagtgaccctcaggaattcttcagaagttaggattttgacgatacctctgataagttgggtttttaatttgctggtttatcttagagtggaggctgtggcccacagcaagtagtacattttccatctcagcccagtgcatggacaaacgtacctcaaaccaaaggttcaatgaaactctatttatctttactatatgctctggtatcttctcttccattctatcttatttcatttaagaacgttaatgaagacccactaatggattgccacccatggttcgaggaggtcccccaaacagtgaggccttagccataggtattcaattcaaaaagcatttactgagcatcactgtgtactaggtggttgctaaatgctatgggggtaatgcagagaaattaataaatccctgtaagagttcactgtaaaacagaaatgacagccatatgtgtatgactttgtgtgtgtgtgtgtgtatatatatatatcagactgtatgattaaatattatataagtgaggtatgggggagcagaggagaggaattgaattttgaattttgattgaagattcaggagggcttcatggaggaggtagcatttggccaggttttagagaatggctaggctttggacaagtggagacaggaactgccatttggaggtaggagatgagctaatgtgtggcagtgtatgggtgggggcaggtgcctgtatacaaggtagtgtgctggaatggggcgatgggcatggggtaggatgggagatcaagcagggaaagtggattggggccaggtcctagaatgatttgaataccaagctagctttctggacatttgtaaggcgcacttgataggggttggatcattgcgatattattggaagacaaaactggggagggtgtgagaccatgtggctgctcagaatgcagagcccctctgatgtcctcagccttctacgtatttagtgatgggggtggtggtggtaaagagccttgcagacagcctggcttgggtgcttgcttgaagttcttacgcccactaactcctgccctgctctgtggagcctgctgaatggggcattaggctagtcacacacctgtcctttttcacattcatgctgtaccctttgcaaacattacgcagcagtgcaaactcagccctgggcctcagaggagccaggcgtggccaggagagtgggatttggaacggaagtgcttttgtttttggcattcactactcccccacccccactggcacttggattgtccttctttttctccttggtgtctctcatcctgtccagccttcaagacctcctcaagtcaggcttctctgggaagcgctgtctgtctgtcttggtgcttgctggcttcctcttctgtctcctgtgccatctccagtttgcaccatttgagtataagctctgctgcctcgtttgagtttaagttttatccccccagccacaacctaagttccatgaggatagtgattgtggtttatcttctctccctcagctgtctgctgacaccatgctgaatacatagtaggtactcagtaaataatagctaattgagcatttactatggacaaagcactttacttgcattaacacatcccatcctcacaaccacctgtgaggtgaatcctattaaaaggaatacttgggtgctttcagagttattctctccagctttggacttcttgtttcatttgccctgagagctcctcaactctgttgatgctgttctttcaaaggttgcttgtgacctcttagttctcaagagcactgtattaggttggtgcaaaagtaattgctattttagacattactttcaatggcaaaaactgcaattacttttgcgccaactaatactttcccagactccagtattggctccattgacccctcctgttcctgccaacttctccccctcctcctctggtatttcctggaactccctccctagggtcagtgccatgtggtgcctggaactccctgggatctgtgtttgaatcctgacattgccactttctaagtggcaaacactttggccacctccccctcttcctgagtctgtttcatcatctgcaaaatgctggtagtttctcttctcacgggaaagatggtggttgttcatcgatgtctgttgaaaccgtgaccctctctgctgaatgtagaagaagatgaccttaccagttctcctgtctctccagtgtctttcttgacaatcttgtggtttccacaagcaaccctctgtgggtgatttccagatctctacctctagttgtttttcgttttttgtcttttcttgtgtttcacacattcttttccagtagcctcacgggcacaccagtcctgcaaggatctagaatgtgatgtgtttgagctagttcaacaccttcctctcgaatcgtctcctgtgtcctcatgttttgtggtctctgccctcttcccaggcacccaactgcagactttggcatcatctgtggctcctgtcttccctttgccttccatatccaccatttgcctctccagcctacttaaccagatggctgtcctgatttcctcaccagccttcctgcagtgcacccctgcaaggctcatcaccccacttccctgagcagagtagggctctgatggggttgctctcctgctctgaaccctgcagtggctcactatggcctattctagagaagaaacgagagaattcttagcgtggcattcaaagccatccgggatcctagattccagctacattttcactcttcatccctttctctgcatatttcttagaatgtacacccctgaaggcagggaccatctttttcacatctgtgttacaaccttttagtccactctctagcatatggcaactcagcagatgctgctgttgagtaaactcttatgcttcccttcccatgccatatccttctctggtcatcgcaacagggccaaatctctcatgcttcagtgtaaatgccctctccttgcagcatcctttcctggggcattcttcctccttgcatccagttggaaataatatgtccctccattggagctcccacaccagaagaggtatagataaagccagatacttctttttttttttttttttttgatacagagtctcactctgttgcccaggctggagtgtagtggcatgaacttggctcactgcagcctctgcctcttgggttcaagtgattcttgtgtctcagcctcccgagtagctgagattacagacatgcgctaccatgcctggctaatttttgtatttttagtagagatgcggtttcgccatgctggccaggctggtccccaactcctcgcctcaagtgatcttcctgccttagcctcccagagtgctaggattacaggtgtgagtcactgtgcccggcctggatcttttattgtttgtatttctgttcatttcttccctaagaaaccccacgtttttgtgggcaggacctggaatcctattcagttatacagccccgcttcgtccactgctccccttcagagtctagtgccctggacatcataggtattcagtacctcttgctggcttaggaacaggaggatgcctgatggccagggtgttcctctgaagcaggggtggctgagctttttgaatatctgcattgtgctaagggttaactacccaggcagtactggtggggaagggccccagaagcaggcccagactcaggtattgttaaagcagagtcatctttgctctgaagttttttcttttatcttttcttttcttttttaattgggggaaaccttgtcctaattggcatctttattgtggcaggaataggccaggcagggctgggggagtgtgaagtctgtgaagggaggtggcctgggggcccccccacacaatgcctgattgtgcaggcataggtatgaacacattgcagcctgtgtgcacccacagggtgaccacgagcaaggcctggggacgaggactacgaggcctgcagctgggtcctcttttctccctcctcacccccacccagtacccacgtgattgggccacatcccagtaacaagcagtccttgtggaagagccttcatgaagacctttgctgggagtggcgggcagggatctgcggggagcgttgctggttcaagctggggctttcctatggatgatgtcctgtgaagggtagatcctggagggacagacaggtgtctgatctttggcaggcagggatgtctcatttgtacattataggtattcagtatctcttgctggcttaggcttcataatgtctcatttgtacatcatagccttcagtacctcttgctgatttggttaacccagttgttataccacgatattgatttttcatgccattttctttaggaagattggaagatcattgaggatagggactgtgaccttttctttttttctaccccagtacccaacctggcaggtagcacagcgcaatgatccacgatgtttaataggttgaattgtagagggggcctctgattccaaagatgggggcagaatatcagtcctctccagactgcctgggaatcctcctctctccagcctgggcctggccagtgggagacagaggctgctgaagtagctggcaaggaggcaaagaagatgatgacctagctacggtcctcatgtgcccactggggaatcatctttttgcatctgagttagtcaatgtgctgtgcattctctgcagaatttgtgaacctggtataggtatgaggtgagagaggccaggaggtctggctgctccccctctagacttcgcaggtaaaacccaaggtgtgtgccacgtaaaggttcagaggttttataggcatccagatagcacatgtgggtctctgcccctgcttgcagcctccctggggcagccagccaggctcagggcaggaagctgctgattctgggtcacttggctgctcttgcttgctgctgctgtgattgttcctacagttaagatcttagctccataagggacatacggaggtcatctaggtcatctcatggctctcaggcaagaaaagtagcattattgctctcatgcccactttatggataagtgaccgaggcctgcagaggcagagtggctattccagccattaaatgtggctccctgctattctgttccctgccaggatattctgtggatggttaggggaggggtcttacctcagctaacgaggtgcattttctgtggggtgaggccattcttgtcacttaggtgtctgaggcctgatggtgttggggaatgtcctggttctattcccagggctgtaacgtgggggaaggatggaggaagacagaatggcctctggaacttttggatctttctgagttgaggccttgtctggccaactccgggaggctgctggcatggcaagcagggtagggatgcctggcctagccaggggagctccctctctcccctctgctgcccctctttccacccccatcataaacacgtgtggactttctggtggtgagaagatggttttggagggctgggctgaggtctaggcaggcaagagcttccaaatgtgtggctttgattctcagccttttcatccctcaatcctgggagactcattttaaaacttaaaaaaggacttcattctattggatgctatgtgggcaggccctgggctgttgtagagaggcctgaaacccacttcagtttcctggacaggctgggagtgtgtacccatgggttccctgctgccctattcctggaagacactaatatccctcccaaactcttggttggtttctgctttttttctgtagcattttgtctttgtgggaaattttaagaaacatatgtatggctttttggtttccacttatttattttcccctctgagtttcagatttcatccttctccaccccttccccctgccctaaggtggggctagtgcaaatcgcagtgtgtgtgtagtgggatggttaaagagccgtacatcctcacacctggtgacgcagactaaggcaattaaccttctttagtaaagaccctttcagctgggtgcggtgggaggcacttcgggaggccgaggtggaaggattgcttgagccctggagttggagaccagcttgggcagcatggtgaaaccacctctctaaaaaaatataaaaattaacgggacgttgtggcatgcacctatagtcccagctacttgggaggctggggcacgagaagtgcttgaacctgagagatggagactgcagtgaggcgagattgcaccactgcacttcagctaggtgacagagtgggaccctgtctcaaaacaaaacaaaacaacaacaaaaaaagcatgttttcctgtctttcccttcctctcctccaccccctggcatgaactctcaactcctggcctgtggatgtccgtttctataaatgctggtgctcggtggtcaccgtagacgtccgagcagcccctggggctttggcttgtgttttctctgtacttgtgagggtggttgccacttctggccttctttgtgctttctttttctttcctttccccaatcttttgttcctccctccctccctccctcccttcctcccttccttccttctgctttcctgtttaaagtatatggctgcacctagcatgacacagttcctatttattcctcagacttgctgggacagtctcctctgtatgcggcgactgagggtgggttccagtgccccagcccactccccttccccttgtttttgtccacttggctggacaaagagaacaaaaccaaatggcctcccctccccctctcctaagccggtcaagcagtggtattctgggatgattttccctgcaaccatttaaacaagtgctttgatgcttacgagtcattggaatgaccaggcctgtgcgccccttctcactgacacccttagaccaggctgggcctcacccttttgtcttgctgcccctcggtgcccagtgggcgtgggcagtaggactgagcagaggggccgaggctgtgctggccggcagctctgttacagtagagtggaaggaggtcccggccagaggggcaggtcaaacaggcctcttttatttacagtgctctctttcacggcctcactgaaacaggagacccgagaggctccggtgaaagggcactgtgtttgtgcattcaggccttccagggctggctacaaaggtgggggcacccggagcactgaaggggctttttgtcattggcagtttggcttaggggagaagcgagggagagccagtgtgggagccgcctctaggattgtgagcaagtgcctgtttagacagctccacgctgctccttaaaacctattttgtggtctggggttggggcgggggcacactgcctcgatcctcttgttgtgtggagcaaagtgattcctctcttcttgtgttctccagatggttccgttgtcctcacatccattgtggttgaggatacagtgcagagaagaccccgctgtcctctgctccccctccttttctctccaaagagaagtttcagggacagcaatagacttctgtggggcctttgttccttgtagctttcatttttcaattcttcttctccctgtattatcttgctaggccttagtttgtgcatctctaaaatgggctgggaggtgctagcccatacctaatatatagggccgtcgtaaggcttaggtcccataactcatggggttggcttgcacagggctctctcctttcagactggtcaggccatggtccttttatgagtctgaagagccaaaatgaagacctcactttctagtatccccaatcttcctcccacctttccctggctcttgagggttctttgggcatgttcccttctggtctccattattatatagggaagagaaattttccagaagaatatttgaaggattaaagtttgaggttgtagaatatgtgaaaacacacacacaccacaccacaccccaaaatcacccttttaaagaagattaaaaaaccaccagtgcctgtcctacattggtaaactctggcaagcctcataatgttgactttactgacctgcctgacttcagtggccgagtctacatggggtgttaaggccccacgtgtttttgcctgtgccctttaattgtatcttcaggaccatattttcagaaccagaaatcacagccacagtttggcagtggcacagaatggttcaatttaggcctatcccagagaggcttgggttgtctgtgaagttctgggtggtctgtattgtggagaggtgaacaccgtattgctgggggtgtggaggggggatgttgctgtttccctgctacagaaaggccaggcttccttttcagccttttgttccccgattcccctctcttcctccactacactcagccctgctgctgcttccaagggacaactccctctcttgtccttgcccatctttgagagaggcggtgaataaacaccaaggcaagaagaagcaacgggacccctagaaggagatgagtgtgtggcccaaggatggtggagcattgtcctgaaaggtagaaccaagactatagcctccgaggctctgtttaccatattcttggctcttgtgccacttctgtgtccagcagctggagcttgtagaagaaagatgggaaagacatagtacaggaaatgttcccattcagccagcactgatttatctgctgcctggtttctcaggaggcctaatctgtaagaacagtcgagaactttatttctgccctttaacctatgtccattttctagatagtttctaaaaaaggcatcacaccagctctttgagacaacatgtcatatgcaactgttggttttgggtggaatgaaactgaattgtcaacggacattttttctttctgtattcatgtgtttggaatagtgacaacgtcattggttcagactttgagcccccttctggttaggctcttcagtataagcccttaaaaatatttttgacttttcagggccaggcgcggtggctcacgcctgtaatcccagcactttgggaggccgaggcaggtggatcacgaggtcaggagatcgagaccatcctggctaacacggtgaaagcccgtctctactaaaaatacaaaaaattagccaggtgtggtggcgggcgcctgtagtcccagctactcgagaggctgaggctggaggatggcgtgaacccgggaggcagagtttgcagtgagctgaggttgtgccactgcactccagcctgggagacagagcaagactccgtctcaaaaaaataaaaaataaaaaacattaaaaaattgactttttgagtaaaacaaaaaccaaacgagtccgtgtaaagtctaagatgttggttcatctcaacattgggatattggaataggccactttggaaggtttctctaattgatgaagggcatgggccaccccatggattgcaatgctgtggctgtttgggtggcatccagcttctaggggatggtggcaaacttgggtgtgcaggcagtaggaaggaggaggtagcttccagagagagccattgctggggctcaagaagtttctttctgggctcaagcatggttgctagtggtccacacagtgctttcgtgtgaattagaaaaagcacccttgttgtggatggatgtggctcttaactagggtctatcccacagtgagctggttggggctggatctcaaatctgtttgcccctcaatcagaggcaggaggtccctggcccaaggggcttccatggttggagtggtcgtcagccgaaagctgttctggtgagatgttttgagctatcagttccaagtttccaaaggccaaggcctctgggatcagtttcactgatccttcaaccagcttatgtgccctgttagcccagatacccctccagagtgcttcgcactgggctgcaggtcactgtggccccacaccatagaagctgggggcctgtctgcatgttctggcatccataaagctgcctgcaaacgtgagagggggtttatggcacccttttagcatgactgtctcttgtgaccaaggccaagaaaaatagcacaaagatgtaggagtggtgaggaatgaagatgcacgtgcacgcgccctgcagtctcagtcaatgcgctctttagggtttagtttggaaaaccacagtgtcgtgtcttatgtaaccaatttcttttcttttcttttcttttttttttttttttttttttttttgtgatggagtctcgtgtcttgctctgtcacccaggctggagtgcagtggctcgatctcggctcactgcaacctccgcctcccaggttcaagcgactatcctgcctcagcctcctgagtagctgggactacaggcgcccgccaccacgcccagctaattttttgtatatttagtagagacggggtttcaccgtgttagccaggatggtcacaatctcctgacctcgtggtccgcccgccttggcctcccacagtgctgggattacaggcgtgagccaccacgcccggccaccaatttcttatacataggttatggagcagggagaaagagacatgcaaacaaggcagaattgggacctttgcaagaagaccttcttcactcgcccactttctcatacttttagtcaccaaggcagggtctttttaaacaactgcgaggctcaggcctagggggttaggagagtaaaccctaaatccctttcaccctagcatgcttgggtgccgtgttgacaaggtctctgaagtgcccatgggaagcagaccaggctctgagaataatttccatggaattaattattgttcttactccaatagatttgaaatctatttaacttttcagggtcccctagctttttaaatgtttcaagtgtattctctctgataggttgccttttctctccctgtaggctataattagtgtcctttacacaaaattggcttagaattggatttagagaagataagaatcaaattaccagtatttatcttgtaaattccaaaagatctacttaagacactgtattaaaaaaggagtataaaagaaaagtttattctatgaaaaagtaaattcctcatggtctgagcaaccaggggtattttaatatcaaatctccagacttcccttggaggcacctaaaattgccttttcccttgtcgctcgtttttatctccagttgagcttctgaaatatgttgccaggctttggatattggagagctggtgtggtttcagctttcattaaaattcggaggttttgacttatctattatttctgatttgtggtaagacataagcctctaaaatatgctatcttaaagagatacacacaaattttatcttagcatgttaagtttttaagccgttgagagatgggagaatagacctctgtggtctcctgtgtgcttcttcgtcctaaaatgtcagcatgctggttttcatgtgctgcctcgtacagtaagtccccagcagatttaaataaggttgtgtcaaaacatatgcctatgtttttttaaacatcgttgtctcataagtgtgcagtaatggcatattgagactgttcatagactggtcagctgcatttcctgcagccgaggaaccctttattaaggtgcatttctggggttgaactaaaactgctcacccccatcaaatgaggaaacttgaggggtttgcagcccagcattttacgggcacttttgcgactgtgtacccttgcgtggcttcccgcttcagcgacattgttgacttcagttttctaatctaattctttttttcttttttggttttgatgagagtgttggataccaaagcacaaacgatggattccttttgaaagaacaaaaacatattttgtgagcagttttacttctgggagtgttatgtgtatacacacacacacacaccccctaaataattgaaagcaggaacttgaacagatatttgcacacccatgttcatagcagcattagccaaaatagccaaaaggtggaaataattcaaatgttcattgacccatggataaattgacaaaatgtggtatatacatatagtggaatattattcagccttaacaaggaaggaaattctgacacatggtacaacacagattaactttgagggcattatactaggtgaaataagctagatagcaaaggacagatagtgtatggtgccatctatatgaggcatctgtgcttatataaagcaaatttgtagaaacacgaactagaatagatgttgccaggagctggggagagaggggaatggggagttaaggttgagtgggtacagagtttcagttgggggagatgaaaaagttctgtggctggatggtagtaatggttacacaacatcaggagtgtactaaatgacactgatctgtacacttagaatctttaaaatggtaaattttagttacatagttttactacaataaaaatgtattttatgttaattgcaatacttggcatttgagaaaaaattcttagaaaatactgagaatatcatactgataaaaaccctctgctaaattttttttaaaaaaaacacacatcgcctgtactcctgagtatcagcgatcagtctagcgttgccctttaactatcattattgttattgttaaagtgatttttattaagtgctatctctcaagtggtatgattacttgttgaggtcttgtgttggtatttgtcatgtgattctagaaaaatctccccctttttggctctgagacattctctagttgacctcttcccagagagaagttaaggaaaatcttccgctctgatttttttttctttctgcacttaaataattaaataatatctgtggccttacaacacagggaggtttcagtgaggaagaaaattcaactgcatttgcaaaatgtctgaaaattatgggagagatgtttctgcttttagacttggtacgtatgtggtcaggttttcagaggttttctattcaccatctgtgacgggccttgtctcctcctgcaactggtggcagatgtagccagagattttgtgagcttctcaacagcatctttttcctgctcttcttcccttcctctttgtttggtttttattcacatgaaaatttaaagacccataaggaaattcaaagtgaaaatctatgcccaaataagtcaggatctcaagatgaaaatataagttctggaaatggaagtttcctctgcccccgtggtggtatcatagccagcagcctcgttctgtgcttttgaaggtttaatggcctgcatgtgaaggtaggggcgcactatatatatagtaccaggcgtgtgggcgcactggcacggatctgaaaaagcgtaagtttggcatttctaggtttattttaaacttacaacctttaacgccagacacagagcttctttcccacttaatgtaactatacattgattgcttttaattagtgttggatcttttttggtgttttgcagcttgggatatataaaaagtctgacttaaattaaaaaaaaaaaaaaagctaactcctgacattctcacgagtcttgcaaaaaccagcacgggagccttagaaattctaacctcctcgtcctctttatttttatcttgagtcaggtgggccaagaagcaagggaagagtccaatataacatacttaatggatggaggtaatttccttggactgttttggcagaaattaagcatctgtatttagataaaggtagtggtgggttggattttcatagcataagcatagttgctgaagatcaataatatcaaataatgggttcttggtgaggggaaaaggaaatgggggaggggtcttttcactcaacagtttggaaatgctaatgattatttgtggttttcagcccagaattcttcatatttgcttgcaagcttctatggcactgccgaattctacagtaaatatttcggacatcctcagccctgttctcctttcccttcagtaaattacatattaaagtagcctggtaactgagcactggttgctgtgagataagggctgggaaatcaatatgtttgccatgtggctgcttgtttatgacacctgcctctagaacagttgagcaatgttctgtttgttaaagctgcatttcagaagcttgtatcctcctaaaacaaccgtgatcttactgggggagagagaggtgctacaacagatattgattttagtttttctaagtatggaattacacttctaaacagtggtcttacagcctgtgattttttccccatgaggaggagatgtagatactctgaatatatatatacacatacacacatatataaaataaatctattttataatgtttatgatgtggtcagttaaaaaaggagtgtagtttataataaggaagtgtaggtattatttagatttatctcctctcttggcacctggcttaaaaaaaaaaaaagtagtaacaagaaacatagcagctgctgggaaacatgcattttaatctaagtctccagtgtggttttagtttaaccagtggatgatactgtagtctcaaggcttagcctgctggtgagtcaatggttcttaaagctgtgtggtgtcagctcaagtgagcgaagcagtgtgtggtgtgtgtgcattggagggtgaggggtatgaggaggtagtcagccttggagggagaagggagacaggctaggtcttcttcacgtggccttccattttggaaaacagaagcgatgatacaacttctcttcttgcccaagggattcagtagaaaaaaatacatttccaaacacattgcgctacagtcattgaacttcaaagtgtaaagcatggattgtgttggtgcacttgtgggtgcccatgacacacactcttcaatgctcctgtgccttcctaagaggtgtctgtctttctcaaccccagtgtgtgtcctctgacgtctagtggattgctgcatacacagtcaaccctccttaaaaggtttaaaaagaaacatgagctcccttttagagcaccccaaagcagctgcattcttgagttggtgccctgcactgggattcccatggactgggaacatgatctcttaatgacactaatatattctgagatctgattttttgtttgtgtgttttttaacccaggttggcaggttctccttaatcagtagtggcaaaatgtctctttcctttctccacgtaatgctaaatggcttatccagtcatctctctctgctcatggtcagcccgaggtgacagttaaaattggatggaggtagcttggggtaggaagacttggtgattttggcggcactgggtcaaacccagggaaactgaagctgtgtctgcacagctggttgaaaggctgtgttgtgatccagggatttaagtaaaaatattctttccttaccaccctctatgccccctactccccagtaatatagtaggcatgggggttgacttattttgaggggactagtatgtatttaatatttcatctaatttttgtagccctggcctggctggatgacaaaagtgtttaaactaagaccgatttgagcaagtattttatcctccctctcgggagactatgggcatagaacggtgtggggatttggaggtgctggcaagtctggcccctttcctcttgcgtttactcaggcacagatggaaaaagatgaaactcaatgaggacccttttgtgagatgcggcacatttcgctttgtggaattattaaccttttataagactgggatacttacaaacttaccgcaggaccagacagtgactatcagaatcctctcttctaaagatcagcgatctacagctttcgcaaaacttaaggctgacttgggaatctagacagcccctagtatggtgagtgaccctagagtggtttttaatgaggagatactcacgggagccagcatctcgggggtccccggggggttcatggccaggagcgttgcaagctggtttgtttgtttgtttgttttgagacagggtcttactctgttgctcaggctggagtgcagtggcataatctcggctcactgcaaccttgcttgctctccctggctcaagcaattctcccacattagcctcccaagtagctgggattacaggtgtatgccaccacagcctgctaatttttaagttttttgtagagatgaggtttcactgcattgcctaggctgatcttgaactcctgggctcaaacaatcttccctccttgtcctcttaaagtgctgggattacaggtgtgagccacagcgcgaggccttgtttggtgtttttgtttgtttgtttgtttgttttatggatcattacctataaagtaatttagaatacccactcatttatgatccagccttccctgcattttctagcgttgaggtcctttggggccatagaagtatgtttttccaagactgattgcttcgtgtatttaaccaggttttttgtgaagggtttgatataaactgagtgactgaagagaggaacatggtgtgatttggtagaaagatctgtaattttggagtcaagactggcctagatggacagcttggccacttttaaaattttgtgtccttagccccataaacattttgagattcagttttctctcctgtgaattggggacgatattgcctaacttgtaaggttcttgcaaagatcaaatgaaaaaatacacatagatctcctggctattattggagtgcccagtaaatgctagttgccttatcctccattttctttttgagagctgaagacctgattttatttccttgcatttttcatgtcattgcctatagggagatacattcatatatttgttgctcatttttgtatgtgttacagtggtgataaagaaactgatggtatcccagatggggaggggcaggtaaggttttatcagtggcttttaatttctttatgaaattggatgtggctctagggaatagatgtctctgggatggtcatgttttcccttgccttttggctcctgcaatgaggacctctttctgttggtgtgggtcttgtctgagcatgccagggatggcagtgaacacatcgatggtggttgggacgtcctcattcccagacctctgggacatactaattcccagacctctgaaacatgggtctcagctgctttgccctgcagacttgttctcagtagctatttacctttaggagaaaaaaaaaatccttaaccaaatgctttaggaaggctttcttatcgtggctgtaaggtgctggtgggttgttggcagccaagtttgggtttaaatctcactgggggttgaggctgctgaactgctattcctaacatgctcttgtgtttttatgcatagaccgtcttctggatccttggtgagttttttttactctggggttttcaggagaaaggtttgtcattcatcatcactcttctccttcatcacagcagtggtaacagtggttagagggaggaggtagaatcagttgttcaagttcttttttcttccaggtaagtcccccccaccccccggctgcccctgcccttccgcattttctgggaagtgaatctattgggaaatgcatgggcctgtgtttctgggatgattttagcatatgtagtaagaggggtgctttttgctgatagcccaggcgttggtcctgtaatcctgaggtgtggtttaataagagctgaacagtcatttaattatttattgggtgcctggagaattttataggcaggagagcctagagctattccagaaaaaaggccaatcctagagctttttgtgtggctttcttcttgggcttgaagtttttgatgctcgccaacattcatagtagcccccaatgccacccacacattgggaagggacaatagagccagctaaagctctttctttgtgtgtgcccatattaacccatctagtcaaatgtgggtacccttccaaaccattatgtcttgttcctctcggctgctgggaacattaaaagaaccttatttgaaggcaaacattactgtatcagtgatgctgaaactggaggtctgtcaatggcacttcattgcattgataattgtttctgctttgaaccacaacactgtgattattgaggttcgactgtaagggctgagggagccttgaggccattgaaagcattctcctgcctttaggccaggcctatgttataagtgagagacaggtgtggagtgtgcagggagggaattaagatagatggtgacctggaattcagaaggtggacccccaccaccccccagcctgagaccaaagcacagtttaactctgtcatgggtcatgtgcagagggaagggactgccccagaattagcagttggctgaacaccctgcttaaaaactttttcttttcctttttttgtgagtaccgtccgcttggactaaagaagttttggtcgttgttttcttaattttgggctacagagtctctacctacatttgtgttttgtgttttggtaaccacatgtaacagccggtggaatcttttttctctttgctttctctgaactttccaaagagtaggcccctatctctcgggggattaactcctcgtggcccctgggtcgttggtgctcccccaccctgtgtcagcatctaaacctctgcacacaggatgttttctctagcgcttatcagatgctttagaagatgcggggtggagatagaggtaacgtttaacccatcctggattcctttcatgaactcagccacagagcagagggaggcttggctggagcaaacaatgttgggccttctatttcaaacagaggtgtgggggcttgtggtggcatcagtggtgcactgaacaaccctccctgaccctagcgtgtgggtttggagcctggggaatcaaagagaaatctaacaaactattctttttcacgtgtgggctgaatgaatgtgtgggttatccacatcagtttcttctctcttctcatcctccctccttcctcgcagaccagcattttggccagggtgcccagtttgagctcatttaccaaaggtgaatagggaagggagtagaaaccaaattaggcacctgtctgacaacacaaggatcttttctacaatggtgcatttggattatgcagagttttagattttctgttttatcccagggtgaacgtgtgtagaaaactgggacctaaccatgttcttctcttcagtcttatggtcattgctactttgaaggcagaaaggataaaagtagcatagggagtggtttaccataactgcaagtaaataccaagcatgtgcgagcctgtagacattgcctgctattggggaaagacggagttagctggggaaatacatcagtcttcactcccagcacccaagatgtaaacatttcttactcttcctggatcaggctatctctgctttgccttttctttcacctacctccttctttcatggcaggaagggaaagggaagtacccccaagcagccagcagtcagcactggggcctctagggaagagtggattggtgttgttttgctgtggtttgctgtgcgttttccagaatctctcttggatgactatcagattcagtgaagggatggacctgcaggaagctgagagataggagatcctgtggcctgggaacccagaggcctgggccctgggaacaactcaccacaggactcagcctgcgaaataggaaacatcattgtagcttctgcatcatgttttccatgttccactggaaaaccatctgttaaatggacatagaccaattcttgcttttcttctttctggtaccaaagagaacggtggtgtctcttgtcatctagatgttcttgtaggggcaccagagtcattgcaaccattttgagtaaagattgagtccactggggcatcagaaggggagtgtgtcattgctgttgttaccacacaggccgtggtacttgccttttcctgacccattttgcagagcaggccagctacttaacccctcgccacccactcacctgtggaaggcacatttgcaaaacaatagaccagttggtaatttggcacttgttaggtagacatagtggtacattgaggaagttcctcctgttaactaacctagtttttcttgctgtaatccgaatatacttctctgattttttgaaaaagcctgtgagtggagcctggctcgacagcccaaaacgctgaattaattctgtctctctctctctctcttttttttttttgagacgtggagtctcgctctgtcacccaggctggaatgcgctggcacgatctcggctcactgcaacttccacctcctgggtccaagcaattctcctgcctcagcctcccaagtagctgggactacaggcattgccactacgcccagctaatttttgtatttttaatagagacggggtttcgccgtgttggccaggctggtctcaaactcctgatctcaggtgatccaccagccttggcatcccaaaatgctgggactgcaggaatgagccaccgcgcccgacccaattctcttgagtgacatgctgagtggggctgctttttggtggaggtaacaaaaaaagagttgaggtattgattttagtttcatttgagacagcgatctgtcccctccctgagttccctcgtttgtttgtaaactgcttaaatgaactttttcccctgttcctccatcactctgctgttctcttctcctcctcttatcctaacagtctcataggtaaacttagaaggaagacaaatacttacaaattgtcaccgagggtaccataaaagagacatttggacagtagttctggggagatccttgtctttgcttcatgttaatacagagggattggggtagcccagatcaccaggggaaagtggtttttcttcatttagcttttaattgctttctttcacttttatgtataaaagattgtccatttaattaactcaagaatgcaatttcaaaaacactaatgctttacacatgacggcttttaaaataaaagtagcattctaatattgcataatgcttttctatccccttcctctccccgcgttcacccccacccctccagactgtattaacctttcatagcggagggttgttaggaggaaaacgctgttctggatggtgcctctctgcctctccttcccaccaaccaagtacagcagcacgacagccgcaggcctttctgaagtgttccgtagcttctgtaagaaagagactactcatcccttcccccttggccggtttcatgcctatatttaccctcttttgggggtcactgtggctcctactcccattgctgccttttaagaagcatcattatgatggattacatgggaaaattaaaaagaaaataaaaccccaacatttagctctggtttcttttgaataatttcattagaagaaacttgtatacattggtctatgatttcacgatcttcttttttttttttttttgagacagagtcttgctctggcacccaggcttgaatgcagtggcacgatctcagctcactgcagtctccacctcctgggttcaagcgattctcctgcctcagcctcccaagtagctgggactataggcctgcaccaccatgcctggctaatttttaaaatttttttagtagagttggggattcaccatgttggccaggctgatcttaaactcctgacctcaagtgatcctcccacctcagccgcccaaagtgccggggttacaggcatgagccactgtgcctgtcccatcttctcttttctgatggaaaagaaatctagctctttttcattcctttttatcctgcttccaaaatgttgtgacttccctatggcattggtctttcttattttgtaatggaagttcccctgattccagaattttccctttataccagctctcatagcccagtccctgctagatgggctttttatttttgaaagcacagtagtttcgacgagttttattttcaacagttagacttgggaaggggcaggatgcagatggagataaatgcacatacatatagatgcccctgagaaagacagctctggaacctgctagagtgatcccagccacgaggcgccagggccctggtgatcgctctgattttctaggtgagataagggaatggaatcacagagggatcagtgacttgcgcaaggtcacgctgtcaacaagggtcatagccagaatgagatccacttcctaggtgcatgggaggtataagcctcacctgccttgaagcctgcttgtgttttgtttctgatgatatccagaaaagaactttttagaccttgtaatgtgcattataaaacacttcgcatttagatctaacttcactccctcaagtctcagattaagactgtgttcttgtgttccgtcctccccagtgatgaaatgcttggttgtctagagtgaacaaatccaacaactctgccaaggggttctctgtgcaggtcacttttcaaagggatcttttctcccttggtgtctctcctccaaagagcatgatttctgagcctaccaaagtgattactgtgctaaaatttccaccctagaagaactattgtgtagctgtgagaagcgactaaaagattattttcttttcccagggtgggtgcgcaacattgactttttctcaatgtgtgatgtggagatatatgcatcttgggaggagatgcataatatgtgtctgattctataatatgttggtaaaaatgaccttggtgatgaataattttcaaagagaaacaaagctgggctgagaagagtggagcttggattggagatgatgtgcagtctacattttttgttttctgttttatttgaggagagagattttcaaattaatttggagtgaacagaaaatacagtggaaatttgggacttttttttttttaaagcctgtgttccttatagtgggatcccattttcacctcctctcctcccacctttattatgatgattattatcattattattattagtttgtactcaggaagcattgtaaaagatgctgggagggtttgaatgctgcttgtgagaggaaaggatgaggagaccatacggctttatcattcattaattcctgggttcattcattgagctatttaaacttctgtgtgtaagacggcagccccagatggtcttttggtgcctgcattagctctgagaccccaggcccggacaaaagagggtgcacagagcagctgagtgtgcagaatgtttccagccgttagaaagctgctcccgagtctttcagctcaggagctagaacacctatcatctccagcatctagagaatcccttttcaggtctttttcctttctaaaaggctcagtgcgaatctgtgagccagcttctattactgcagcagtagtcacagtatctaatttttagagtgaaattgatggccacgggcttatttgcaggtcttcttagtaattgctctctgtcttcttgttctggaaggagttctgttaacactggtgaaaactttgagctcatctcccttcttccccctccacattccccttccctgctcaactctctaaaagacctgcagctattaagaaatttccagtctgggctgatgaggctagatgggggtggctgcctgggttgaacacctaccgtctgcccgcctctgaatgcagcgatggtacacacagccccattcagtccctgcaacaggcctctggcatcctggcattaccgatgagaaacttcagctttacagagaagttcaaagaggttagatgttcagctcatgcttttaaggtcggtagctggaaatcaaatgcaggttttcccgattgcttggcctgagctcttaatgccttcttggatttctttgtggctattgggacaggctggcctcagtgttgatgggcaggtaagggtacccagccagtcctagcttcactaagttgccgctctgcctacctcctgcgtgtgcttccctagtggggctgtcccacttttggagtggggacggggctgatctgtgtcctaatccataacaggcctaatggagctgagacctggcactgcaggagcggaggctttggggtcagtcaggtggaagaaggagaggagcatggggcatgccccatcctccagatgtctgttcttctagtggacttcactttggcctttcagtagctctccatctgaatgtggcagttgtctcaggaattttgtcctagcattatctgactttattgctcttatagaaaatgctggttccccagaaataatagctggtctgtggtgagtgaggttgggtcattgtgccttgaggtgtgacatcttctttggcttagtcaggtctttggcttgactacaaatgtctgcgccttttcctcacatctcagattcttgcagccaggctctgtccgccatgccctgttgctccttactgttggagagacctggaggttggtggagttctccaaggctggagttggggtacacaatgaggccgagatgttttgcatagttccttccattgccccgatcaggaatgtgttcccgcaggatgggttatggcctggaagtgagcctaatgtaaacatccttgcagaggccatcctcttaatcaaatagaaatggtttgagggatgagcaacttgggggtgggggagataggaaaggaagagttgggggaggggagagatttagggattgaactcagagagagctgtctgggggccatccttccagcagtcctgacagaaaactggcttcatggagttggtgcagtgcaaactggaatgattctcttagggaacttggttctctcagacagtgtggtatgttgagggaaaggaaggaaatcatggtttggctgaacagctgggcagagcagcaagggaaactgaagtatgttagaagagcaggaccggaggatagagcagacgggggccacaggaggacttctggaaggagcccacaattcaactcctttgagggccttcaacatctatttaacgttgtaacattttgaaattctattttgaggggactagactctcagagaaggggcgtgaagaatgtgggggacttaggtgcaaatgtgtgtgctggggggcggtatttagggctcttggtggagcccctcatgtcatggagaagcgaaccctttccactgtgcccccacccccttttcctagccctatgaagggctcagactttcttggagatgtggagcatttcagccagaccctacggtcaaagatcagtcacagagcagtcttctgtggcaacctgtgcacagtcccccaaggcagcaatctggggtcaccagggaagttactgttactaatctgacctgggaagttttctttttcgtaggggaatctagaaatactccagggaaagccacggccaagcctttgcccagccagtaaacttttagggcttttgcgtgaggttggtttagaagaatttgccgatgccaaggctgctatgttggtttcactgatgcagatttaaagaaggagggccagtgagacctcgggaataggaaggcagaggaaacctttctattctgatgtcttcaagtcttggtgcttgaatgtgccaaggagagtgaggatgtaaataatttagtttgccttcaggatgcaggatctaatctaaacatgattaagctgatttgattttatagattggaatttataagtgatagaaactgatgaggttaatgtgaaatatttacgtaataaaaagcttcattacctgatgctgaagggtagagggagaaaatattcttggcaacatgtttaatcttttggaaatgaagttgggttaaagttttctttgtaaaaactgaattctgtgatcttgtttttacacatgctgtgcttaaatattaacaccaattgagcaaattgccttttaactgcctttatttgctttcattaacagtataatttaaaagctcaagaatttgcatggaacctgttgtgcatgttggggggaaaactattcataaattaattaatcgtgagaacattatctttaaggaaggtcacaaaacatgagcatgatttccaaaaagcagtgacatgtttttgccgtttcttggggacgtgatgtacttttggcttagagatctgtgctgcgtgtgtgtgtgtgtgtgtgtgtgtgcacgcgcgagataacttggctggatcaagaaaaattttaatgactgggcatgttttaagttaagttgagtgaacctaattacactgtagtttccagagagctaaaggcaataataccattggtatttaagcactagtttgaaaattaaagccaacctatataattggctgtgctccttagatggtttatttctttcttccctccatttctgaaatcccccttttctttctctttcacatttaaaccaatagagagaaagagagaaactgcctagcgctgcgaaccacaagacggtccttccagtggggaacattaactgcattgtcctctcatgaaatgacgctaaataatgttaaaggtttccagtatgatttcactgaaattggttgcttccttctgtacagatgtttttgtggtttagaacctcagccaaggcaaacattatgaatgagatgcagagaccaccatgtcctatgaagggctgagagttcctttgggagttattttacttgtgattctgacacctctgttttgacaaagcttcattctttcagtctcttctttccgtctccctctcctggtgctattggtttgttgtgggtggttttcctaattaagttaatctgcaacctagtttttctgggtccacagatgccagaatgctgaatttatttatcttgaatgtttttgttggctactgttgagacacattcttcctcttccccttttaccccaagtctgttttaaacattttttttttgaggcttccagacgcacttcaataaagaaagaatttctctctggtgtccatttgtcaatttttttgtgggggatgtatattgtaaataatataatagatatgtaaaaggttgtaaataaaacccaaaggttatagaggaaaagatgtgtaaatttgactacatcaaaaatttaaaactttttgcatgattttctttcggatttttgccttttccttgcacatttgttggttctctttcgatataaatcagaaaaatgaatcttttatctgtcaaatgcatggcaaagattcttcccagtctatcatttgtcctacagttttgattatggttcctttcatcacagaacatttctattatttatttaactaaaaaatgtcacaatgatgtctgtagcgtagattttataaagcatctgatggtcatattttataatctaaattttggaaaagtatttggataatgagagatggagaaggtagagggagagcaagggagggatagagagggcacgaagatgaggaagggagggatgaggaagaggagaaagactggtgagaatgaatgatgttaaaagattgatttttcttcctgtaaaaaagttggctgtcgtcaaaacaccccttctgtctaagggaaatattgtccttttggcatgtacttgaaccataaagatttctctacttgaggagacctttcctaagagttacctgtccagaaggcagtcctactgttctctctcatagctctacccagtctttaagacctagttgaaatgtaggctccataaagccatttctattttcacacagttcattttctttttttttttttttttttaagacagggtctcgcactatcacccaggctggagtgcagtggcctgattatatagctcactgtagcctcgaccttccaggcacaagtgatcctccctcctcagtttcccaagtagctgtgactacagggaatgcactaccatacctaggtttttaaattttttaaaattttttcttagagatgggatctcactgcattgcccaggctgatcatgaccacctgggcgctcaagccattctcccgcttaggccttctaaaatgccgggattacatgcatgagccgctgcacccagcccacacacttcatttttattctcaaggtacctgctgctttctggcttatggaagatacatctctgcatgtctaatctttcttagagtgtcatgtgatagcagagatgctgtcttctgtctcactcgtctttgaattctatactgtctttagcggtgtataacaaccatttataagtacataagtgatttaccagacaggtcaattcttatccattctttcctcctatacgttcttctgggacattcttcaaaagagatatttggggtcttgaagtccaacacttcgggtatttggcataaattaggttgaggacactggttggaattttgggaagaatgaaggggagagaaccaaggaagaaggaattccagagctggtagcgttgatttcagagtattctcaatctaaaaaccctgtaatcatgacctattcccaaaggtgagttcatggcagcttattcaacagatatttattgagtacctgacaagtgttttgctttgagtgaggcactgtagggcaagtaggagtaagtaaagatctttgcccttctgaagctgttctccagtttgggatttagaaaatttgttcaggaagagggcttaaaaaatagagacattctgtaaatgacctttctttgaaatcccttattctactttgactactgctgtctattcctcttcctaaatgaagctagtggaggctttttcaaaatcaattctatggaggttattggggcagatataagttagtcatctaatcatccagttagtcctgaactgaaacctggaattcattcttttatttttatattcatttattcaattagtcaacacaaagttgcacaatcaatattagctaaattagccaagtttaaatccatggtaaggcgaaactcccacttcttttctattagaaagctgatttcttagtggcagtaatgggtggtagggataaaaactcatcccatggctgtcttagaaccttcaggtgattcagtagaaatagtgctgtttctatctccatgatttattttcgggaaataagtagagatactggggtccagaataacttgatattctagttgacaatgatttctggagaacatgtccctgagacttcgtccatgtcggccacaatgttggggagcagtgaatgtctgttgaaagacagaataatggatgaagtccaaaggtaggaaatttacaagcgatgttactttgggatgacggggatgggagggaaacctgactggggagggaccaccgggcttcagtgtatatgagcagtttgctatcatttgttagaccttttgagcatctgaaatatttaaacagtttcttgttattctcctacttggttgatctttatctttgctgctgagttccaggcttagctcaatagagggaacagggagatgactgaaggcatagtgtttgtaaaaagagtttgtttcagttcttatcaaaaagttctttccaggaacagaacatacttttcattatatgggatggaaatcaggatggaagtaaatatgttctctagaatgttctagctctgagttgatttgcatagaggtcctacagatcattctatgctatatgttttttctttttttttttttttgaggcagggtctcgctctgtcacccaggctagagtgcagtggtacaatcttggctcactgcaacctctgcctgccaggctcaagcgatcctcctatgtcagcctcccgagtagctgggactgcaaggtgtgcactaccatgcccagctaatttttgtatattttttgtagagacagggtttcgccatgttgcccaggctggtctcgaactcctgagttcaagtgatcctcccgcctcggcctcccaaagtgctgggattacaggtgtgagccactgtgcctggcccaggtcgttccatgctgatgggctacaggggcacagaaataaagatctcagggcactcattattttctttcttcctttcttcttttgttaagagggaggtaggagagggttgtgtaaggatggaatattgctgcaaacctgtatacttctttaatttctctaccctcgcctgagacactggagccttttactaccatctttgggaaagaccttctagagaaaagaacctttgcttttataggtgagcagggacggtgtatgtcctccagcatagtttaaagtgtttggtctgttgcctctccagagatcaaaggtgagacagactttttgttggtgttgttttcctccctccttcctcctttttttttttttttttttttaaactccctttccttgttatctgaacttccaaacatcagctttgatgtctattgttgggacttcaagaggactcttagcacatcggcaggtgttggttttagtgagcaggcgagagtcccacattcttccaaggagagagatgggtcccaccacattcctacccctagagcagaagttcccgcgctgtgcctcttctctggctgcttgctgaggacgtctcccagtggggtactgggtgtacaccagctttccttcccgtctttctgaagcctgtctgaagggatctgtcttctttcagagcagctgaagagaggttgtctaacagccacgtattaaggtttcattaatcaaagacacttccactgcccctttacagaaacacaactgctgtggctgtcctccgctgacggcccgctaatttgtctttcccagaggaggggaggggagaaggacagagaggcaggcgctgcccctaccctgcagtagggatctccatactggctcccagcgagcatgcgttcatgtgctaactttaggggactgtgcccggggcttcacattttcgtgcagagccatgggcagctggctataccccctccccaccctgtccatgaagcagggaatcaaaaccactggaagcaattactgcagatagataggtttaggttgtcttttatttgcaagaaaattttcatttcaagcttcaaggttttcactcccagcttcaaggtttgctgaaattgggggcagaaagctctagaagaaataagaatatgggtacatgtgtttaagtatgcttaatggacagcctcggcgaagtgaggggtgatggggacattaatagctggggagccactgacctgaaatggtacagtcttcctgtagttactgacggatgaaatcatgactttatgaaattttaatccttgggtatagaggcacaactgactttattactggaccccaggtgtgtgtgtctgaaatgagtgttttgaatctaactgcatatttgattactttctaaaatttaggcgttgctgaacttctcctcatgcttaggttggaatctgaccttctgtaaccctcagctcagaagatggatatttgggcatttgaaaacctctcagggcctcctaagtaggtgattgagcattgcgtcattgcatcgtcatcttctttttttaaagctaggtcctgtccactggggagcagctttgaactcactttattcaactcatcaaatatttactgaatacctactagatgtgtttggctctgttggagaagtaatggtgaggcgtaatgcgttcctagctcttaatttggggttagaactagtacacacatggctgtaatgaaagatagaataaaacatgttccctaagacaattggtaaatgcagtgaaagctccaagcggggaatgatcacatctgacttatttattcaatgagtgtttattgagtcctactgtataccagacaatggagatacagaagtccagaaacttgaccctcgtccccaagaatctaataagctggtaggggaggcagacactgagacatagcagcactttatagtagaatacaagtggtaataaaatgtagaacaaagtgtagaggaaatggaggtgaagcagcaattgactaggttttgggaggggctatagataaggctttgctgagaaggtgacttgtaagcaagatcttaaaagatgagaggaagatcactggttagaccagagggaaaggcattccaggtagaggtaacagcacacgcaaaggccgggggaaggagggagagagagctgcaggccatttggtttcaccagagcttgagatgtataaagaggttggtagagatagtagctggaggtatggttgtgagcctatcatgaagtcttgcttgtgcagcagagagagaagccgaccttttattctgtaatttgggagaaggtgttgaaaggttttaatcccgggagtgaaataataggaattatgacttggagcaccccgagcacagcattggggatggatatgtgggagtcagaggaaccacctaggagcccgtcaagtggtctaggtgagagagaacaagcagaggtagggaagtagcaaaggaggtggagagggaagggcacattgtagggggaaatgaacaggtcatgttgattgggggtgaagtttgaggaaggagttggttgagactcctgaggttttggcttggataactggtggatggtgggaatagagaaggagttctgggtggaaaaccaaagtctctcttttggacatggagtttgaggaggtcttggaaaaactatatagaggtagtctgcaatatttgcagtgggtcttgaaggaaagatattttgataagcagaagttgtcagtatactaattcatttgcattcattgagttctgatgatattttagcatgaacaagaatgagaagtatcttaatttcctggcagaaaacagtatttttggagtcccttgaataatgtaaagtgttttcatcaaagaccttcattcatgtgtgtgctgacatctggagagcagagatagatattttccttaggtctgggttcgtgagctataaactcttcccttgctcctaattaatcctttgtagttactgactgacgaaatcatgactctgtgaaattttaatccttgggtgtagaggcacaactgacttaatcacaggaccccaggtgtgtgtgtctgaaatgagtgttttgaatctaactgcatatttgattactttctaaaatccacagggtctagagaaaacagattagaggtgtttttgatttttgttgctgttgttgagacagaggctcgctctgttgcccaggctggagtgcagtggtgcgatcctggctcaccgcaacctccacctcctgggttcaagttattctcctgcctcagcctcccaagtagctgggactataggcacctgacaccacacccagcaaatttttgtatttttagtagagacagggttttaccatgttggccagactggtctcaaactcctggcctcaagtgatctgcttgcctcacctcccaaagttctgggattacaggtgtgagccaccgtgcctggcccaggctagagttttgggaaggatttgtttatttatttatctgtttatctatttatttgttgggcagtcttggaaaggatttatttaatttatttacctatctatcagtcatcatgagtaattctcaaatatctattatggaatcttagcacttggggatcacacaatttgttatctttcctgaggacacttaggcctggggagatgaagtgactggaaccagggctttctgcttcatattgcatttctactctcacccctaggagaacaggtaaaagataatttgtgttgagtgaggggttatgaagagacaaatgtttttaataaaaggagggttgcgtctctgtgatgagacagagtgttctggctttcatggttttccctgtctgaaagtaacaagctctagattacaacagtgaggaatggaggatgcacagatggctcagacagtgacttggagttcaggttgacatttcaggttgacttttgttacaaagaatttagagggggccaggtgcggtggctcacacctgtaatcccagcactttgggaggctgaggcaggcggatcacctgaggtcaggagtttgagaccagcctggtcaacatggtgaaaccatgtctctactaaaaatacaaaaaattagctggatgtggtggtgggtgccttagtcccagatacctgagaggctgaggcaggagaatcgcttgaacctgagaggcagaggttgcagtgagccgaaaccacaccactccgctccagcccgggtgagagagtgaaactctgtctcaaaaaaaaaaaaaaaaaaaaaaaaaaaagaatttagggggcgttgttagggggtattgtatacgagtttgtgtgtgtgtgtgcgcgcgtgtgtgtgtgtgtttgtgtctgtgtgtgtgtgcacatgtgtgtacaggttcactctctaccactgctttcccctttgctgacctggactggcctgctggatttcccaccaggagctctctaatgcagtgtcgactgctattctcaatgaggcccagcactgtcctggtgaaactggaaagagaaagtacgacaggtgctgtgttttttgtatgggggttgtaggatcagagaagtttagagttggtgggacactcaaggatggatagaaaacttctgtttgggtctctgcagtgatggagcaatgtggattttaacaaccagagtagcagctctcatctcatgagcacctgtatcgtgtcagtctctgagttaggttctttaaaagacagagttttgttaatcctcacaattttgtggtattgttaaatcagagtacagatgataaatggaagctcagagtggttaagcgctttacctggtgtcacacagctagcaagcggtggagcgaggatcttgactaatactgcagcttttcccacttccatggcacgctgcctccttctagcattcagtgaggaaagctctcaccgctgggagttgttcactctagactgagcgcctttcttagagaagggatttcttggagaaagattgcagagtcttctctaatgattacaagaaggacagagtcctggtggacacagttggagggtcttgtctggaggcagtggaatgagccaggtggcctcttggagctttttcaggagggaaatctgtaagggagaggagatgggactctaccttcgatcacttggaaggcggttggctgaggccagagagtatctttccataccttcccaggagccaccccaaactcctcaggcctttgtttctgaggttctctcagaaccactccaggcagagcccacaacacatcctgatgttatgggatgaatggggacatggggcagggcagcagcctggaagcaagtgaggttaaagaccgccttagcgagttttcccttccaccagacttcccctggctccccctggctttgttcatcttgaactcccttcacctcttctactgtttcatccctttccttcagtccaccctggatctcatcctttaaagccgaatcctctttcctgaagaggaaagaaggaaatcctgactccttagatcactatcgtgtgagatgaaagttgctcttctaatttgtcccattttcttcaactcttcttcccctctgtccctgctccacactcaccactggcaaccactgagtctgagaccctcccgcacactttctctgcgtgtcttcggatgctgtatttacttaagctgaatacagggtctaaagggtggcagtgtcacattagggcccatcgagggagcagagggcctttgtcagagtctgcaggttgtggggatggtgactggcctggagtcggggtgaagcaatgggaactgtagaagaaaggggaaggagagcagggcagcgtggatgctggacctgtctcctcttcagccttttggactctgtgttccctctcctgggaagccatacagccttggccgcttcaagatggtgcctccttgggcagcacctactctggagtcggtctgcatagttaaatggttggaaaaaagactggagagccaatcagggatgctcacttgcagttcgtgtgaatcctgcctgacccacgtttagagacaccatagaattgtatagaaccttaggtatcaaactgggtttttcagatcccactttcctggtgagaatattcttctgttgatgtgctaggaaatgtttaatccaggtgagaaacaccagactggtagtgtttgcgatttctgtggtgtagatactcccaccatggctaattccaagctgctggtgtggtcactgaaggcggagttgagaaaaggtgtacacagtggtgcaagccagctccagggcaccgtggcttctgaacgcaagtgtggaagcgctaggagtcctagttgctaggctctagagtggaagttgaatccttggtggggctgccagtaaggtggggaggtcattttctcaccaaatcaaaacacaaaaccctggctgtgtcgtctttcttattctcatgcctggttcttgattgtggctagcaccatggctatttcaggatcccactcatactgctgccattggttgaatgcttacatccattatctcatttagtcatgacagtaatcccatgacatagggactggtattatctccattttgcaggtgaggaaactgaggcacagagtgggtcagtaatttgcacagggttctacagcctttgagtggtagaactggaatttgaaatcatgactgtctgatcccagatcccaaatccttgcccagtatattatactcgcagttttgtagcttttcacagacatttccaaattctgagtctactctcaatgcagggtcttctagcataacctttgttcctgttggcaacacttcattttggactgtcaagatgcatttcctgagatgtgagatgtcatgaccctgtgtttggtaagtttggctgcaaggtactggctgtcctctaagacacttcctgagtcccaagtccacagattttactgaggactgaaatggctgcattcttcatagacactgagtttgcctgttccaaaaatggtgatttctatagcaaccatttattctagcagatgtgtgcctggtatggttggcagagagggtgggaccaaaaatggaaacggccttttattcttcacttcctgaatgcacgccctgtatgtgaggcatataggaggaaaaacatggcatccttagaatctgtaatagatctatggctcaggaaagaaatacgtgttgcttcagactgctttttatctggagcttgagttgggctgtgtttggtttgtggcgtgttctttggcagatgtacctgttggtttcaattcaatggatgtttgtcatttggtctctgcagaatatgcacatttactgtgggggtaggtggctaataaacagagagaagacactggcttggctcttaaagatcacgacgtctatgtaaatgtgtattacatagggctttttttggtggaaagtaaaataaccaatttatgccagcctaagttaaacaagaggatttaatatcataataaaggaaggttttatggagcccagggacaggagcatggccccatctttgaaaggcaagtgagcggaactaagaatgaactgttagaaacttaggtggaattctctctctctttctcatgcttgtttagtctttgcacgtatttccattttcacctctctgcagaccacagagtcgaaaaatgaccaccccaggactcccaggcttacatgtgaccaggcttgattcagctttccctgtgtgtatcccaaattctagaaagagacacagtctgtctgatgcagcttggatagttatccactcttggccaatcactcaccgaaggctttgtggtgagtgttatttatctaagtctgctcaggctgtcataacaagatactacagactgggtggctcaaacaacagaaatttatttctcacagttctggaggctggaaaatccaagattaaagtggtagcagatttggtgtctggggagggctctttttctagcttgttgatggcctccttctcgccgagtcctcccagggtggagaaagagacagtgagctggtgtctcttcttacaaggacactattctgtcagatcagagacccacccttaggaccgcatttaaccttaattacttccttacgggttctgtctccaaataacagtcacattcgagatcagcgcttcaacatattaattgtagaggggcacaattcagtccatagtagtcatgtaggataacatggctgctgggatccactcttgggccttgggaatagaatggatctcattggctcccccagaaggagaccagtgcagatgaaaaggctgaataccctgccaagacaatgtcctgtgccagattagaatctaaacctcattgtcgaactcaaacacattgcacttggggtgaatagtcctgctgtgcgtgtgtgtatccatatacgagatgtgtgcatatatacacatatgtacaggcatatatatacatatatgtatgtatgcacatgtctgtctgtgtgtatgtaattagagaggactttctggaaaaggaatgtttgagggtggccttgggttcctgttggctgtgaacacactcctaatgagctgccctgtgtctcagtttacacatggtatttgaaattgagtctaaattcccatttcttgtactttctgaggagcagtcaagaaagagccagatttacagtttgccagtctcttagctctatgttccaaaggaattaagtcactcttcttgacagtggccttaaaatagggttttaataaaatgaaaagaggagcagtggagccacccacccctgtcacctgtggctaaatggatatacgggcgccaggctgctacgggagccttttgtggtgtcacctccagtgccagtgggatacgtgccgcaacagagaccagatgatgaatatatttttaaacttggaacccatgaaccacttattatttctgaattaggaatcaaaacatatgaataatttcaacagggtttcagcagatgtattctgcttttaaggtcactctgctttgcggagatggtcgggggtaatggggagtgaagtccagcctgattctctttgtgactcttaggacatctgtgtcatgtttgctcaatttagcagtcaccgtaagtgtgatgcgaggccctcattgcggggtcagggtaacttatggaagcaaacagccttctttattttttaatacatcactgtcacctgcgcttatgccaggggttattagaagaagaggggctctgggtggccatgtgttcatggctatgatgactgaaaaggccacagcatgcaacagagtcctcagatttacccccaaatgcttctcccaccctctattctctcttagcatctctccctgaacctctttcgccaaccccctaccaaacaaggtccagaattgaggtgttctggaattccagccttgctaagctctgggattaaggccagtcatttggaaaggggatgggggaagaggcaaaaacaaaacaaaaaaaaaaaccaaaaaaaaaaaaaaacaaaaacaaaacaaaaaaaaccaactgaacattaaccctttgggtccatagcactgagaagacctcaccatttcggccactggcaaatcagcatctcttggccatatccctgaaacctgagcttcatgtaccagaaggagacagttaagccaagtcaggctgatgaaaatctctccgttctaatgactgtgcagggtacacctgttccagcctctcacttgctctcattgtcagttggacgcaggtattgaatgaccactgagtgtggagtgcagcacgagggtgctgtggaggaggagagttcatgagcaagaagagaagcagtctcttgacctcaggaagcttgcactgtgtttggggaggcatggtcatgctcactctcttgctctcccagcacaaagggagtgggctaaagggtgggagggaggcagatagttactgggcctgaccctcttctcggggtcagccacagatcccagatcctttaccttcctcatctgcctgttttcctttatagttctattggagttaaaaaaaaaatgacagcagtgtcagtaacacacactcattttaacaagagaggcagtacaaagatatctataaagaattaacagtattccttatttgctctccatttcagctctcctctagggaaatgaatgtgctttatttttatgaaataatttcaagcttacagaaaagtttcaagaataatacagagagcacccatatcaccttacccatttggagtttactgatttttaatagtttgccccactggtttccttcctgatctatgtaaccgtagagcagccttttgaggtaggagacaggtggtattatctttttgtgtgttagaggtgagaaagctgtggcccatggagttgaggagtgtgcccaaggttatctaactatccgacaacaggtttcccacacaaattccacatgatgtcattcttgttttcatttttgtctttccttgtaggacttttttttttttcatcgagcctgcagaaggggcctgtcttgccttcacaaggaggagatggttgcaggaaagtaggaggtgaaaggtgtcctccaagtctcctcccccagatcagtcggacctcctggcctcctttggttttccctctagggcagaagcggtgctggctggagggggtccaggtgctgtttgttgcaggagcgccatcttgctttagacctttttcgtttcagacagctagaggaggtcttttacggtcctacttgacccccataaaggaagttcactccacaatacgcatctcttttcacatgaagaggcaacagagggaacaaaaggagcaaagcagccttctcctgaagaggtgaaaatatcactgccttttggagccagatctgggtttgcacactccaactcttggagtgatgtgtccttatttgtaaaaggagagttctggagtacattgggaagcaagtcatcagtcatatccacagcctcctgctcctgttaaatgtgtcctcctagatggaaaggttggaacaagctgtgccccataggttctgccatttttaggatctttctggcactgagacttttgcttctgtgatctctcattggaatccatttcttttgcccaggcgtggataatgcttttgtctaatgccagctctgccccatctggtcttaaaacgaggtgaatctgctgctctgtattgaaatatgtgatctagaaggagccataaaataggaaccttaataactctttctctctgtttcattatccatgcagttttcctggcagctgtccattccggcctcattcccacctctgggacatgtcaagttattgaggtggtactggctgtgggtgactatagatctgggccagcctgttcaactgggtcttctggggttggtcctgggtagagctgggtggatgtagtctaaaacagagaaggtagtgaggcccttcacatccattttaaggaagctgagtattgttgttgagagtggccctggcattgtcttcatcaagaatggggttagggatccggctgcagtgacactggtgaggtgagaggttgaagggatggtcagacattactgtctcttgagcgaggttctgaaagtctattccttggagactttcacaaactggagggagaccctgtgtgtccttggctgaaactagaggcccaggtcacatgaccttgggagagaagccactcatggcctgaggacccagtgagctccttgacctacgaggggccatcctgatttctccacttcccagtcaactctagaatggagtctctgcctgacgaaattgtggttattttgaaatcagcttgtcatgttccttgattgttttgggtgtaatagtctcttctccgcagcaggttgtaagcatcttgaaggccaggaccttgtcctttcttctttcattggagcagaggttagggaatgctggcttctggacccagccttggaccccagggttagcactccctggctcttgcagttcccccttgccccccaactccactattcccctggatcacagagcttggtgacagcagtgtagccccttcatctcagcgtgatggtgggagggggtcgtatgcattttcaaagcctttcctgtgtgatgtgccctcctggtgcagcttctctcatgagaatccccagcctagacgtctcttctcttccattgcagatcaagggttctcaaagtgacctgctgagccacgtgcattggactcccatggtgtgcgtgtgaaaattcctcagcccacacggatgggccagaatcagaattcctggagtgggagcagaactctgtattaaataagccccctcagataattccaatgtacactaaagttagagaaccactgtaatggtctgatgtccctcacactccccaccccagtacacacacacacatgcatgcatacacacatacacactctgttaaatggctgcttctgctgttgctaagaatactttgcttttcaggtgcttgtggatgggtaggaggcagtgcctgattttgagctcttgactaggaattgcgtcaatagttagaggagggaaggatcagaaaggggacctcagaatggggttatttaggggctggggagtcagaagaactcagaaaggggcctactgcattgctggtgaagcctgaatcttccatccactgttagcacatggctatgcagactctgattcccatctgatgccatatgtgcttcctccacagtccgggagaggagctttgggtcatgtgattagccttttgccctggacagcgcacctaagctcagcacatgtcttgggatggagctgcagaatcttggtgccgtctcccccttggaaggctagagtcttggcactgagaggaagtccttcctccatccccagcctcctgactccattgctagcgactcccagcaagttaagaaagattcagtgggaagggtatagggctgggagttgtctggatctaagcctttcttgctcagtttgatagactttggaaaatctctgtctctctgggaactcagtctcgtctggtccctggctttagcacagtgtgtccaccattgcagccatgggcgagaagccactagagctatgtctcttccttaggagagcctgggggggatcccaaggtgttggtggtttggaagggcagtgaccctgcatgaccaggatccatttgcccaggcacctgctctctgccagcctgaacacccgggagcacctcccggatacgacagccacccactacttctgcatggccgtggccacatgggcacagtggggtgaagtgaagatctcagactctggagtcagacagtctggggtttgaatccgagctccaacacttctagctgtaggatcttaggcaaattgcttaaacatctgacctttagtttttttcacctgcgaaatggcgggtaaaaactgcgactagctcctagggtgtgttatgggatgcagtgaggtgaagccaataaaacccttattagcacctggcacacagtaagcacttcatgagggttagctgtgcttgttgttcctgggtgtgtttggaggagacttgtaatcttgtaaagtgaagttcaggtcctcagagacaagtggtgtctggctgtgggttctggccattgaaggcctgggtggtttagaagggttttaagttagtgccttccctagaggtgggcacacgtctgtcacctgcccctgatgtgctatttatcctgccaagccctggggcactgaagcagcccagaggcggctactgcaaacaccagggagagatagagtctccaagaccccaaatagagtttgcaggacctcttgagctctggagcaagaaggaaagggacagagacaggccccagtgtcagtggcgggttgggagggagcagagcacagctccccatgtgcgttcaggtgcccagaatctgtttggccactttcatctgggtctgcgtgggtgggggcgtgtggtagcccagaacccacttggcaccaggtacaattttgtcttcagctccagtggctacttttctctcctttgcttcactttgaaaatagtcagcaaaatccttatttccataagcatttttctggctgtaaaaagctgaatcccaaacctgttattatagctgttcatgctattttaatctgctctgtttagaggtgagagggtagcagtgactctgcaattactgagtacatttgatccgtggcgcagccaccggagccggcagagaacccttggagtaggatggtgtcgtgtgtggcaaatcactttcaaatttactaaaacgatgcccctttgcagccatgcagatatcataattttcctccccaaggcttgttgaaatgcccatttgcttcctgccttacgcaggctcccagcacgcgccccttggcccacctgcctattccctttcattctttgtcttggccagattctgtctggtctctcttgccctccgcccctttttcttcttcctccctcttcatttcctgctcagaaatattttatattctactgactggcatgcttgtgaaaccattttccatttgccatggtcagaagaaaaatagttagcattttaaatctaccaactatttcacatttaaacaagctggcaagccgcaatgacgctgcgcctcctacatacagtaattgttgcatccctaggctcccttttctatctctgttcctatttcattcatttttctatttgcagccagcacagaatatgggcttctcccccctccttctctcctgcggcccgctttctatccagtgaccttggcttctctgagtgccgcaccgtaaatgaaatgtggcattgccacatgtatcttgataaaatatatcagtggatgaattgattttcatattgatttccttggacgagcaaggtgtgtgtggaaatcaagtgtctcttaatgatagtcctagagagagacaggatgcccagggaggagcaggctttgtttttctttcacttacgaaaagtttctgcttgttagcttgggagggaggcctgtttgctttgaaggcacactctctttctgggggtaaacagcaaatgtcccaagggtgtgtcctgatccctgagaagactgcatcatccaggtgaccgcctagagccttagggaatgtatccctctggactccgccagctgcattgtctttggagagagctgaaaaactctcaaggcatgttggaggcccttgtgcaccctgcagggtggagggtcttggctggagagtggccttctccctggccacttccactttcatatttcaggttagttgagacgtggcacttgtgaatctaggactgatgctgtgccccaagggcatgactgtgtataattcataagtgtcagcatcgatggctggctgtgtatgggcatgtgtgcttgcgagcacacgcatctacaaatatgtatgagctttgtatatgggttggctatgaatgtgggtaggcagcagtccctaggcttgcagtggcttttattagcgagctctggacaaccaaaaagacagcatccagtgaggtgatcaaaacttcatttcatctcctctgcagttgctttcccaattcactctcccaactgctcctaaataaaatagatgctttcagctgagagttgaatttctttatgaggctaagtaagcgtggcttaaggtgatactgtgcatgtgtgtgtatgcgcatgtaaagaaaatgaaacagttaactggaatattcaggatagagcgatgataattcattacattttctggctaactgaggcttaactggaaaatccttttagttcaagcactgctgaaatgctttgcaaaacagactaggatattttcctgcttttgtaagtagaaggtagtgaggtaattgcatcctttgatgtttcatgatcttgcagcacacgagggccggtattttggttatcatttgtgattgcacagtggcatacaggagatggagaactagcttggattcatgtttaccctttgatggtggttctcaatgggggacaatttcgtcctccagggcacatttggcagtgcctgagacatgtttgcttgtcacaacctaagaggttgtttactgatgtgtagtgggtagaggctggggctgtttctgaatttcctatcgtgaacaggacagtctccttctcctgctcccccaccccactacaaagaattatttggtccaaaatgccaatagtgctgaggctgagaaaccctttcaaaatttttgtcccaaaatttttactaaattcttgcacataaaatcttttgttttctctgtttttttctttttaagggtcaggtgctggaaacgttctgaataattgaaacttcgaattcattgacgtttattgttccacagaacaaatagggaagcctgccagtttgcagataggcaggcctgtccccagatggccctccagtgaatgcccaaattcattcagttatttagggccattaaaaaccatgagggccacactagctttaagttgagctaggcagaataaacaatccgagaggggggacatagctccccccctttttttcattgcagttcaaactaaaatgctcagagacttccggtagcactttctaatgatgcagggtttattctgcttaccgcgggtcagagacaatctgacgatgacagacttagaactgctttcagaatgtgtaaacatgttcattggtttgaatggctctaagtgagtcttcggcagaatctgtctggttttggtatgatatatgtatcttggggaaaatggggagattttgcatgctctgtatctttgactttctttgagaaaatacttgggagtcaatgagttcacataccaaaaaagccttatgcagaatctaactgggtgtgtgtgaaagggggagcggcggaagttaggaagactgaaggacctcctttatgacagtaaaaaaaaaatcttttaaacttaatttcaaatgaaactttaatgtcaaatgttctggaactgtcacacatcattttgttaacctatacctattaggtataggtataggtctagaatgctgtacaagacgggttaaatgaagtctgtgtgtgtctggtgaatgcatatgagtagttagagatacaccattcaatacttgatttatttgtgcaggttacctatcatggtaacctctggcaggggctcattatttcatataaactaaaaaggaaaaaactatgcctgcaagactgattgattttctgaatcactcacaaagggcagccatgcagcccaaacacacttcatctctcaagttttattttagccttttgccttacaatgtctgtcagtagggacaatggtagcaccagaggcctgggggtagagtcggagggatgaagttccgctgccctctagctgtgtgaccttagacaagttgcttaccctccctgagcctccatcctgccccctcgcaagcttgttttcaggataaagggatgggaaagccctgtgtaaattgccaagagctgagtaaatataaagtgctctggatattgttccattgttaagcaacggcaataccatttataaaccaggttttgagtccatctcgagcattgttcatgagaggggccggagcctcccggcaggcactcctttaagagctgttatcacggattactccatctgctgcttgctagccgaaatgctaaatggagttgtgggtgtacctggggtctttcttgttacagtatagactctgagggggtctagatgtgtctcccctcctttctctgagatagaagtgtatttatagcctggtgtaagtacaatcagaaggttcctataaaactctgttattactgcagtacaaagttagaaatgcttgaggtttcggcttcttggctcttccatgcggcaatgaatattttatgggaaaggaaatacttagtgtctgactctttttatagtgcagctactcacagtgctggtaaccttccaaatctcgccaaaatcaaaattgctgcctgtccatctctctactcccttcttcacaaaattgactggtgtcctgcctcgctgaggtgtccagactctcttggtggacgggtccatttacaaaatgtggggggtgcagttttcaatcctagtgaatgccctaaaccagaggcgttggctcctccccagccctgccccacccctggcaccttgtggtgctggtcagccccagcagggcctgctggcagagtgcccactggatcttccattgaaggtctccatctgccttttctgccatgcccctttcctgcatgcccactagccgctgagtggaggtggcccaacctctccaaagttcactctgatcttggaattcaaaaagcaacaggtgagtttgaggtccaacaggcccctgaggggcttttaaattttaaggcttgagcttcggctgaagccctggcacagagcagtcatcgggctggtaagatttccctctcaggtcctcttcctgtggtccctttagtgaccccacgcataaggcaggaaaattgggcctcagtggtcttggccctggtttactagatcagggactttaagtagaggaaatgggtctcctggcaggtcagcatccatggaaattgctcccctggtggcccaagggcattgtggcacaggtgttccactgggttggccccatggtcctcagagacctattacgactatagcaggaccgcagactaggctgatggccagattacagtgtcaaagaacacctttctcaggcagctatccctcatggatctccttagaggcccccacaggctagtgaaatgttgacatctcccatggaggtgggctcagtggcctcgtctttttaccagtacccaaaaagcccagagtggagagcttggcaggtgtgaagtgtggctcctgagatgcacgggagcacagctggttgtgtctcaacactggatcgtgacagtttttcttagcatgggcagggctgtgaaaaatgcttaacataatctgaatgtgggctccacacttaatttagtaggactctgcgagctcaccagcatcattgcatttgccttctgctctgcccctggtgtttgtcttggcgccaaagtaggtaaagggaaaaaatgatttgcaaacctctggcagctttggtttgatctcccaactctggttgcattgctgccaaacagagctgtattttcacatgacagcttcgtactgggccttttctttctttctttcttttttcttttgtactttttggtatccaaacttggtggtagcagaaggcaaggtggggaatagagagcttttggtatcacaggcttagaagctcatttgtctcttaagatgtgagggtaaggaaagggctagttattatttttgataaatgggaatggggtcagccaatggcttactggagaaactagatatagccctttatacttaggactgaccacacagttgaaattaattagcacagttgaagtaattagcacagttaaaatttagggttcctatgaccatgaagttgatgggtgggagataggtaaggctcgaagaactgaaaatcctcaaatgtgctaaaagcttcattattggtccttattcatattttaactcaccctcctcatctgtgaagtcattttttttaaacaatgaaaatggataaaagaaatggaaccagagagagaagcaagagagaaaaactttaattaagtgcctattgtatgatagacactgctgtgttcttttaaataaatacctttcagattaattccaaagctaagatttagcaattccctggttctgggattatttggccctaggatcagataagccaccagtattcactgagtcattcagactccagagttgcgccagatcccatggaagatgcaagaatgcatataggctgtagttccttctcttgggggttgagatcacacagctgtatacccatgtgtgcacacacagagacagatacagctagtggatcatgccggggggaactatacattccagtgctccagaaattcctggcatactgtgcctggggtattaggaaggtgacttgtgagtccctccgtgggacactccacctccttatggcagcttgtggctgccatgatgaaatgaaacacccactcctgaagatgtacaatttgtgagtgtggtagacaaaatagtgactccctaaagatgtcatcctagtctctgtaacccatgagtatgttagattacatggcaaaggaatgacttaaggctatttaccagctgagtttaagatagagaaattatgctgggttatccacctgggtccattgtaaccaacataacctcaacggtctttaaatgtggaagagggaggcagaagagtcagtgtcagtgtcagagtcagaggaggagtgagccatgggcccaggaatgagagcagcctctagacactgaacaaggtagggggacagtctctccttgaccctccagaagccacaaagccctgccagcaccttgattttagcctagcgagacccattttgaactccttccctacagaactataagatacatttgtgccattttaagccactcagtttatcgtaatttgttatggcaacaaaagggaactaatatagtgaggcagaagaaatctgagtggctcatccttgggcaaatgggagccagtgctgatccttttactgttctcgggtgctcttgcaacaggaagtgacttgcagaagtccttttttatctgaaatgccagggaggatggactcttattcagcctagcttctattcagctcaaaggaaagaacatctgcctttttcccacatcttctctgtacccctcacttccttcttgtgggggagattccttttcttcggtgagttccctttgcggtgtggaatctcgtggcaagggctctgagtaaaggaggagggttgcatggaatgccattgaattcattaggcttggactctagcaggaatgttgcctggggtgctgatgtccttctcaaccttcctttgctggagtccttcttgtaacttgtcttccttttgtgaacaacctgggtgtagtttttaaaataagcgaattctcctagaagtgttaaaaatgagccttcaagtactatctcggcattttgcaaaggttaaagcccccactgtttgggggctgagggtgctctatggggggccacccaaaagcaactgtggaaacagagtctggcttcagtctctccagatgttgtgcacataagggagggactcttgagctcatagatcacagatctgtccacaggctgtcagtaggaaagagcatcttattttacagatggggaaactgaggcctagagagcataagtggttcatgcaagatcttacagagagtttgtgagagtctgagagctgttccccctactattgcaacatttggaatgttctgaggttcttaccttctattatcagtttgagggctgtagatgagttgtggtagctacagagatgagctttccagtgtgcccccaccaagagatgaatgaaagtcatcatcgggcagatcactgcctactaaaaggggtgggtttttttggggggaggttttactcttcgtcacagaacttgagaatatttctactgaggatgactttgtctttggggcttccattttatttttaagattcaagtgtagttttaactgcagggcattagctcccttgtaggtcacctcgtgctgtctctggggtttatgactgagctctcattccttagtcacatgtcctatactcacacttcctatcccattttcctgcctcaccaagatcaccacaatgatcccaggttctatatagcatttcttttctggaggtctttaaaaatattctgggagatctgtctggaatgcttgagtacattcatttattcctgtatgcatagagggcccagggacctcccaggctctctgagccctctgattcttagagggttaaactattatggaaacagacattgcatctgtgtcttctcttgtttcctgcatgcagcagtgacctttggagtacattgttcaggagaccgacccttttctaccatttgaagtctgctattctcatctctctaccaaaagagaaactaaacttcattgtcgtgattaaggtcacagccaacagcagttaaagaagccgttggtcttcccactcataccgctgccctctccctagctctcaggaggaagagctctccaaaatggaagtgtcttgggaaagaaatggaagtggaaagagaaagatgaaaaggccaccaatggcacttcccgtgtctcagcctcaccagagaaggaacttggccacacactggttgggtataccaaagtgacacaatgtggatgttccagtggcaattaagtatttatatgactagacttgaggagttccaggccatgacacttccaaatccttccagcccgcttgtggagagaggcccggaggcttccagcgagacaattagagtgtgaattagattgtgtcttctggaagggagatgaagttacctgcctactctattacagtttatttcattaaggttgaccatgcccttttttttgggcagagggaataggatggattctctggagaaaacagtgtagcaaggcaatggagaaatgtccacactggagtaaggggctttctgggacctggatggagtctccttcctcccctagggaataggacagaggtgggaaaggtgctgcctgactgctctgtgcacatctgcatgttggtgatgagtgtggccagccccatgctgtgcatcggtgagaggaccgctcaggcaggtgttgctgtgctggcagcttcttaggaaggcaaggagcaaggcgtgggctgtggggcccttggggcagagcctgtcatggagtgggatgaaagggtgcacgggacctgttggcagccccagcggccaggctctgttcccaagctggagagagaggcaagtggtgagggagggcaggaggaccagtcatgggtttaatgcaaaatgacagttacgggggttgccattttagagtaaaacaggccatgtgactgaggagcaggtagcattcatattattcatatttcgagcttggtagatgtagaattttgcagtggaggccaggagaggatgtgagagctgcaggacagaggcataggtttttggaggtggttgtggtgttccccgatggcaatcaacttcacggagagaagaggttattttctacttaggttgcctggagcctacattccaaacttttagtcctcttcatctagcactaagttttgcatctcccttattcctgtcatacattattagtgtgcactgttttaaagtcttttacatacatatgtcttgcattccctacttaattgtaagctccttgaaggcattgcctgtgtattatgtttctttgaatctctctgtggtggctaatgctctgccctgcatttagtaggcaataagtttgtgttgagttttgagtcaactaccactcttttctcccttcctcttttttaatttttttttaaattattttttattttttatttgacacagagtcttgctcggttgcccaggctggagtgcagtggtgcgatctcggatcactgcaacctctgtctcccgagttcaagagattttcctgcctcagcctcctgagtagctgggattacaggcatgcaccaccatgcccagctaatttttgtatttttagtagagatggggtttcaccatgttggccaggctggtctcgaactcctgacctcaagtgatccacccgcttctgcctcccaaagcgctgggattacaggcgtgagccactgtgcctggcctactcccttcctcttacaaggctccttactcatttcctgcgtctcacctgctctctcagcccagttttctaaaaaaagaggtaagagatggatgccagtctctttctcctccagagtgattttgtgaggatttgtacaatgcaagtcttgagatgcaaatggacatctaggaacagaggaattgctggagcatggagaccacacttctgaagatggaaggagacccttctccaggctgtcgcttttgatttgcggttttcccattgccaattgctcacactgatccccagtcctgaaggggatgggggctgccgctaattccctggcatctcatgacttcctgttttcctccagttattatttttattgtacttccttcctgcttcttcactctccggcttcgccagtttgttccgtgtgatcatttcagctttatttggaaactggaagcctcattttactataatagtttcttgacgattttctaaatgaaacttgcatacttcatctgctcccccactgctcagatattaaacaaatatctctaagaggtttccttctccccccccaaagaccagcagtttgctcaaacagatggcgagagatggcgtgtgtgggtatgtgcccgcggtccacgtgtgtgtgtgtgtgtgtgtgtgtgtgtgtgtgtgtgtagtagaggattcttatggaaggtgccagtttctgcagcatcttcttgcctttttggcatccaactacggagcaagacagagcctcctggcaagtgaccaaacagagtgagtgtccggaaggcccgtcaccctgatattcacgcaaagaatctgtttctctgtgaatgggcggctgtggaggaggccgggggagcaagtggctggccagcctccaaggccagatgttctgtagtaccatatgtcaggataggaaggacggcaccgagggctcctagagcgtgtcagacctcagctcttgaactctgtaatcctcatgcccccttccgtcctcggtcaagaacgaacaatgcttccctctttgtctgcttttcaaccccacctcttttctccattagctttctggtctaaactcattattgagacccctccacaacattcaccttgcctctcctttgcctggccccaggctggctgcccctttttctggaatgatgctgttttggtgcctgtttccctctcatctgaaacaaccacctcctcttctatgtctgctgcctccttggtatcttctaagcccaggcatgagcccccctccttggggaggcctgagcttttgattcccactcaggctgggtgttgagattgtcctcaggacctgacgtgcacatgtaagtactggtttctcttatagtgtgtattgtcttccctcttcaactaaagctttaggagggtaggttggtgtcttatgctttggttgtatccttcactatgccaaataaatacctatcaatcaatcagtcaatggattctcaacttgcctaggcccagaacagaggagacctgtctcctagccatgttgagttggtagccagtgcagggtgctgaaggaaagaagtgtagctcctcggctgcccattcttgctgccatctgcattctgatgagtagaggatggcatgtttagttggttggaggtaacgaacagaagcaacagctcttttgagttccctgctgtggtaactcttactccgtggagtcactcaggcacctgtgctcgggagtagatggagataggaggtttgttccagtctctcttttcttgtaccttcctagggaatagcaatgtcctgtagatgtgtgacagtgataccatgttggcattttgttctggaaggctgacctaactactgtctttggaaacattctccttctcaatttagaatttgggcccttttctctgtctgtctccttccatggtccctgcccacgctgagcctcccgcgcccagccagctccattgtttcaagaagggctttggggctgctcgatgactgcagcactgggaccaaagtcctcagcatcagtctcaggactccgcatcatcagcccactctaccgcctccgcaggctcctcgccgctgtcttcaccacctgcccactgtggataagccaggccagcctcctgaaggcttgcccggcggggtatgctcatttctaacaccaagtcttggctcatgtgatgcctccatcacacggtgctccccgtctcatccaaggcttttccattcttaacatttccaaacatgggtagctagaacccttcggagcttccagagcccccgaaaggaccaactgaatctcaccatatcctcagaccgtctgcagtgacagcagctactgttgatctgctcctcttctgcacacccatagtgatttgttgacatattggcacatcaccacatcctcctctgtctctttctccatctctgtcttgttgtccactaggttatggactggccagggacaggggcctttctcttctttagtcttacactagctacacacttatcataaagacattatgttctcagtgttgtgctaagttgttttacatgcacagtctcatttatgtaccttcgcaggtaacagtattgttagtctgcttgacagatgagaaaactgagacttggaggatcccaaagtcttagagcctagcaagttgtagatctggaattggcagacagggcttgtgtcagcctaagttcttaaacttcccgttctactaactagtggtatcaggctctgccacttacaagcttaacgaccctgggtgagttgtttatttccttgtgcctcagaaagaaatagaaataaaaatacccgcttcatagagttgtcctgaggatcgaatgagataaggcatgaaaatgcgcagaatagtgcctggcacatagtaagtgctcacatatgtcttgtacagatttgcttctaattcttcttcatcaccaatatcatctaaacgttgttggtattacagttatcacttttcgtgtctctgacatcattttagcacctgagatgatgttatgctcttggcttgtgctcaggaaatgcttaatgaatgactgaaaaggcacttgggcttctggaggtgacttggtgacaaatgctcagtgtgatgttgtctttgtggcagatgctcattatgaggttgtctttgcctatattcaggcttggcaggttcttgtggcagcggtggttaaggattaaggcattgtgtggagtatggtgggggctgcagccgacaaccttcctgttgcctaaaaactttttctccttcccacccccttccccagtagctctatgccctgccaagtctgtgcacaagccttgaaatgacaaagtaccctttagttaattgcacaacggattgcctagagttaaaagttctgatttatatgactatagctctaactgctcaataacacaggcctgtaatctaccttcatttcaaacagaacggtgatttatagggcagcatgccgctttagctcagaaatgaggtgttcaacatatgcgctgttgacataaatttggaatttatcgctgttgtcaaaactgcctgttggacaaaggtgggtattaaggcaataaatggctcagaatagttttctgtcacatttcctaaccattgtattcagtctatttgagggaaaaatatatacttaaaagtaatcaaatgtccaaaatccatgcatcttgttttgaatggtgggaagggaggatgtagggaggatggaggagcatggggccttggggagggggagctggggggattgtggaggagaaagcttttcatgaagttatggcccgtttaaaaaagattccactctgcctcctcccccatccccatcgggaggtgggctttcctttctcatttacaaaaacggggaggaaaaatgaaagctcattaaataaaaatagtaaaggacatttttatgtgtgggcttaaaaccagcaatgtcagggaggagttagtgagtggggctgtgagggaggcagaacaggattttgtttatggggaaataaagcccctggccagcgttggtttctctgctgccttggtgagcgtgggcttgctcccacctactctcccaggttccgaggctcctgtgcacacggtgaatgtgtgctggctgatgagggtgaggagcggtgggtacccggctctaagcaatatgttctactccatccaaatcccgattgatttattacccactgtacagccaagatgcatccacccctcatccatccactaatgctgtgccctttgcaaggcttgagaatacaagatgaatgaggcaaagccctgtcttcatgtagctgcccatccagctggagagacagagaaacaagcagatgcaccctagtgagtacatctgctccaacagaaacacacttaaaagacagaggctgggggggaaagggggtcagctttgagaggggacagaggggagctactggggaaggcttctagggatggtactgaccctcttgcctagtgaaatgtccttttggaagtatcaggttcctgcagggagattacacaaaaatgtagaaaaaatacgctagtgacaggtcctccctccatcccagatgtgtgatgttgtggtcaggtgatcactgatgtgtgtcagtgtattgtaagagtggggccaacgtccttgtgcattgaggctccagcctctcttctcctccatgccatggaccgtcgctgcatcatctaagcacagggcacccaggcgggtagcacaggtggcttagcaaatgcagtcagagtcaaggttaagaatcgatctcttcattctgtttcaagattacatagcatgcagtatgttgttgggtattgtgttgcaccgtgagactgaaagtgtggatgtttccagagagccgctgcttggcctctgtgctcgttgggcctcgagtcactggtattatgcatttcctgtgtgctcgggagccttgcgtgtaaggagcaagaggagcacgcaagctgcctggtgcttttccccatgaaaatgaggcccagcagggaagaggattcgtatttgttgcttttattttatttttccttttatctccatgcccacacgcttggaccgtctcagcattgataaatgtgtgctctcacaaacatgcacacaatcccctttctctggcctgtgtgtttgccagacacacacacacacacacacacacacacacacacactcccacgcacactgggcatggacaccaattgtaaacctcgtccgtgtggctcaccctccttttgccaccaacccctgtccttttcacacaaagctccctgttgggaaaactcataattttcacaccacacagccttgactggccattgctggaattactgtctctttgaagtgctttctactggggcatttacaggccgttttaattacctgcagcttgcaaagggccttgctctgtcccagcctttgtttgtttgttctttgcaaggagtctgtgtagaaaggaatacggctgacttcttttacaaaaaagaaaagggggtagaaaaagaagtttggggagcccttaacagagcttcttgccgcagcctgctgtgggacaccatgcccactctaacaaggccaggaagagaggctctcgcccttggctgtcttctcagcaggttccagcaccgtgggtcccactcctggagcttgcctgggatatttttgttcatgcgtttatgttttaattattattaagtatattttcaagctttctaccagagacagcaagggctgtcaaatcatgtttccctcactgttgaccaaatcaaagctggcttcagttgagctgggatccctcttatattttcaactaaatctgttcaaggaaggtgcattattaaattattgagtttagacgtgggctggagggtaggggttgaaatcacatatgtgaaaggagtgcccactttgagctgtctggtgtttttctttccttttcttcatttttcacttgattctctaaaaggaactacatataaatagcattctttggggtttctgttaaatatgagtgtagcatgtcatgtctgcagatgaagatgctagtttaccaaagaagcctcagaactgtatcccctttttggggggcttttacagcagaggaaatctttattcatttattcacttagtccaaaaatgtattgagaaattggaaacctcatacattgctgatgggaatgtaaaatggtatagctgctttggaaaacagtctggcagttccttaaaaggttaaacatagagttaccatatgagctggcaattccactcctaggtatatacccaagagaagtgaaaacatatgtccacacataaaacttgtacacaaatgttcatagcagcattattcgtaatagccaaaaggtcaaaacaaccaaatgtccatcagctgatgaatggataaacaaagtatggtatatccctacagaggaacaaagtactgatacaagctatgataggaatgaagcttgaaaacatgctgtgtgagagaagccagaccccaaagggtgcatattgtatgataccatttatatgaaatgttcaaaataggcaaatctgtagaggaagatagtacatatgtggttgccaaaggctgggggttgaggggaggaatggagagtgactgctaatgagtacgaggtttcttttcagggtgatgaaaatattctggaatttgatagtgatgatggttgcacagttctatgaatatgctacaaaccagtgaatggtatacttgacaaggataaattttgtggtacgtggaaaatacctcagtaaagctatttagaaaagtgtactgaatacttactctatacagcacaccctggcatactctgaggttatagtggatggtttctgccttaatgtaacttatagtctagtagagataaagaatactaataaaaagctaatatataactgaaaattgtgttaaatgttataaaggaaatcaacaaaatgcaatgatggaaaattgcgttgatggacaacctacctagaagggctgtgggtcaggagcagcctgactttactggagtccagcatacggtaggcgcttaacagatatagggtgagtagcagtggggcatgagtcggcttgccttccctgtagaaggttatgaagtccctgcgagacccacagcctgtcagtagactctgggtaccatcattcaatttactttttttcttagaggcctctctgttcttgcttctattcaattagatggagaaaatcccaggaatgctctcggtgactcctttttagctgctggttttcctgcccctttcagggaaagactctggcttaggtaggaatatgaaggcagaccctgaggtgagaagtctggcgaagtctgcctgtttataggggcaagtaagtcatgtggcctcactttctccatccacaaaatgggctctatactgtccatgtcagccacagggtggttgagatgatcctcaggaagccctttcaaagtcagacatgatctataaatgcattaccttctttatcattaaaacctcagttggggctaggcacggtggctcatacttgtaattccagcactttgggaggccgaggcgggtggatcgcttgaggtcaggagttggagacagcctggccaatgcggtgaaacccccgctctactaaaaattaaaaaaaaatcagctgggcatggtggctcatgcctgtagtctcagctactctggaggctgaggcacgagaatcgcctgaacctgggaggcagaggttgcagtgagtcgagatcacgccactgcactccagcctgggcgatagagtgagattctgtctcaaaaaaaaaaaaaaaaaaccaaaacctgggttgactagatgttcttttttgcatttttctagaagaaaggaagaaagaaccagtaaggaagctaatatctgtttggcttttgctttttttcttcattaaaatgacaataatgtttacaatgtgatttggtacccgtacaggtaatccgttcagtctcttatcttgtgttcataattgatgtttagagtgatagctctccagctcagaatcctcatagaaaagtaatttaattttcagtgtaccaaagcagaaagaatgaggcaatatacattaaaaaggttttcagaatggtttaattccagaggaactttcttcttaggcctttaataaacctcagttattctcaacaatctctgagtttccatggctggtccatgggatctgaaggtagcattgtgtctccctggctagagtggaaacatataaaaatgatcctggataaccaggagacaacatttccttcgcatgtatccaggcagaacaaggagataaaggaaaagtctgtagctttttgaaaactgttttcccagaaatcggttatttgtgctggttaaaagccttgtacgggagagggagaacaaaaaccctgttcatccataaccatagtttaattcccttatagggccttttaggatctggagagaatattttggatttatttttgtttcccttgggctgacatcatcaagcatgcatcatggtgccctgttttgggtttggaaaaagctcagagaagctataaatcttaaagcattttactattttttccttttccttttctaaaagcacaacttttctggtctcttaaaagaaaaagaaaaagaaaaaactacaaaagtatgtattgatctcttcccctcggatcttaactgccctggctgtaataccttgcttacatctgccaggtttttgtgcagttttgcaacatctccttaatccagtgagcataaatagaacatttcaatcatatttggctaccaggaacttcacagataagcacgctaagaccttgttgaaagagactgtatgagattgtgtgcgataagatcatcctatagcccagtgcacaaatgaaaaacttttgttcttggtgaaatttgttgatagagatatttcaaataaatgacttaggagaacttagtattttaaaacaaaggaccggttacgtagcagccagaagcccaggcctcttggttctccacagccacgaagatccctccttgagcagttgctgcagggagattagtgtgcccctttgtcatttctgacattgtgttttagcactcgcaggcagccttatctgcaagtgctgtattcggtgtggtcatggccccagggaatgccattgtccttcctcatattttcaaggctcaggacagttccctccactcttcagtcagctccagattggccttcatccaggccaaggcaggatgcataggatgcatggctggctggcttccttccttccttccttccttccttccttccttccttccttccttccttcctccttccctccctccctccctccctccctccctccctctctctctctttctctctctctgtctgtctgtctctctctctctctttctttctttctttctttctttcttctttcttcctttcttagatggagtctcgttctgtcacctaggctggagtgcagtggtacgatctcgacttactgcaacctctgcctcctgggttcaagcgattctcctgcctcagcctcctgagtagctgggactacaggcacctgccaccatgcctggctaattttttgtatttttagtagagacggggtttcaccatgttagccaggatggtctcgatctcctgacctcgttatctgccggtcacagcctcccaaagtgttaggattataggcgtgagccaccgcgcccgcctgcctggctttctttctaagaaccccatagagagcttctcttttggacagtaggggcaactgttttttactggtgtgtgtgtgtgtgtgtgtgtgtgtgtgtgtgtgtgtatccgcatgtgtgtgtagacaaggtgagtttttttccacctctacatttttctcttccgattctctttcttgtttgtttgctcattcagtcaacaaaaatgagcccctgccatgttctgaggtcagtgatgaagactgagaggatgaatctggtatggacccttatgcaggagatataatccagccagcacagacccatgtcagccccacagcctttcagttttgtaaacctggttggaaagaacctaagaaatcatctagctcaacctttgcattgttgcagaggtgtcaagtgaaatctagagaaactaagtagtttggccaaggttatttaatggatatctgcagagccaggtcccctgcactcagcccgatgtatatatatgtacacatatatacatggtcaatataccactgttttaaaggtgattcttaagaaaacacagctggtttggtattttctctctctccctttaaacggttccaaaacaaccaaatggccactgtcttccctaactctcctggtctggatccccagcagagaggcacctgctgtgtgctcccaaaacctgcagcatggaaggtgttaactagcactcagttagttcttggttgtttttcttaatctgttgtttgaaatccttggcttttattggtatatttactttatggcatacataaagagctgtattaaaaaataaattgtgttgtaaaagcattcggtaatgtttattaatattgactagtcagggagcaacgaactctattgctagaaggataatttgtggtaatacccgctaagcattcacagcttgtcaaatgactgtctaatctcaacattaaaaaaaagtgggcaaaagggtaatttcccttatgccttgagaaaatgaaagtgacccattccccagccaacattagaatgattgcttctttttctcccctgggataccaggcctcctttgtggttccaggcagtcccatggctagattttagtggttaggtatccctttgtcttagggtggttggaaattgccttgttagcaatagcttctcatatgtctgttctggctgcctggatctgtgctgaggccataaaagacagagataaagacatagttcttgcccccacagagtgtatagtcttaaggaacttataaatggcttagtcttgaatcttgaacttaatattcctacaaaatacataaggagaatgacactgggtgtgactaatggcctacttagcctggaatgtggtacttttggtggcatgaagagacattccttgggaagacatgatgtcacccttagaaggaagggaacattccccagagtatccctgatgccctatgaataacatggtctggcttagggtagaggccgctagtagaacaggctctgtttagagtattccttttacacaaaaagacacatagaaagtacaggagagctagtctgggcgtggtggctcatgcctgtaatttcagcactttgggaggccaagatgggaggatcacttgagcctaggggttcaagaccagcccagacaacatagcaagacctcgtctctattaaaaacaattatttaaaaaagaaagtacaggagaatggactgaatatggaaacactctgcagtctccctggaagttgctttggggaggaaatactgatagcctcataactttgcattcatcccttcctcttaaaattagagcacagaatgccgttgactatttcacctttcctttgtcatttgaattaaaggtaaatggacgttgaaagtgtgtttttgacttaaaggtctaaggaggaagagtgagcccattgctaaagtacataagctttccctttactcaattctgtgtctacttggaaaggtgaatgaggctagggcaaggttctcttatcaccgagcttaagagtcggttgcttttgcggctgagagcattggcagagctccataaagggacctaccttatgctgtccccacatggggcccaaggctgcatgtcagcaccaactgcccaggtcctgctcgacaggaccaggaagtttgcatggtggctgggtaagtagatgatcttggagagtgttggttctcatgggggcggcagactttttggagaagagaggatcatttaggtcatggctgggatcttacagaatctcccgtctgcttcctatctattctgagtacccctctgaagcactgagaaggtcaaattgatggtcataggatcagaaaggggtggtcataggatcaaaaagcccaaagcatcggggtgacttttgcactgatgaggtcaaattgatggtcatagaatcagaaagcaaaaacccaaagcattggggtgacttttgcatgtggagtggcctcatacctacaatagggtgagttgggaaggattatgtactgcattgatgtggtctgagtgttggttcagaggatggctcagttaggctgaaaacaaggacaacatcgtcttataaatgcccttacaggatggatttcccactttatttttcctcattcaaaggcgggagagagcagtgggtagtccagctgtggagccctcccattcacttttcccaattacaggtcctagttccccatgctggtctttccagcaaaactcacaggtcagacaatttcaacccttggattattggaactgaggtttctttctctaaaccttccctgcctgttggtctgctccaacttgagcatttgcccctgggctcaggaacctgggaagacatgtgacattggcagtgctgggacatgaacccctctctctcagctaggtagtgctcctgggcttttccctttgacatctgctagtgcagtgagttcttcgcatagccttccccccttggtccctggctgcataggatggaagtgggccgagcttaccctgcagagagtagacatggtggatgcccccttggggctcagctgttgtggtcagctctctctggaagctgaaggtagggaggatggagtatggcttgggtctctccttgctgccctttatgctgctgttgctgttctaggtaggctaggttgataaaggcttaccctgaagatgacaggttggtctaatggcttcatgcttctatgcagtagccattagccttctttgtatggactttaggagccacaggacagggtccagttttgaattggaggctgtctatgaagctgttgtacttagaatattgttaggatgagcaaaggaatgccatagatgccactttacagagagggatttctccagcatccttgatcaatcccttttgaacgaggcctcatgaggaaaggaaatataggcacggtctctgccattatggagtttgctctctaaaccagatgaaatctttatgagtttgcagactcacaatagcacagaaatggttcaaatgatgagcttgtatcttgctagcttcgttttactagtgagagttgtttggttgaaaaccagtgagaaggaatgaattcttctcttcagtttcttgtcaaaaggttcagatttgtttagcttgaatttctcataatgattcagctttcttgagacaatagaaactggttagaggttaatgtgttctttgtctttttggacataagtgaaaatctgttacaagcaaggtgagtttacctaatgagccactaagagttggggagaacttgagtctgttccccaggaatggagagtgaggacctgaagcatatggggcaatggaatctccactgagtataggatggagatgcgtgggctgtactagaactgggttactttcaaaatggtgttcagcaaggtagcttcttctcagagaagagtgtgtgaaaactctaccaccaactaaggcagtgtgcagaaaggtgcaaaaatgtccccagatgtcttccttcctttcctgtcacagtggaggctgataatctcagatggccacgtgcaattaaaccttatgaaaagacaggactagattgggaagatgtgagtgtgtggtaaggaagaaggaggtggatagaatttccattttgatctaaatgctttgcagttgcataatgtggtgatggtagtggtgggaggttgtggtctaaagagggaatagactgtgagttcacacaaatttgcacttttgctccaggaatcggttggaattctatttccacattggctgttctgcagactgtgccatggagagtctactggtagccaggtacctcaaatgcactgaaatcctccaccattattttctttgaattaggagaagccttcacttttccacattcttcctttggtagatgaacaagaattaaagatacgagcaaaccagtgctgggctctgttgaactcccaggcctgtgaggttgttccctttttctctaatgaactttatgtgctttgcccaggtctctctgccagtgaggaaagacctttgcccttgtacttcatgtgaaatcacatggacaccatattaatctctggtaacctgtatggggcactgagttagtgggtcagttgcagggcagtgaccttaccctgaggattagacaggataggacatccgggtctctgaaggcagcgaaatgcatgacaacagagtcattccgaggacaggctggtggtaacttctggaagtttctttcactgaaagataaatagcaagtgagtaaaggaggaaactcaggccacttggattagattttaaatgactagattgctgggattgggtctagaggtttgcttgggcaatcctagcctggctgcctcagtgtcagaggacatcacaatgcaccgtaagaagtgggacgtggctcagggagaataatagtgccccttagaggaccacctggtaggctaggtaaaaggatatgggtaagacttttgaatgataaaattttgtctctattcaaaatatttgatgtgatcttcatcactttataggtgatcaaacacagagagattgtgatagcatgacttgtccaaggttaatggccgagtcaggtgggaggatgcaggtcttctggctgctggctgggcattcttctttgtaccctgccacctctgtagtaaaagggcaagtgcctgtcatctttcacaccaagccaatccagttggccacgataagccacttccaccaactgccaagcaaatccattcatacctagagaaaaggcagtggtgttacccaaaccaagagtgtttatcatggtgagggatttgatttggaaccctcatggagaagagatgggagccccagaggggagtttagcctggtggtggctcccaaatctgaagaccggtcactctagtgtccctttggaaaataaatccaaatgggtgttcgtcctcctattcctcttgacagccacccttcagaagtgggcactccaggagctaacaaacccctggtgaagaaaaggatgaaaataaactgaaacccttatgttgccatccaccagattttgccatgactgtgtgcgagttcacctgccaaaccccttatgaatagagcctttgccactctatagaagaacatctcttagaacagcaagtatctatcatgcccgggcaagtgacaggaatactccaccatcgtgtgtgtttgcatgcactcacatacccctaggtatgtagtttaaaagatactttgtccaaaatgctattaggacatgtcccagtgcccaacattgtgaaatctatttagagttaagaatgttcagttaaaatgttctgtactgttaatatttctcaatttgggtggatcagcatggcaaggagcaagagaacatgggggggtggtacccctacagtgtcatagataagggtgtgtgtgtgtgtgtatgtttgtgattgagaaatcatttgtctttggcaagtggggaaagggaaagcatgcaaacaaaacaatgtgattgagaaagagctctgctgagagaactttgtgtgatccctatcagaaggccgtacacagtggataccatatgctggtcctcatgctgtgggagcccattgactgtggctctagggaggctcacctgggtccaccacatggtcttgacacactgctgggttctcattctgggacttggaagggtgggtggctcggttttgctaccatctagatactgccagcttgagtgtgtaatactccctctccccacctgcagttttatctgttgtcagtaccagctctccagccttttactatggtcttaacacatcaacattttgatggagatagagggccttgttttcccttctgcctgccccaccgcccacagatccggcttctggctgccacgcctgccctgtcctgagggccaaggcccctggggacgttgcagggatggcgcagagactggggcggaggtggaggccagatcctggatccggcaatagcatgtatgggcctgacaacaggagtgtgggtgggcggcagcttggagcctctccccagtgctcggctccctgctagcgcacccggttccctgcatcttaccagctcccgtgctggctcgtgactgagctaggggtctggtgggagaggccccgggttgggggttgggagttgggatgggagcactgctgtaggttgggcctgtgaccggttgttactgggaccttggtcttcccaggggtgataacatgggcctagcccacctcacagaatcacagtaatggcaaaatgagagcatgtgtatgaagagctgcagatgactatgaccaccctacatttatagaatgatgttatccagtttcttgaaactctgctttctgttggggcaagacagagggaagacacttctaaagctgggccttaggggaaaggtgtgcatgttggggtgggtcattgcagtcctaagaacatctggatgccagagaagtatcttatgtctataagggcatcaatttattcacaggcttattcagagcctcctttgtgtcagtcactgtagtggaagttggaggtaggagagagaaaagatacaggtgtagccctcctgggtcccatgggctcgttcacagtcaccacccgggaaaggcagtgctacacagaggtgagcagaggctgtgggcctcctgtgaggtctgtgctagtttgacagtgagcattatgtctgtctgactgtcctgggtgttgcatccttcctccctctggaattggatctgattttttttcttggtccatgtgtcagtggtaaagcccgtggacaagaccaggaatgggtgcttcactggctgcagtccctgggcagagggcgtgatttacgctgtctgaggatccagggatgtgtttccatcggtgccctcctgttcccttccgcctgtcacctgccagagggatggctgccaagcccccaggtaggggatggccctgcctcttgtccagccagagcagcagcaacctctcttttcctttcccttacaggaagctgcacagtgggatgaagacgtacgggtgcgagctctgcgggaagcggttcctggatagtttgcggctgagaatgcacttactggctcattcaggtaggcaagttcgccttagtggcccgttcagatacaggcaaccatctcctgcttgcctttacccctcctcagagcctgctgtggcctgcatgtccccactgcccgctggggccctggtccatcttgttccctggaccctccctccaggcttatgacacagaagatccatcctgatggcggggccacttggatgaacccaccttcaagctctcgtgggtttcccaggcatcagtggcaaccagtgccctgtgtgatctaccttccaaagtagactgcagtttcattagtggaacagttgtggaattaggttctcactgtctaatgaatctgactattgggttcacattatacaggagcctttaattaaatggatatagaaaggttggaacacaaagctggttatagcgtgctgtcttttgcaagttaattttatacaattctattgaggtcgactgtgtggctgctggtaattttgctcatgtttgggcaaagctgctctgccccacgaggcgtggaatggggagaagcacctgacatttggcaggcccgagtgttcttggtggagggaaggatctagcaggtctgatgcggtggctttgaggcttaggtcacctgactttagttgtggaggcctcaactcttctttgccaggtgcatagtctcttccctttaattcccttgccttccaaccttggagtcattttttaggggagaggagagggctgttgtttcatttggtcttgtcttctcctcatgtaggccaaggcctgcctctcctttccccatattggctccagaaactggccctccaggcagtttggcatttgggaaatgggctttggggtcaggcagagaaaggttcaaatcctgtttgtaatatgtgctgtgtgaccttagctacattcatcttgtgaacctcagtttctgcatctgtcaagtgctggtgttgttaacttacataattttttggaggattaagtgacagaatatacgttgaaggcatctgtagtaagcccctggcatacagttggcatttaataaatgttaatggtttctgcttgcaccttcctccctcatccttgtttctgagcctgttgccccggggggcgtgtccccatccgctcgttccctgcctgcctggccgtttagtactgtctttcccctgagcccatcatgggtacagtcgtggaagtgctcttcgttcgctttttctgcttcagctccccactgccttgctgcagggcccatgtggttccgcattgtgttggatgtggtctctcccccggccctcatggcccttcctaaagcgtcctaactccttctcacttcccattcttccctcttccaggcgcacggatttgtccacagcaggcagctggcagctatctctctcagcgcgtctactgtccccatgtcttcgtgcattctgttcttccttcctgtgggccctccccaccctgcccctggctccactgaatcatcctcctcctgcccatgtgtctcacctcagcccagagccctaacttccaggcatttctgcgtccggatctgcttgacactcacgtacactttttcttctgttttagggacttacaccttgtatcttcatgcttcccttcagctttgtacgctacttaaggttcagagtgtggcgggtttcatgaactatctgcctaccaggttggctacccttcccttgctttcttggtcttgattttttctgctttagcccaccactgccttactgcagagtgtggtgcgtcctgccctagacccctgtgtggtgctgggcacttctggggcagtgcacttctagcctgttggtaaagcgtctttgccctctcagccgcagtaagcgtcctttcttattgctctttccttgagtccagtgctgtagccagactcattttcttggtttgctttatgggcttgttgctttctgggctctgtggctttgtttgccccattctgtctacttggaataacccatctcccatcttcccagatcttccaaggtcccttccatgatgccatccccagctgttccccacctccagccagaagcagtcgtgccttttctgtgcccatgtttctttatttgaagctatctttgggtgcagtttttcttctgtgttacagttatttatggacttatctctcttacttgggaggcggggttacatggtggaaggaatttggacacgtacctactgctgatgtgatctggggcaagaaccataagctcttacagcctcagtatcctcatctgtaaaatgaaaatatttaacgctatctcggagaagctgtgaggctcaccttgaatacataccaccatagctaacatgtcatggggttagatcctgtccacgttatgtccagcacactgcctggcacattattggtgccaagaagtatttgttgagtgaatgatgcagcctgggatgccgatgaacagggacactcctctctccggacaagtccctcctgtggtaggaactgtttatgtcctaaggactcactggaggggacagccaggagcccctggctcgtattgtatccctcttccaggcggtgtgacccagtgtgagttagccagtgtctctgctgtgaatcacacatcagcagcattggtggggctggtggaagcggctgcagaaaagaaagggttgcttgcatactcatgtcaggtgggcccggtgtccccagttcagacaagagtgtgactgtgcaactgccctgcggagctggcggttccctggggaagctgactttggttccacctgagatgctgcttccaggtcccctgatctcatatggctgctccagaggctttgggagttgggtcctcttttcctagtttttcctttccatgcctgtcttactgggcactgaaggctgattgtgtcaaatgatttgtccctctgctagtcacttgccaatgcccttggaaaggatgatttgatgattaggcaggtgcgatgagtcatagtagtgttttaattcacccttgcagatagctcacggcctatattctgatatttctattcttttttttctttctgttgtccggcatactcctcacctccgtgctgagaggtcttgaaaataaaatagcacaaagggcttagtgaggctagaccatttcctgaattgtttggccactgttaaacaggccctgggggcctctggagtgacctggacttgttggggagttggggtcagagggctgggctggtggcgctgggtcttcttacagattccagtagtggtttacatgttctgatgcctgaaaacagaactaggtgatgttttagaagagacattgaattagatgatgtgaggttttcctgctgctctattttgaaggttccatgaagaaagctgacagtgagaatgggtgtgccaggtctgtagagtagacccattttacagatgaccaagggttcaagcagcccacagcctggaagaacagtagttgctccagaaccctgggcgggggaggcgggggggaggcgagcattttttttcaaaaggcgcaggctgtggagaagtgagtccaggatctgggtaggggttgtggttgcccccctaaatgttgctgcccttgcactggcacattcctgctgttttcttctgctcagcagagccgaacggctctcacttcctggctagctctgtgtgctgccccaccccctcttggcgagcattgcctgtgtttgttattgtagtcctggctccaggccaggcctggctgcgagccagacttgtgggtacagtatgtacagtgagtgctgagccaagtttgtcatcatacaccattaattttttttttctaatctggttggggtggggtgaaggaggaggcaagaaaagagtttctccgatgcttgagaataggccgcattgaattccgcagagatgtcatttctgaaaggcagacggagctccggcttgttcttccttcgcagtttttcctcctttctctccctgtcgtcctcctctcctcttcatttccctatcacgcgaaatcagcctgcaggagatcgacaatgcaggtcttattttcagtgactagaatactaaatttacactgctaaatcagttttcattgtgttgaaattgacaatttgtttaattagaagtttgccctgtaggaggcccttctgagagacagtgccttccctttttctctctcccttactttctgttttaagggtttttaaaagagcctaaatggtagtagtgaatttcagtttaattgaagttttaatttcaattcgaatgtgtgaattaatcaagtgtttatgggctatacctgatgatcacaataagtttaaactaactatcaataaccaaactcattaactaatgagatgatctggccaggccctgcattctcagaggtggttttgggggtcagaagggtttgcgtgttggggaaagaggcttggggtgggaagagagatgacctccaaggctttgcaaagctagccctgatggagggtgaagcttgggtgtaggactgtggcccttccccttcctgtgtcccaggaagactctgaaacctccctcctcaccctctgctaccttaccccttttggggatctggcattgaagcatctgttgatccactgtctcttcgccactccttgtcgtaacacgagaagtgattcctagctctgaggtgtccatgcagagaccacagacacatgcagtgactcaaattggttctgagatgggccagtgtaaggtttcccattaggtagatttcccacagcttggcttaacgtcctggtggcttataagtgagcatgcctagaactgcttgtccctatttttgactcggctgcatacgattagggtttgagtattcatgtggcctgctcctattctgggagtgtcattcatttttggagccagaggatgtttaataagcacgaattgtgtgtcaggctctgtgcacttaacagtgaagactgctacaacatccctgccctcaaggagcttaagtctagagtgggagatgagtatgactatgcaatcatcatacaagatggtaatgtgtgcaaagtgctaagaaatctaggagaaattcagagtaggagagtgttttgtgccagagggtaacagaacagcattttgaaaggactcggtgaggggaagccgaagccacctatggaagtgggtggtgtaacctgcgagtgtaggctgggcctgcagggagagagcagagtgcagggtttagaagagatggacgagatacatctgtggaaggaatagcaaaatgatctgcattctccctgaagcactggagagccactgaaggactgagtaagagggtgacatatttttgtgtctggaatagaagggactgttgggcttttttttatgtagactaggctagaatataaggtgaataaagcctgttggagaacttgaagactggccgtctgtgttggggtgtggctggagtgttgagaggcctgtgccttctgtgctggttagggccctgtggccccattctgccaggtgggaggccccatccttccactcctctcttgcccttgtcaggcactgtaggccctggctgttgagaagcatccctgagatgaggctcttccccagagttagagccatggggaaagaatgaaggctttcgttgatagattttctgatttcagcagcagcatggagtggctggggcttatcacctgggacctgggtcatcctcctggcagggaaaagggctggaggagtccttcagattggatctcttaggctttcctctgtcgcggttggacggaagaagaaaagcattacaagatggcaaagatctgtggcttgtccttgttctgttttatttatttattcttttttggagcactgagctgtgggtttcagtttcttctcctcaaagacagagaagatgggggaagagaggtagctggaaaattccctgtgactgggaggagacagtgcgaggtggtccccacgctgatgatgggagaggtgcctttgagtccaaagatggcttcccctcatcttgtctctcctcccattcacctctctcctcccagattaggtatctgctcagagcaagagacttggggctgcccaggcttgtgagagcccatggccaatccatgcaccctctgcccactctccagtcaataccagctatcccttctggttagcttcctaccatcagggcaaacccgggagatgaccaggaagaaacttcgttcatgttccttgactccctccacattccttatgtgggggcgcctttggtttttgggtcaaggaagtggagaagatcagatgggggtggctcagaggccaggctgccctcccttcggtccgcatgggtgatgcggatgcagagagtggaaagggtgaagggagccactttcccccagctcgctcttgaacacacttctctttctctctctctccctactctgaatttggcttgcttcccgaactttttcccagagtggtgtcgtcactggcctgccggcaggtctggatgttctgccagcattccagagagtttatgatcgcttgcagatgcgcctccaagaacacactgtacccaaagcagaaattaatgcaggcttgactaccgtccaagcccgtacacgggagagaggaaaaggaaaacaaaaactgtttaatgctgtttataaattatacactggctgatgaaaaatacatttctttcctctccccttttactctccccccaacccgtcctcagtccccccccaaccccacccccaccccttctcgctttctgcctcaagagcctaaactgagaccagaagaatatggttttgctttttagctcctgttttggctgggatccgaaaccctgctgctgattcacagccagagtatttttcccctttacctgatgaaatatactgattttccagcccagatggggtgtttttggttttgttgtgtgggttgtttttgttttttttggtttttgttttttggccagggattttgtttacagcaagtatcaggttccatgatggtgctgggtgcgatgctggccccagggcagataaatcccccacgtaactgccaccttagtgctgcggttttgcgtgcctgggtcccccggtcctagtcaggccagctgaaccgagaaagttgggaaagttcattgcaggtcatggttttaaacagtgttttcaccagttctctcccaccccttcacctacagcccctgtgtgaagagggggttcacatgtccctgcccccaaatacacatgtctctgtctccatatggtgccttagcaggggttggggaagctcgttccatctacccctctggatcccagcatctcctcccaccccgcaaatcccccatcccaatttattctataaatttgtttccacattatgtctatccatttacatggcttttgtgttttttaatactgctaatgtttatcgtttgcccaacaggctcgacagattttgcttcctgtagagcatcgaggctttagagccccctcgttgctaagtagcagtctccctgtactgtaatgggctgattttgtattctgttcagcgctgtatcttatttttgtatgcaagacaaagtgttttgatggaggacgattgcggcagtgtctggaggctgtttggagttttatgggctgtacagtacactgtgtgctctctgaacagaacacaggctgttgaattttggattggatttgtcatttttcccccctcagagaggagcctgtcagatagaacattactttgagggtggagggaagaaagtggaaattatgtaataaccttcttccttctccctctctcgatgatttttctatctcagcatagggtggtttcttccacacaaaccctgtctcatgccaccacatgattttgcacagctagaggatgacggtcttattaggaaatgaatggtgccctagagggatggatgctgggacatctgtctgtctgccatttattctcctagtctccctttcctctcctttgctcctgccatccttcctacgttctgggttgccttgctggtccttgttattgtctgaggatgaatagatatggggttattggggagggatatttacgtgggatcaacctgataatggcaatgccatttctgatttccagggccttttcgtcttcccttggcttcgcagacacacaccctgccggaagcgttcttaggaggcctggccgtgctttctcttgccctcagccccattccctagccctctaaccaggctgggcctgggtatctgtatccagggctgtgcctgaggggccccaccctgctttgggcatccatcacgctactgcggcccttactttcagtgctcttgtccaggtctctgtggtggcaggtatttatttttcagctcttctcttctccttctatttctccccaatctgctttcatctcacttcatctctttgtccctgtcctttgtgtctgtgtcagcctcggccttttcttgacactcctgtgtattttctgtcttccttcttatgtcttcatctgtctttgtctccatctgtcttcgttggtcttttctctgtctctctctttctctgtctttgtctctgtctctgtctctccctgcctccctgcctccctgtcctaacccaccacctcaaagttttttttagcttggaagctgggcagtggttggaatggaaaacaaaatgtcactctggcccagaggtctccccagaggggaggactcttgagccagtgtccctagaatgctcccagcacctagaatctcatgtgctcttgtcccttgcctctcaggggccagagtggggcttctctggcttggcccctgcttttcccaggtccctggatgttccccccaaatcccagttgtgttgagaatgggcaagtagtttagcagggttaggctttacaaggcccttattggactttgctggtactgtgctctcctgggccagtactgtgcacctgagtgcaggactcagcagctgccctcacatactcatgccctagcaaagtgcctggtacataggagtgttgtgcactgatagtatctgtcaaataaatgaatatcctgttataaaagtgtttgtactactagggcagatctgggtttggtggggcctgaagcgtactcagttttgggtgctgtctctcagaaaaggattataaataccaggtgttagagcctctcccaggaaaggggtcagtgccagggagaggcctgaagcttcagctttactggcttccgggagaacaggcctgggtgaaccacttgagaggttgctgttgaggggtctcacttggaactacttagtggggtggctcagggctgaggataggagggtgtcatctgcccagctctggggaccttcagaacctgggacatctgtgctcacaggcctcaggtttatgttccatagaggtcaagcctttggcaaatggctgcaggtcgcaatgggcctggaaacatcatggtatttcacatgctcttctcagtgaggttgcttggtagggatggaccctgagttccagctcacccagagcaaccaggtaggcagccactcttggtagcatcctggcctccacactaaccctcggtgactgtcagtgaaatggcatggcattcactcctctcccaggtgttcaactgcctaggtctgtggctgtggctctcctgcgttcttggggcatagaactgcaagtatcgtggggcagaggactggtctacgtgtgtgtgtgtgtgtgtgtgtgtgtgtgtgtgtgtgtgtgtgtgtaaccatgagggagagggggcctggaggtgatggaaggtgtttgcagacatctgggcatctgttctgtggagcttgcagactcatccattaaatgaggttggtgaagattgcaggattggacagtcctttgggtagagggactcacttgttggagggtatggaaaagctgcagtgtctcctagaaatcggggacacagtcctaatcagaacaccatgtgtgcatgtgtgtgtttgtgtgtccaagcatgggaacaaaaagagattgagaagaagcatttacatgaaatactcaaatttgttcctttgctgtaatgggcccgcacagaccattaccttgaagatttaaaaactaaatgagctcatcatatcgagtgacttctaccgacattcatgcttgattgcaaagcctgctttacctttgaatttcaacttcattgtttgttattaattctcagatggtggtggtgtgtttctaccttttggattcagccatgaaaatgttgattttgtgtgatggatgtgaacatttctcaacaagaccccactgaagaaccttttcattttaaaaatagccccatgacctttggggctcagactggagtttccgaggaatccagtgggctgaggcaaggcttgggttgactttggagggggcagaagtttgcatttttttgtctaataatttgagtttcatatgaatgattctgtgctccgtgcaatactatgcattttcataactgtctctttcactttgggtaaaggaagggagggaaaaaataacagcagcagcattctgtgggcaaaggaagaaaacaagagaatggggcagagaacaggctaaatttaaaattgtaattggctgacttccactggcttgcgggtgttttaatgactcataataacttcatttaaaaccagctgagcagaaaatagattggagaggagcctcgggccattatggatttgtggttttttttttttttggtttttttttttttttttttttgacaagcttggttttcagcagccaggaaggctctcagagagggcttggctgtgttttctctctctctctctctctctgagggttggtggtctgcccaggagagattgtatagaaaccagggcgagtttttttgtttttttttttttttaaattctccctctaccccttgctttttttttttttaactgattaaaaatagatgccttgaggtattattttagcatcagtaggatttttttcacctttgatgtggtaaatggaacataaataaaattgtttttgaaattactgaattaattaggtagtaaagcaaccacaatgcataaatgtccttggccgtctggtttttctccctaaccctgatctatatttgtagggcgttcccttttctccccagccccctcctgctctcccagcgacccctccttcctctgagcctgcaccttccctttgaatggcaagattcttttatcatcccggcaacagctaaatgattttttaaaatccataggattttgacagtattggttctatctggttatctgatcagctccaggagttttgggacttgccagaaaaggctctaacctggctctagttgttttaaataggtcctgcctgtttcccatgctaggcctggtgcccgaccggcgagcgttcctttttctcttctcttttgaaaagtcagccgactcagccctaggatgtgtctgtctgggcaggacaagaggccgccctccatctgatcgctcttagccatttatctatcccctcttatggcacctgtcaccttctttgttacatagctatttatttgcttggccttttttgcctactagactgtaagcttcttgagaacatgtgatttatttgtgtcccctatactacctcgcttagtaacctgaatggtggttataactcagtcatttgaaaaataacctaatgggtgagtgagcaggcatgcggatgggcacatggtaaggaacagacctgaggtgctgcctgcttccctccagccccaggagtcagcaatctggatgagaagacaaggatggaaggcggggaccttgtcagtagtgtgctctgttgcatcctcacagcgggacacatagcaggctctcaggaaatatctgttgaagaagtgaagggctcaggatgcatggtttggctgcaggaaggagagaaagacatttattgaaacttgctgtgttccaggcacagtgctatgtgttctgcatatctgaactcagtctttcttcaactttggaagacagatatgctgattccgttttgcagatgaggacagtaaagagttaacttgcctaagatcataaagctagaaagtagcagagctggacttcaatctccctctctttctctctccttccaccctgtgtcttgcttttctattatagtatagcatgctgctatacctagccctggcctcgtgctgtttgagtgcctaaatgcctgcttctctgtttgtagagctaaccaatctcaaactggggagctgagaccaggaaggccctgtgcccaagggtcctgggggtggggagggtggcatagtaattggctgctgcctgtgtgccttgcacctgtgccaccaggagcaggtgtggcttattagcctcttcctgctctgccagaggagcatgtgttcagtggttgtgagttgtggctatgacttctgctcagtgccttgtagggttggggataggagggttctgggagccttgcaggagggtctgtgggttagtgtgtggccctcccacccagggagagcttgactgtgtcatgccccccactcctcctttgcactatcctgccaagtaggaggggtaggaggagagagctgcctgtggtccctcctgcatggcgacgcaactgggtgctctgcttctggtagatgcaccctgtgatgctggggtggggtgaaaggggcagccgacctgtgctgcagcccagaaatgtgagagctgtgaccacttgggctattactagcgccttagacttcaagcgtcttggagtatgatgcatcaggaaggttgggcctccctgacctttcagattatgtccagtgaagctggaccacttgacatgaggctggttgtgtccattctctgacagcctcatcttccccaggcacgcgctggggatgctggagctttctctggggagcgaaacatcagccaaatgggaaccagatggtgaaggttgagcagcagagaaacctcgatgactactctgggtcacacgtgtggccctcttttgcaggaaatcgtttgtgaagtcattcatcagttagcaactgaacctagggccagtggtgtgcaaagcttggcagggtggacagaggggttgaagccagtgtccttgtctgcaagaagctggtggtctggctgagagggtgacacgagccccctggcaagagaaggcgttgagcaaggctgggtgtgctcattgtgaccgcaagaggaaagactgagtgctgcaggcatttagagtggggagaagctcctaagaaccaggggaatgaggagagcttcgggaaggaggttcatgggattttgatgaggtctttgctgctggagtatccagaaggagtgctgtggtgggagtggcctacctttctggacaagaggaagcaagaacttctgtgagctagaaccatccaggcaggcatctctttcctcctcatcctcctccgcccatagccacctggcagagacttagagcccagtttcttgcacttgggagtcctccaatccctgtgatggctgtgggcctccttggcctggaggttgagaaacactgcattaaagatgaaaagctgccacttcagggggcccctccaagttgaggcatccataaaacaaacacatgtgaaagcaaggcttaaaattggatgcggacccagaagattgtaaatttctcatataggatttgatggactaaaaaatatgttacgagtacctagaaccccacaaagcctaggttgagaagacaggtcagagggctgcctctgggtgaggctgaggacagagttggccaccctggagggccaatggaggaagcatccgaggacggtctcaggacgtgccccagcccacctcctcggaccacgtgggtgaagcccctgtgtatgcctttagtgaagactgagcttgttcaccgcgtagatggaagccagtgggagagaggggcggatacctctgtagtcaggggctccttttgttggctctctccaggattcaacctgacaaagacatgtcttccagacttttccccagtagttaacgcactccctcctccttcccccaaaccagtcccgttttgattggaattctttcacttgcctgggacaaggggaaaaaaaaaaaagcaaattctaaagttttcattaggtagttgggataaaaagtcttctggggtagttggattaaacttcagcagctctcttactgactattataagctaattgagcacagggagctcattggcggctgcatttttgttggagtaattatgaaagaccacagtcattttcagtaacaaggtaactccgggtaaagacagaactctctgaaactttggatttgctggagtcttccttcctcagttgcctttgctaatatgagcccgggataaaggcccagagaccagatattttgggaggctactatcttgcctgaatatcccggatctcccagtgccttcattggggcctaatggacataatccagcacatctgagagagcactgctggggggccagttttgcattaattgagatttggggtctggagtcagaagctctggagtataggctcgagagggacaggtgcagcctttgaagctgacccgggagcaaagagaatcacagtgcactgtcttcattacttatttatgcaccaagagcagggtctgattatagataatgaggccgaatgatactctctgtctctaatgaggtcctgtctgtcctgtccgagcaaagcgtggaccagcgtatgtaggactgtgatgacaaccctggggatcttttctagcccataggattcttgatggggaaacattcctagacatacagtcctcccactgaactccacccccatccagaatctctatcaggagctaggagccggctcagtgggctgggaagggcctttcagtgccctttggacggggccctggggccttgccaagctgaacgtgtcctctgggtggcctgcctcacctctggcctgctgcccatcagcattgaatcatgcccctcagaggacagcatgtaactgtgcttcccgatatagcccccggccccccaaggtgacaggaagagtcattgtcacgggagtactccatctttctgacaccacaaggccggcgtggctttcttccctactgctcagccctgcacagcctagaattctgctttgggagcatacatagagttcacagagctatttttttttcctactctccgtctcccactttagttttcagaactttatctcagtctctggcacggactatctgcttccttcctccatctcaacattataaaagtttgtcacagtcagaggctggctgaatcgaagcagaaatgtggtgtttggttaaattgtaaaattagctaggaaagttaatgaggcgttccgcctctgcctgctgaagagcaggacgtttatgaaggtgcttcaaagcaccctgcctgagaaggaaggaaagggagacaggagcagcaggggaagctgcccaggagtgtagaagagcctggtccaggtgagtttccaggccttggacgtgcctttcactcgcttagctgaatggaacctgagaaatcatcccctcaatcctcctgctgtgggtccagctccatctacccactccgagtccataggagttccctactacatgtccaagaatgtcctgcgaccgcacacagctggccatggttagccattctagtgcccagatttcctttttgtcctgggcaaggcagaagagacaaaaactgaacactttgccttagaaggagcccatggtagaaaggaggaaaccagagataatgacagtggcagctgacatttcctggaggcctacaggtgccaggtactgtgccagattgctttacttcgtcatctcatttgagcctcacaagacccatttcaagttggtactgttaggacatccattttacagatgaggagactgagtttacttgcccaagatcacctagcaagtaagagacagagctgcgctgtgaccccagggctgcctgaccctgaagcccctggtcttaacctctgcggcaaagttgtttccatcccctttccaggctgcccatttctcccagcccacagctcacgtggtacagattgcacgtttgcagatgctcaccctgaagctttggaagtcacggtctcaaaggtgcacgtggaagagctgccaacagtctatttcctgcacacaccaaactcgcaggtcttctaattacaccaaacaaacctttctgttttcaagcagctatgggcttaatatggcaaatagtttcccacctggacctctggcatgggaggagccagaaaagacgagttttgttttgttttggtttgtttttttccggcagggaggtggttcgtacttagaataggcattaagtgtggcaggcaatatttctgttttgaaaagtgtggcatcttaaggctgctgaattttgagcctgcaaatgtcagtgccgtagttgtaatgtaacacctcaattatggtgcagggggtaaggaagccagactctgaaacctgcaaggctctttagatccacagcctgagccacaattaaggtttcagaaacaccaaaggcaagccaatgagtgtcatttttaaccagtttgaacattttactacttcctaacatcagaagcacccgggctagagagcccgcttcttgtcctcaataaagtgattaagctgaatgggtgttggggagtattattaggctgagaagggctaaaaatagacatgctctgttttctaaaagccacagcaggcctggagagactggcagcatcgaggtgccactgaggggcccaggggaggggaagggagggtggcagtctctggagctccgtgtctgagatggggatggtgggtgttgtgacgggtgggtcaggtggtggggcctctttcccagctgtcaccaagagtggaatcacagtggaagcacatccgtacccgtatatgtgtattaatgactttaaaggaactgacaactctggagtctctaggagggatgcctaggcctaaaatttacgtactcagccccaagataattgaatttacctgctgttctgggagaaggagtccaatctgggcagtgagtaaagggcagactataaggggcacaagaagagggacatggggaagagcagaggcctttacagccgagagtgaggatctgctcgacaagccttgattaactaggatgctcagagaagatgtaatcaaaggactttttggtgaactgaaggttaaccaggaaaccttgtctatatcggcctttgtcgtttgctatcattcatcaatgtgagagtccatttttctactttcagtgaatgcaactgattgtctttttatgatagaacatcttgcttgcttagaagtcaaaaggagaatgcctaagaagggagttaagcatggaggtatatgcctagagttttattataagtcactctagaagatcgtttgtacgttttccttcctacatgttttcatacctttgaactcattcctctctataatagctttaagtgctgggaggggcaaggaacatgacttccactttgtagatggagaaacaggccaagaaaagtaggatcttagaatacactgaggtctacgcagaggcaagtctagaccctgtgctgctcccagcccaggctctgtcggatagacagtgttgtttcgtgcctggaccaggaggtgagagtttttcttaataggcaaaggactcagagaagagagttaggtgggcttcccatgctgccattctgactgaggttttttttttttttcttttatgtttactagctatgagaccttgggcaagagaactaagctttttaaacttcagtttgcatatctaaggccaggcatggtgtctcctgcctgtaatcccagtactctgggaagccaaggtgggcggatcacctgagatcagaagttcgagaccagcctgcctaacatggtgaaactccatctctgctaaaaatacaacaattagccgggcgtggtggcatgagcctcctagcatctctctccaatgccacttgcaactgtctttgtagtgtgtatgtgtgtattttgtttctaagataaaacatctctaggtaatatttcaacaaatgaaagaaataaagccttttagaaggctcctgatgctgtcacaaatgtgataatcattgcactcttcaagaaaccaattggcagagctctgtatgcaagttatctgctgacaattggctgtaagctgtacaagccctgtagatgagagcttctcttttcctggaaactccaccaggaagccgtgccatagaccccaaagacatccaggtcaagctgcagggaagaggcagggttcagtaggcatagaaggctgtctaagctgggcccgtgctcccatcacaggcagtttagtggagaacctgggctggatgttgacagaactgagatgttagctcagctacccactagctaaatcaggagcgttagcagcttaactctctgagccttggtttcttcacctgttaaagagatgatgatacatccttcctatcctaaaagcaggacttcaaagttgcacaacagcagtgacaccactcactcagaaatgggactgtaaggttgttgaaggtttaaacaagatgatgcacatgaaggtgcccagcacagaaagtggagctcaacaggcacacaacaccaatactttcactccttcccttccaaggaacctacaaaggctgccctgcaataaggagtcacaatgctgctgctgccatagtgttgacagtcatcacaataaaaatactaataacatgtgttgcccattcattatgatgcaagcattgtgctaactactttacatgcaatataccagttaattctcccaacaactctaagattaccccccattttatacatgtgcaaactttttttttttttggagacagagtctctttctgttgcccaggctggagtgcagtggcgtgatttcagctcaacgcaacctcctctcccgggttcaaatgattctcctgcctcagcctcccgagtagctgggagaggacaggggattctgagacccaagcaatgaaggaattatcaatattgagatgccaaagagatctcagcattgtgagaggactcggcattctcttcagtcagtgggaaatgagagaggcagggaccagcctggagaaagtgagggaagccaagaatgccatcgagactgaggaatgctgcctcctattccctttaaaatacctccaatgaggtatgtcatttggcaggagtgtcaggagatgctgggggaccggggcagggccaggttatcagcttgaaatgggtggagtaggcacttggatcccggccaccacccttggaggggtcttagtcttcttttttccattgcccagccagtattgtgaatcctactcaggggagaggggtgtgtgtgtgtgtgtgtgtgtgcgtgcgtgtgtgtgtgtgtgtgtatgtgtgaaatcctccatgccatatttagggtgggggcctgtgacggagcattctgaagttgcttcagaagaaaggagcagaatagatgaggatgagaggagaccgaaggctcagatcacaggctgagctttgggactgctgggggccaacagaaacttctcttttcattctgaacttctctcctgagaatccccaaggggagacctgggaggagggtgattgttggtgtttaggagttgcggagatgtcccataaaatcatggcagaaacccttactcttatatccctggctttattatccagcctctcacaaatgccaaggttgcaaagctatctatctctcttaaacaaaacaaagttatgaacacttgaaagcccaggtattccctggaactcgggtcagtctttggcacagccgcactgacccagcctgactctggctaatgattctcccaatgtctggactctctgttccattctacctgcctgatagagcagaatattcaccttgagaaggattctgctggctgaaccggggaacccagccctcgcttggtctcaacagcaccttccaaacaccaagggttgtatgcatttgagctctcgtgtacggccacgtttaactttctttgccatgagcgcccagcttctcatgaacacctgttcatcctttctcccttagagatgtcccagtttaaaacttgtcatttcaagatggagagataaagggattcaccaagggttacacagctcaggcagtgacagtcaggaccgcaagtcagtttcttttggtactttggaaaatcttgggtgcgctggccagcagaaccctccttgagccagttatctaccctgtcttacctaagggtggtcctgtctcccattccagatagcataatatcatgtatacgagagccttagagaacatagtgtctcatttatgcaggccatttacttattgcgattgggcttctcccagagctgtgggactggaaatactatgggctgcataccctgtaggctgtggccaggagctgtcctcctggagctcatcagcttgatgaagtgaaattattctataatcatgataatgactgtgacttgagcacctgctatgtgccaggtacttcatatagtttcttgtttaagctatcatatgaggatgaatagctacattttcaggagggaagtgaggctgcgaagttgatgctggtaccgtaccggtagaaccttaaagccgtctctggatttgagctgttgctgttgccaggctggagtgcagtggtgcgatctcggctcaccacaacctctgcctccggggttctagcgattctcctgccccaggctcccgagtagctgggattacaggcatgtgccaccatgcccggctaattttgtatttttagtagagatggggcttcttcatgttggtcaggctggtctccaactccagacctcaggtgatccgcccgcctcggcctgccaaagtgctgggtaattacaggcatgagccaccgcacccggcccgggacttcattttgagggggcctgaccgttaacctccgagagatctctcagttggcaaagcatgtctggaaggaagtctggttcatcacagcagggactgacattcctgtagtaagagagattttgtgcccttgtgctgactaccacaataccatgattgctcagtcatagaagttgccaggagaagaaagagattagaagcaatggtaaggtgaacccctgagtcactactcttagacttcaggaatatttgtaattttttttggagacagagtatcactccgtcacccaggctggggttacaggcacaagctattgcacctggcctgtatttttaaaaaatctgcaacaaatttactatcctacttgcattttatttaaaataattcactcatgtatttttaaaaacataaatcatctcaaactggtttgcattccctggttcccttctgggtaggcagtaggagggtaataataccattaaacattggccatgagtgatgatgggagcagacggtaggggtgtcatttccttgatctcctcctggggaagaatgatctgaccccatctttactggtgtgttttggctggagaggtaagaatattttaaattgcgtgatatatctcttgcatgcatttgatgtttgtgtgtgtcttataccttgctattattttatctcctgatgacaatgatgatgttggtcttaatgacaactagcatttattgggctattattgtatgccagacagggtattaaacactttacatatattatttaaattaatcatccctcaaccaaccctgtggcataaacactctgagcccagttttctaggtaagaaacaggcccagaagagataattcacttcttcagggtggtagctagacatggtagaactgggacttgaaccagagtttgtttgattccagagagcgtgctcttcactaccttactgtgcagcttaatattgagtgcatgtgtgtgttctggctgtggacagtgtttctaagcctgttggattacccgctggtgctaaaaggggtaacaaaagagctttccaagccactctggctgagaattgagttgcagggataagggacaaggtagacctgtgtgctccctgtgggacttgagagagggactgcaggatcccagtaagagacaagggcaccatgcagcttcctagtagcatcacatttattaggtaggataagaaatgttccctcagccatagagatgtctcagcatttcctcctgacccagtccagggtttcctcttctgcagagtggatatttagccacacatgaggtgtcagtcatttgccaggtcactggtgggacactggcttttggagatctaaaaaccacctgtcctccatcccaggtgactcccgttgttctgttgctcagcccaggagaattccctggtgtctttctccatcctatatttatgtggggtcctgtatcattagttcattcaccctcccatcttgtagtgagtgaggccgaactctgaggatctttccccacagccttgtcaaccacagctacccttgaaccatatcctggacctatcaatggggctggttgttttcctttcagccaggatttgctcacctgctttcccttttccctcttccctgaatctgtgtatcttccagaaactctggttctggatcagctttttgttttgttgacaaaggagaaagagcaagagagagagctagagagagagagagagagagccttcaagctcctctctgggagtacacatctccttgagggaaagaacacacagtgccggcctttggaattggcagccagtgtgctgttctccgtctgataagaggtactgtaaataaaactgtacaccatggcctgttgtaaaatgccctgcgtctgtactcattgttctgacagcttatgctttttttgggtctgctgttttggtacactctgtacttccttatgtaagcaggcgtgcagatctcatcagaacattcaagatgtttattttaaaatctcaaggaattttgaaaaaaaggacacaccactcaacattagatgctggcaaacattaggtgttttttcagtggttcttttttttctcccttcttattattagcatgggggtgggagaggctttggagagggagggatttgaattttttttttcttccctcattggcttctgccttatttccttcagagagacaccaccccatatctgattgcattcagtgtcttctgcttccttcctggatgccgggaccccctcagcctcatttctggttagggcaggtagggagggaggttctttgacaagggggagagggcagctgcagggagcttgtcatggcttccactggatttcagctttattgtcattgggatcctgggcatttagagaaagctttatgtttttgaaagtgccctgctggctgttccctcctttgattcctgtgagttggggtgatccttggcacagagggagagctgctcccacacacggaggcctcagtcccgcctctggcatgtgcgtcctgtctttccaccgaactttaactggctttgaaccttcctccttcctttatccccaaccttctggaggtgtcgggaagtcagggaaaaaggggagaagagtaggagtctggagaacccaaaatggtcagggagctccctacagggtggtgcttagaacatcccgaagccctcatctgcagggtacctgggagactggtaggggcaaggatgtccgcctgtctctttcacaactgggtacctggaatctcagataaactcagtgcctggggtagggagtagtcactcggcagatcactgcctggggggcaggaggctcactgactgtagcggagggaagggttgtttgttggctgccacagtgagcattggactgggttgggagcagacatgctgatgagagggagatctcacaccagaagaagcagacagccccacttcctaacctttcctcccttttcctctcaactacctgagacctagccagagaccatgtccttgagttttaaatagggggtagtagagaacggagtgtgcagaataaggactctgccaccccctaggggacagacagcttggcagtgccctgagtggccattgcgcccttcccaggtgagttctgcacccaggaacctgcctgggactttctttgtttaacaagcatttagtgggcacagactgtatgccaggcatggcgcagggtatcagggatatggtaaagcccaagacaggtgggaacctgctctcacagagcttacagtccactgggaagatggaagagagctccaaatacaggacagttgaatggggctccaggggcttgtccagagaagatttcagagccaggttggtgaatagctgctgatactgacatattggttcgatggcagatttttctgctcccctcaacaaaacaatcactcatctttaaattagaggaacaaggtggggtgtgcatgtgtgcgttcatgtatgtgcacgtgtggtactgtgtgtctttatgaatgtgagactcactttacacaagataaatggcccccaaataactgtacatccaattccagtaaaatcagtcatactttaattgcatgaagggagctctttctttaaaggaaaagtgactggagaagatggtagctgcgacttactggttctgtatatctacccaccagctgtaggatggagcactttccccaccttgtcgcaactctccaagggacctccccttactgcttccattttacagctgaggcaacaggctccctgagactggcagcttgctgagggtcacagctggcgactagcttgcctgggatttgacctctgatctgtctgacccaaatgttgagttcttaaccacactgcactgcctcctgaggtataaatggcaccaaggacctctgctatccacagaatgttttgtgattgacaaggagttttgtattcacttatgtctattatcctgtttgctcctcacagcagcctcagggaggcagacagataggcttatgcccattttacagattgggaaatcagttcatcaaggtgtgatgactagtgtgatgcccacagctgtgagtggccaagttaggcgtgggatctcgtgcctgcacctctagatcctgctatttttctcggtttgcttggatctgtgattgctgtggttagcaagggtctagcgcactttatcttctgctattctccctctgctatttaatttctttcccgcaatctatcccttaacttcccccagccccgcatctcccacctccatgtcactccatcccgtgcagctggcctccttgctcctcttgccttgcctggcgagggtgttctcacgtggtggccttgctctatgcagatgtcagtgcatcagcaagggcctccctgactacgctgtgtaaaagaacagcccctggcactctctgtttatctttactcaatgctttgttgttgttattgttgttgttttgagacagggtttcactcctgtttcccaggctggagtgcaatggtgtgatctcagctcactgcaacctctgccttccgggctcaagctattctcctgcctcagcttcctgagtagctgggattttaaatcagccaccatgcctggccaatttttgtatttttagtagagatggggtttcaccatgttggccagcttagtcttgaactcctgagctcaagtgatctacccatcccggcctcccaaagtgctgggattacaggcgtgagccattgtgtccggccctcttcatttaatttatttctctttttatcacttatcaccacctggcctgttttgtatttactcgctctttaaaaatctgccctcccatcttgaacataaactccctgagggcagggatttcgtctcttttgtttatttcctgtaatccacctctcggcatatagctactggacattcaaaaaccagcccccgtgtgtaggaaggatatggcaagtcatggccatcccagagctgtgtccctggagttctccctactccaggttgagccccaggaaattttgtgggtgtaaatgctgctgctaggtccatgcgcacccgctgtgttcagctggcgtgaccttcttccctcccacttcgccccctcccattgatgctttataaatgtattagtggctgcatgatgtcaccgtaatgcattttgggaatagccatgtggtttatacacacttgagttgctttgaatgcaaacctgacatcatactgaaggcagcagtgaacaacatatgcacagtaaacaggcagagactgtcttattgattaacagatgaggcctctattatcgatcaaagcttggcgaggaaatttatcacttttaatttcagggctgccaaatatttctgcctctgagccagccattacagagaccatttaaaggcacaagcctcctcaggagagaggattttgtctgtctcgctcggctccgctcacgtgtccatggaactgcctgtctttgctctcaccctggagagctgggggggaagtcagagcctgtccgggtgggcgtgggagtactggggcttcgtgagtgggggctagcaatgggagctgacgtttgtgttatccacgtgtaaggagggacctggcccagagtcactgaggacaggggctttcacatgctcagctcagtgtcgtgacttcagcgaggtgggggtggagtggcgggactttgaaggcaagcagatgtggtcaggcttgggccgaggcagccgcctttactgatcatgtgtgcttatctgtcttcatcttcctctgcacttgtctgatggtacacatccggccctttatttcctacctggcctccttcctttctctctgcttctcagtcattaaagcgagaagctcctctagcccacagtgatggctgttttctaagaaccctccgcgccacatcccttggaagcctgtggcatggtgggcttctcgccgattggagtgccctccccttcccagctggtgcttccctcctcgggcctttgcttcccctttctcctttagggagctgtgagagcggatagaacccaaggaagaaatacaattaaaatcagattccttacagatccacagaaaatcattgatggctgatgatttgggactgggggcagtttctaattgtgagggagctgtgacttcatccagccgcagctttcccatccaggcccactctgctcttggaggtgctttctgcatttccagtgtaaatggatgaaaggtagtcttggctgctacccctgtgaacacatgtcatgactgctttgctgtcactgggggctagaagttttcttggctctttcttcaaagctctcttaagccgtgtaccaggtgcttggcctgaggatgccctgtggcgtgaagggacacccagaggtcaccatgggattctccctgcctccaggtgaaattcaaccccagccacctaaggcaaatgacaatatttatttttaaagctcttcagtaaaagtgagttcatatcttccatggggtactttatcacccacttatccagccagtcgactcacatttattgagcacctactagagtatatcctgctcatcagtagaagataggtgtcagtgagatagagaaagtcgatacccccagaggaccccacattctagacctcctctagggtcctcatattcttcactgcaagaagcattcattggtattgaagtctgtgctggaacagcttgtatttggagttacattccttcagtatgtgctgattctccaaggcagaggttttcaaatttctagaaaagtagtggagtcatttttccaaccccaaagccctgatgtgtaaaataggtaaattgaattttcattcagagatgggagctcagaccccacccatggagtcttatccacaaaacatctttgcagatggaaccccagggaggccgaagggtacggggattactctgaaatcaggctctgaaatcaggctgcctgtgtttgaattcacctttactatgtcaaccactgtgtggcattgggcaaagtgcttaacctctctgagcttgaatttactcatctgctacctggaggtaatgctagcatgtactataaatggtggttgttgggacaaaccatacatactaagcatttagtgtcatgcctggcatatagtcaagcctcaggaaatctgaggtgatttgaaacagcactgtgggctacaaatttgtgtaacaagtagttctggctcgtacgaggctccaatacaaaactaaaacacaggcatatttaaagaagagctaagatgaccagacacagtggctcacacctggaatcccccagcactttgggagaccaaggtgggaggatcgcttgagcccaggagctcaagaccaacctgggaaacacagtgagacctcatctctttaaaataaataaataaataaaataaaataaaataaacaaaaaaacagaattagtcaggcatggtggcgtgcacctgttgtcccagctactcaggaggctgaggtgggaggatcgcttgaaactaggaggttgaggctgccattaagctatgactgcaccactgtactccagccttggtgacagacagagaccctatctcaaaaacaatgacaacaacaacaaagcgctaagacgtgttgaaaggaacagagtgcagtggcagattggaaaggacagaagagtaagggacttgagtgcttgatgtccacaaactgtggccttgaaaatgaagtgggattcgaacagatggaagaatgggactgagcattgctcaggcacagagactctgggaaggtaagtggtgcccagagagggccggtgaggacagcttacctatggaggtgggtggctaactgggacaggttatggaaggccttgaagccaagtagaggaatttagaatcagtacacattgggaggcgttgtatcttcttgagtaagaacgtgtgaggaatcaggtggctgtagaggaacctgcatctgttgagtagattgcgggtggctggtggtgtggaaaccaccttgcgtcttacagtgttctgagtgtgacgcagcaagggcctgaatggggtggtgattgcagtggaatcactgcacccaacgcagtggaagaatgcatctaccagacatcttgaaggaaaaatgccaagacttgtgacagctgacccctggatcagataatatagtagagccatgaagactattagccagtgataaaaagtactgtttcatcttgacatggtggcattatcactttaagccttctaaataacagttctgagaaagtttattaaattgagttgcactgaattaattttatttattccacaaatatgtatagtaataggtttccagtgtgtgtcaggcagatgcagctgtgcacaagacgacacagtccctcctccagggagcttacggtgtggtgagagagaaagacagggccataggcatttaaaatggagcacataaagggccgagagctggaacatatcaggtgctatgggagcataaaggagcattgcctcacctacagttgggggcccgggtattgaagttgatgtatgaatgacgaacaggagctccaactgcaccatagcagccagagaagcatgggagaatgtcagaggcagaggacatgcagaagaatatgcacaggcctagcaatgggaagaacacggttcctccaggcagcccgcgtggttcagtgtagctggagaaaagagagcaagagtgaggtgtgagagacgaagcaggaaagaggagcacacccagaaatgctttgtgagtcacagtaaggagtttggaccttgttctccaggcacaggggagccattcaggggttttaaatggtcagatgcaggtggcagttgggggacagacgatgagtttagttttggacacactgagtcagaggtccccatggacatccaggttgaggtatgtcagcaattcttacattcccataaagtacagtttaggcaacagggcacatttccctgtgttggtatcatttttctcctgtcccccccatcacctggagctaggtcttcagatcctccttcttcttgaggtatctaacttggaacccatttccgtttatcttggttgttctgattttgtttctccttctctctagaagagccctagacaagggcattcagaattcagttgggtgaatgctcacctcttggaggagggtctgagccatggatgatccctcactcaggatttttgcgggtgtccagtccccttccctagtgtctacctgcacagttgtggcccaggacctccccgctcaccagtggactattgctctagtggtaactgcctctcctttctttcagcgggtgccaaagcctttgtctgtgatcagtgcggtgcacagttttcgaaggaggatgccctggagacacacaggcagacccatactggtgagttgacttggattcctgttctccaggttttccacagtgttggtagcacatggacatgaactgtctgggtggcaacctctttttagcaaatgtgacatccagtaatttcctgggcgagctgtgagtaggatgggcttctgccacgttcagctactcttgtctgtgtggctggcccagcagaagtttacaagtatgacatggccccatgagaatggctgtcctagattaggccaagatctgtctctaaccagccactgagagctcatgttcttggaggtatctagtatgctcttgttgaggccttagtctgtgttgttatcaaaacatcttcttcccttggtcaggaaatctctcacacccatctgatgaaactgaaaccctcgtgtggccacagttggctggtcctccctctgcgagagctgagacattgtctaaaatcagcgtgtacgcaggatgcatttgaacaatattaactcacgatgatagagctttatttgatttcaaagggattgatttcaccgcaccaaagtcatctgatcattgtgatcagagtcgttgtcatcacatcatcacagcagctcacacttaacactcacagtgaggcaggcactgttctcagtgctttatgtcaggggtccccaaccctgggatcatggactggtgtctgtggtggtctgttaggaaccaggctgcatggcaagaggcaagcggtgggcaggcaagtgaaacttcatctgtatttactgctgttcctcattgctcgtattaccacctgagctcctcctcatgtcagagcagcagcagcagcagcagcattagattctcataggagcacaaatcctattgtgaactgtgcatgcaagggatcaaggttgcatgctccttatgagaatctaatgcctgatgatctgtcactgtctcttgtcaaccccagatgggaccatctagttgcaggaaaacaagctcagggctcccactaattctacattatgtgagttgtataattagttcattatatattataatgtaataatagaaataaagtacacaataaatgtaatgtgcttaaatcatcccaggaccaccctcctgtactccgctgtatgtgaaaaggttgtcttccataaaactggtccctggtgcctaaaaggttggggaccactgctttacgtgatcccatctggccaatctctcagtaaccctgtaaggtaaggttggaagctactcttatgtcatagatgaggaaactgaggctgaaaggagggaaagtgacttgctggagttggtagtggggacaggcgtggtagagtcttatagttcagagctgagactgcatgggtttaatcctgactctgccacttcctatttgtggggccatggataaattatttaaactctcttaatttagatttctcatctgttagaaaagtggagtaatattagtgtctacctcatagcattagggttgttgtggggatgaaataaggtattttatttgaagtatttcatggagtgtttggctcatagtaagcactcaataaatagtagtaggtatatttaatgtaatagatatttattgagtttctacaaggtgctggcactgtttaggcatttaagatgtagtaatgcatgagacagacgacattgctgcctctcatggaactgagcttctagctgggagacagaatcagcaaataaatatacgatatcatgtctgcttatacatattaagtgctactggaaaaggataaggagtagagaataatagggagaaaagaaatattgtggatatttagggagaaatgttgtggataaaatggttagggaaggcctctccaagaaggtggtatctgggcagagtcttaaaaagtgaaggagtgagccactcaaaaatttctgggaagaatgtctaagcaaagggagtgagcatttgcagaagccctgaggctggatcaagcctgacaagtttaaggacccacacgcagagcagtggtggccagagagctgggagtgacgtgtagagagtggtgagggatgaggacaggatctgtcaagtctctcagccctggtaaaagatttgggttttactctgcatgtgctgagtcctttggagggtgacaaaatatttgcaaatcatatatttgatgaggaacttatagctagaaatagaaagaggtcttataattcaaaaaacataaacaaataatcaaattaaataatgggcaaaggttctgaacagacatgtctccaaagatagacaaatagccaatgagcacatgaaaaagatgctcaactgcattcaccatcagagagatgcaaatcaaaaccacagtgagatactgcttcacacccactacaatgtggctacaataaaaaatacagatagttacaagtgttatcaaagatgtggaaaaaccagaactctcatgggagtgtaaaatggtgtagccactttggaaaacattctggcaattcctcaagaggttagctgaggcaggcagatcatgaggtcaggagatcgagaccatcctggccaacatggtgaaaccccgtctctactaaaaaaatagaaaaattagctgggcgtggtggcatgtgcttgtaatctcagctacttgggaggctgaggcaggagaatcacttgaaccagggagtcggaagttgcagtgagctgagattgagccactgcactccagcctggcgtcagagtgagaccccgtctcaaaaaaaaaaaaaaaaggttaaacacagaattatcatacgatgcagcagttcttcttttaggtatacagccaagagaagtgagaatatatgttcacacaagaacctgtacgtgaatgtttatagcagcattattcataatagccaaaaaatggaaacaacccaatgtctatcaactggtgaatggataaacaaagtgtggtatattcataccatggtatactatttggccttaaaaaggaatgaagtactgatacatactacaacacagatgaacttgaacatgctccatgaaagaagccagatgcaaaatgattctgttcatgtaaaatatctagaataggcaaatctatagagacagaaagtaaattagtaggtgccaggggctggggaagttgcgaggaaattgagagcgactgccgatggagctggagtttcttcatggagtgatgaaaatgttctaaaattgattgtggtgatgactgcacagcttcgaatactgaggctcctcgacttacaatgggactgtgtcctgataaacccatcataagtagaaaagataataaactgaaaatgcatttaatccaactaacctactgaacatcatagcttagcctagcctaccttaaatgtgctcagaacacttacattagccaacagttgggtaaaatcatctaatataaaacctattttataataaaattgttgaagatctcatggaatttattatatcctgtacatgacttcaaaactgtgatggtttcccacaattataaacttgaaaaatcctaagtcggggaccattctgtgtattagttgaactgtacactttaaaagacatgaattttatattaaatggtatgtgtattaggtctctgaaaagcggcatgggtgtgtacatgtatataaatgagctctgccagtgtcagtaagagtcactggcatcactcatgccacctctctctcatacacacacacacacacacacacacacacatatatatacacacatgtgtatacatacacacacaaacagagtgacgtgccatgtattaagccgttcttgcattgctgtaaagaaatgcatgagactgggtaatttacaaagaggtttaattggctcacagttctgcaggctttccaggaagcatgatgctggcatctgctcaggctctggggaggcctcaggaagcttacaatcatggtggaaggcaaagggggtgcaggcatgtcacgtggccagagcaggagctagagagagagagttgggtgagggagaagcagctgcacacttttaaatgaccagttatctaagagaactcactcattgtcatgagaatagcaccaagaggttggtgctaaaccattcaggagaaatccacccccatgatccaatcacctcccaccaggcctcacctccagcattggggattacagttcaacatgagatttggacaggacaaatatccaaactatattacaccatataataataacattttggtcaacaatggattgcatatatgacagtggtctcataagattataataccgtatttttactgtgccttttctacatttagatgtgtttagatatgtaaatacttaccactgtgttataattgcctgcagtgtttagtacagtagcatgctgtaaaggtttgaagtctaggaacaattggctgtcccatatagcctaggtgtgtagaaggccgtaccatctaggcttatgtaagtgtgctctaggatgtagcctagaagctacccactaggaagtggagagctggaacttgacccaactcacgtgctctttccacgactccccagctgcctgcacattgactgagtgttgtccgtgggctaaaaggctcaggatcatttagctcactgccttgtcatgggcagggctcttttggctcgctgtgccctatttaagacaaaattgtctaatgaaacatttctcagaacatatccttatcactaagtgacatttgactatacacacatgcatgcacgcacatatacacacacacgcatacgtagctttactgagatataatacatatacacacacagatgtgcatttatagggaagggggaaaagtagtccattggagggttttgactgggagaatgacatgacttgatttatgtgtttaaaagattattctggctcttgtgttgcggactgaccatagagagtgttgtcatgtaacaaaccactccaatagtagcttaaaacaataaagtgttattgtctctgacagttctttggataactgggctcagctgggtggttttcacttggggtctcatgtggtttccatcaggtaatggctggagctggtgtcatctgaagactcgactgggctggatgtccaagatggctccttcactcaattatctgagtctcagtgttcctttgcatggcttctctcttcagcagagtaacctggacttgctgtgtgacagctcaggtttccaggagtcaggacacaggaactgccagccctcttaaaagctaggctggaagtacacagcattacttctaccatatttcatcaatcagatagtcacaggtcagccccagatagaaggcggtggaaggctggactctccttctcagtagggaagtgacagaaacctatagggaaggaggaattgatggcagtcatctttggaaacaagctaccacaggggactaaagtggaagaaggaagaacaccagtcagctgctgttaagattattgtcatcagtatttcagcgttcttgtccttgccttttctgagtggaaaacatgcctcctgactggcatcttgagctttggtctggaggggccttgccctgtcatgatgggaggggagctttacaggtgagctgtcattccagtcagcatctccctagctcagttatagagaaagtgacctggctaggttattttgcccagggttccagaggtggttgtcatgaaagcaaggggagaaccgggtctcccagggtcccagccattttcttattgctagaccgcatgtaactgagaatcccactctgagagttctaatctgggggaatgagctgtgagccagctttgccaagcagcttaattctgtccatccagattaaatttgcagcagcagggagccagctgccctctcagccaggggcaggggagtaagctgagtccccgagggatgagcagctgtggaggctgttcctaggcggaccccagacatatggagcaccccctgtgtgcctggcacctgctggggatatgatggtgaccaactcaggcacatgccctgttcttgaaataagctgaaggtctgaatgtggtggtctgggccttttgttttttccccagagatcttgtggatggggctcctcagctggaggagggagaggtcagctaccgagtgccccctgctgatgttgaggtaaaatgtggcttgctcaataggccacatgtggtgtgctcaataaagattgagtaaactgagctcttgaaaggatggggaatggagaaaatgaatccaaattaggggtgagagaccaaggtggatgctttgagaagggctccctgccagccttagtgtgagctgtgggcgagctcccccagcagggaagagccacttccttgtgtggggcaggtgtcgtgctcagtgccgaggggagatacaacagcagttttaccctcaggatagggctggcaaagaggggtcctgtgtgaccatggtgactctttccgacatgtggcagagctcattcatcactcacagcgctacttcctgctgaactcaggtggatttttagttcccctaataatcaatgagagaatacagtctgaaatctatttgccctctctgttccaggaaaggggtcccaggaggaagggagttgcctgatgacagggagcgctgaaaatgtcactaaagctattggagtgggaaaagccaggtgggagaccaggtaccgttgggaagccaacgggagagtaggtagggaagagctctgaaaaagagaaggaatggagaccctgggacagtaaaaatactgccagtgccacttgatatttttgctaccttagtttataaaacaatttccttgattacacccatttaacagatgagaccatggaggcctagacactacccactaggaagtagagaactggaacttgacccaactccaactcaagtgttctttctactactccctggctgcctccgcactgactgagtgttgtccagtagtctgtaggctgattggttccgggtgatcctgtttagaggtcattgagttcatggccctgcctgggaagagctcttttggaaccctgtgctccattgcactaagaagccgcaacaccctgatgtgtacatcctcctcctggagtaggatacagtttgcctgaatcagatcagtttcatatccaaggctgccatgtgggagttcatggagctcacgtgtggctttgcatagggcaggtggttatggtgttgtacaggtattcttgaaactggaaaatgaatttaatggaaactatttccaattccagcctatccaagagaatggcatgttcacatctcacccttttgaccctatttgacctggatttctgtcctggtgtgtgtgacccctccttgccccctgccctcaagatcttgacgggctcaagctggtgttctaggaggccacgcttatggttgggctgggctcaggctttgttgtcacattcagttttctgttttggtacaacgaaggctttgaggagataaacagagatcattttacaccttttatattatgacaaatacatattgcaaaacactgctgcttccaaaatgtttgggttgcagagcagtgaggaattaacagctaggcagttcccgagatgcttgtacttcatttacacatcagaattttttttacactgttcagtaaaataaaagtgagaaaacacacatacgtgcacgtgcacacccccatgcacacccagtgcaccacctggcttctatatcaggaatgtcttaaattagtaagtagttctttaagtccagataaactgataaataccattaatggcttaatttattctctgggtttgaaatttgacacacggacactatcttggctcaggaaacacaagtggttttgtgccagaggttttaatgaccgatcagtaatataaattgctgcatcactgagcagaaatagcttctccatgtcatttgatctggaaacttctctggccaggcagcagttaataaatttaaaaataattaccctctttattcaaagtcaaactaattaggagtgggttttacaaatcataatgttgttcaagccactgtacatccccatttgggacttgaacaggcctgggggcaacagacaggatccggtggtgttaattagagggcagcgagataacttggctgctgagctccagggtaggaggccgggcagtcttcagcatgccctcgggagaaaatgggaggtctgagcaaagaggccatgagggtgacctgtaggaaccttcaactctttcagtccatctgtaggggacccagagcagccacctattggtaatgtgaacatgggggagttggggccagggctggtctgtgtgggcctggccagagagactgagggagtcagggagcaggaaagggggatgggcaaatgactgcctggggacaagagacctgcctgaaggcagggaagtggatgggatgatctctagaggacattacttcctaggaaagtttgagccctaacagagtggtgcaggtttgtcatgcagattgcagggaagaggaaccccatgaagcctaaagtcagagtgtcaagtgcagggtatttggtgcacagtgacccagaacttgggatctggtgtcagactatctagattccaattccagccccatcacagattggataatctcaatataggcctcgcatggagtaagtgctcaggaaatggaggtgccagtttctctcatcgcatcatcctggtcttcctcagaggcttctgagaacatggatttcccccactggataggttgacggggccaagtcagtgaggatggtgttggaggaataggaacagtatacacctgctttgcaaggccatggtgaggtcttccaggatccctgactatgtcctccggccaagaggacatttgcaatgtgcccactgagttaacagccactggggccctctcagtgcagttgaaagaagtgagggcagattgaagctccacactttgagcaatctcagggagcagatttggtagatcttaaggccctgaggtctggaatgcccaaagcttcccaaaggaaccattccctgttggtgtctaaacaggtgatgtgtaaacccaggccagacaggccgcaaaactggaatcgagactaagcaggtgtaccagcctccaggagcaccaggcctgtgcccttccacgtcttaagaggaggcttcagtgactggtgccctcaaaggctcaggaattttgggttcctggtagggtcctgaaccatgtctgctatcaccaggaacctgggtattccctatctcttgacttcttcaaatagaaccttccacctcatcctaccttttcgccagtaagaaaaaagaggcaaggtcattcctaggtttagaagttctgaggctgggaagcttaagggcaccctctgcaggcccagggtactaggttgaactagaccctagacttaccctggaggaattcagctctctcctccagccctcaacctgccctgcaaggtctgccaggttagtgactcaagtttgctgtgagagtagcctgtgtagctggcttatcctgtagttccttcatttcctcattctctgagtttttaagtacctactgtatgctaggtgctttgtggacttaatacataatagtgaacagaaattgggccctgccttcctgaaggttacggtgttatgaaggaaatgagcatgtaggttgaacttgccttaggtacagataattcaatagctgtactcttttggatacttttgagttattatttttattaagtcttcactatagtccaaaaatatagaccttttttcctccctaatctttgccagagaaaactgagtcccagaaaggttaaggaagaccaatctggggcaggacttgaatgtgtgccttgggcttctgtaccccagagcccacattttagcattgtcttccctccctgtgggggcctgggcatcagctctcatgtgcggatcaatggatcaaagcccctatttgaaaaagggggtcagttaagaacacacaatccaaactagaattagggcccacgagttcagcccaaggttctctccactgtgactacaaaataagtactttcttttactggcctagaaaaggttgcttagtttccacattactgcgtcacaggggaagccactcaaccagatgcaaatgttgagatgctggttctcatccactgtgttgtcggctgcaagagtcttgcagtccagaaacggcatacctctggcggctgagggtccatgctgtggactctgcccttcccttctagcagggagtgggcattggagggaaccccacccaaagggtcctcttcgtttcagtgtgaaggagtctaggaggcatatactctgtcttccccccactctctgtttctctctctttgtctctctctctctctttgcactgtgtggcctccccctttggaggtgcagaactgtctctccaaccttggtgttggctgcctgcttgcactggcccctctctcctgatatgttaataatatttggaggaagcttcagagacagtccctggctctgaacttcagagtagaaaatgaagtccttgtttggagaattttctgtagtgggtgatcatggtgggggcagggggtggggtgggagtagcaggcaagacagaggatttattttattttaattattatttttgagacagagtctcgctctgtcgcccaggctggagtgcagaaggcagaggatttaaaagggtgagcagcaacgctccttccctcaggatagctgctggccttgccccctcctgccctgagcttggcacgagggacagtgctgggcaccaaggagtcctgtaatgataggaaaactggcaactgttctagttcctgctctcaagaacagcctcccagtggctggtcccagaggagctgggagggggccagatgatgacaaataacttaatctacctaaactttacatgaaaaaaaaaaaaaatccaaacgaacctcaaacctctgtccaaggtggagggtatcggggaggacaggacagtgagtcatcagagggacaggcagactccatgtggtttgctgtgacctccccattgaaaacataatagcatttgacttttataaatatcagaggtgatttgtatagcatttcacattctgtgccaaggaatttaacatgagaaagctcaggctgaagaacggccgcggaacgtcataggcactttgggaggagggtcatgtgctgctgtttgtacagtcagtgccccagcatagatttactcttgacctaatttcatgctgttactataaaggcatgtttgatgcctaatatagagttttattttccaagcacaggggctctcggctgtgctggagctgcttgctgtagagtagggaggaacaacccagccgtctcctgctggcccagaccagctattctttctctccattgttcaccctagtggctcccagggcccctctggccaccttctggaggggcccccgatactcttttttaaattaataaatttcatttttttaagagcagctttaggttatagcaaaatggaatggagagtatagagttcccactgtacccccgtcctcacacgcaagtgcacagcctcccccaccatcaacatcccacgccacatgggtggtacatttgttacaattggtgagtctacgctggcacatcattgtcacccagggcccacagttcacatgagggttcactcctggtggtgtacagtctgtggatttggacagacatgtaaggacacgcattcaccatttttgtatcatacagaatagccgcttcactgccctgaaagtcctttgtgctctgccctttcatcaccccagcacattttatatgaagcatcactgccctggacagtgatttgaggggatcagtggtgtttggctcttttgggattggagaaggagaatttaagcaaggcaggtttggattagaaagggctgaagctcatttcctccacagacatcttgagtgtttctcgatgccagacatggatgctgggtcctgggatagggattttggacatgtatgctgggacctgggaccgggatgccagacacggatgctgggccccgggacggggatgccggacatggatgccgggccccgggacggggatgacggacatggatgccgctgggcccagggacggggatgccggacatggatgccgctgggcccagggacggggatgccggacatggatgccgctgggccccgggatggggatgccggacatggatgccgctgggccccgggacggggctgctggacatggatgccgctgggccccgggacggggatgctggacatggatgctgggccccgggatggggatgccagccatggatgccgctgggcagtgggcaggacacagaccttgcccttccccggcctcccaccctagtggaaatgtgattgcagattaccattggggatgtggaggcagcatggtgtttggaagcaataatgaattaggagaaggagaactaggttcttatcctggctctgctatggacttgcttcatatgggacaaatggcttcgtttccttgcttctctcaaaggtagtgtgtaggaattgggcaagaaaagtactgtttggggggttctgtggttccaaggacagcctaagattctgatcttgcattgatggtctgtatttttctcaaccttagtttttcacatttgtaaactacgattaataatcataatggttgctgtaagaactacataaaaccatacatgtggggccgggcacggtggctcacacctgtaatcccagcactttgggaggccgaggtgggcggatcatgaggtcaggagatcaagaccatcctggctaacatggtgaaaccctgtctctactaaaaatacaaaaaattagccgggcttggtggcgggcacctgtagtcccagctacttgggaggctgaggcaggagaatggtgtgaacccgggaggcggagcttgcagtgagaagagatcacgccactgcactccagcctgggggacagagcgagactccgtctcaaaaaaaaaaaaagaaaaaaagaaaaaaaaaatcatacatgtgaagccctgagccctgggaaggaggactgatgtatgcataagtggtagctgcttgctactgttatttttagaggcctgcagtttctgtccctcaccagtagacaagaattcctccactttatttagtagcttattcagtaacagtgtattaaatacctactgtgtctgaagaagggattaaagatgaagatcttttgcctcttaaaaactgttctagaaattggaggggaaggatagagtctgatctttgaggactattattcagaacgtggtctgtgcccagcactgtggctttttatgtatggtccaatatagtcatcaggacaccactaaggggggcttcactgtctgcatcactgatgaggaatcacaggcccagagaggcttaaataatatgactcatccagtggcaggactgggattccaggttggtgttttcttggggtgatctggcaggactcaccgtcctcactggtctgagttgccccttcactctcagaattgtccccacatccgagtcctgaataatcaacctcagttcttgatctcaggtttccactcgtctcccctcgtgcccatgctcagcccctcaagcttctcctttatccctctctctcccactgtccactcctgtgtttcctctctgacttctcacccttctccttagtgacgccatggctgcctgatgacagaaaggagttaataaaaaccaatgtgtaactgaaacttgaaaggccataaattgccttgttttttctaggatgttggtagcattttgatttaatagttggacaaacacaagggcctattttattcagagtttacaggcctcaaggctgttattcctccaaagttaatagcattgaaattgcagggtttgctataatttgcctatcgctttctgctccaccattgatgtttactgtcagcgggatggaatctcaatccgactcacttagataacatgtctgttaaacatttagataattgtaccatcattaacttgtcacattattttagagattcaaaacagaggcagggtaagtagaggtacccaaagggagtggaggtgggaggagggggaggaggaggaggaggaagagacaacctcttctgagttagacagccaggagaggagaaagttcattgcacaccttggcatctcattggaggtgtctaagttaaggaggtacgtgccaccaagccgggcccagggttgctccctgaggaatccggggaccagtgtctcaaccaccgaccgccgtggcagtagggcctgttatcagcaggcccctgagacagtgtggcaaatgctcagaaacccttggcgtttcatccccgactttggcctttatgtaccaaagtttctaagctttccttagggatgctgattgcaacactatttgtaattgcaaagcaatgagaatgacctaaatatccaaaagtaaggaatctgtcaatgatggtatggaaagatgtccatgatgttttgcatgataaaagctgattagagaaatcaggttatatagtgtggtcccatttcatataaaatactaaagccaccctataagactctgtaatgctctatacctgttaacaatgattatctttagaagtgggattatagggcaaaggtgttctactttctgctttatctatttttgagtaataataatgatgatttacaagcacatatcacttacataattttaaaaattaaagtcactttataaataagaaaaatatcaccttcaagtctcattctgtgtatggaaggaggacttctaaaaagaaaaggctgcaagtacaaataaatgagttttgggagcgctcatggacatcagtatctcagccacactggcaggtgcctcagtttcccactgttagaacagataaatgccagatggagaatgcagcacaggggaatgggcctgtgccagcactcagaggtcagggctgctgtcttgttcactatgggcctgacggaggaagtgagtaagaagagagctttttcttacaccgacataaggactgaggtcacacctggagggggtgacagaggccacaaataagaatgagctcagctggaagtgggagtgactccccatatgggagacttggggatcaattaaatatcaacagtagtggggcactgagcttggaatacaaaactgccctcgagaaataacggggtgtttgctccctgttcccatggtaccacgaggtcacagaggtgactacagtgctgtccatctggctttggacactgttatctcctgcattcccagggccttctgtgtgacctgggcgagagaactgtcactattgcctctctccaatctgtgtgtgccccagtgacacaggcaataggaaaaatgtttccccaactgtaccgtaaataatgcagatatttgggcgtgggagaaacaaataatatcaatattttatagactgtaggctaaataatgtatatatttagaaaagcggcttaaatatttcatatgctgcagtgaagattcctgcttagaggcataatttgggctggtgagggctgtgggttaaggatgcagtcctgcggagccccggggtgagggggcagaggggaatgcagtaaaagtgtgtgtgtgagattggagtgtggcaaggacaggcaggtatcacttatttggaacccaagtagttggaagtctcagattttttttaactgtcctgtgctctttttgtttttaatgtgggagagagacaaatgacaacctaataacaagaatttattttcaaaaagtaacttccaacccaagagaattgaaaatgtgtccacataaaaacttactcatgaacattcatagcagtgttgttcacaatagccaaaaggtggaaactacccaattgcctatcagctgatgcatggatatacaaaatgtggtatatccataccatggactataatttggccataaaaagagtaaaatattgatgcatgttacagcatggatgaactttggaaatcccgtgctaagtgaaacaagcaagacatgaaaggccatgaattagatgattccatttatgtgaaaatgttcagaacagagagctctagacagttagtagattagtggatgccacaggcttggggaaaatgagaagtgactactaatgggtatgtggttcctttttggagtgatgaagatattctggaattagatagtggtggtgatggtattcagctttatgaatacattaaaaaccaataaaagggccgggcacagtggctcatgctttgggaggttgaggcagaaggatcacttgagcccaggagcttgaggctgcagtgagctttgatggcaccactgtactccaggctgggtaacagagcaagaccctgcctgttaaaaacaacccccccgcccccctgcaaaaacaacaacaacaaaaacattaaaagggtggaattttatggtacatgaattatatttcaattaaaataaaaaacaacttccaggtatgttgttggttcttacagacttaacccaacctcctatacctgcggcatcacaggactgcaggtaacgctttgcatcatagtgaccattcagacagtgcaggagactgtggcacctttagaatcattctattcacagaaggcagcagggagtaggggtggctctgggatgcctccttgccctccccattcctccattttcagaaacaggaaggaaggatcaggtctgaactctgatctggtgaagtagtgagtccgacatctgcaaagtcaggaggagacggggtagttgcgtctgtgtagatttctagaagaaaagccagccatcatctggcctgggaggagtcactcttgtcaaaagcaagacacggatggtattgacccaggcaccccattttaagaaaaatcatacctgtaatacggcttcagtgtggggaaattagaaaatacttacaaacaaaagaaatatgttctctgtgtcccactatctttttttttttttttctgagacacagtcttgctttgttttctaggctggagtgccatggcacgatctcggctcactgccacctctaccttccgggttcaagcgattctcctgcctcagccttcacaggcatgcaccaccatgcccggctaatttttgtattttttagtagagatggggtttcaccatgttggccaggctggcctcaaactcctgacctcaggtgatccacccacctcaccctcttaaagtgctgggattacaggtgtgagccaccacacccggtctcatttttcttttattcacaaatggggctatgatattcagtgcatactgttttgtaatctgtgatttgcctaccaacagacctatgtcttgatgatcattttaatggtttcccagtgttctccctacacccattcgtttttttctccccatgatctctgatgttccttacttgtgcaccagggaccagaccctgtatccagaggaccttccaggggctccaggcaggagaagtggctaacagagatgcagctcattaccacctctcacctattgctgcttctgtcaacaagataaactgggcccgccaagcagttttgcagtagctgtttactcgaccatcccaggcaagcttgagatgctgggaacatatccagtccccacattcagtcttcttagaaactgtttcccttttggttttctctaggcttgcaagtggtcactcgccctgagctggatttgggcaggtaatttacttccgctactaatttaacgaatggcactgccctgaggtcgggcagactgaggaaaatataggcatcaattcatttgccacgttaaaacccagagttaagtaacaagttaagcatctccatacattaagtatcccaggcccaactagggaagatttcctggagctgatgagccccaaccaggcattaggaaaaaggcatttgaaaaaaaaatttcggccgggcgcggtggcttatgcctgtaatcccagcactttgggaggccgaggtgggcggatcacgaggtcaggagatcgagaccatcctggctaacgtggtgaaaccccgtctctactaaaaatacaaaaaaattagccgggcgtagtggtgggcgcctgtagtcccagctactcaggaggctgaggcaggagaatgacgtgaacccgggaggtggagcttgcagtgagccgagatcgcgccactgcactccagcctgggtgacagagtgagactccgtctcaaaaaaaaaaaaaaaaaatttcttctctgaaccttaggagaagttagctaacagagagattgtaggtttgggtcagacgcaatgttccctgcccccagtaggagaagatccattacagattggaaatgactttgtctcttaagtgtgcattgtcagatgggacgcacgttcccctcaaccaaacaaatataaaatgcttccagcctctgcctcggattttctattactgtttcacaggactccagagagttttaagatagcaatttgattaagcttatggggaagatcccatcagataacattctttttctgcaggtagagataatgtgttcaagtattaagtatgttttaaaggtaattatcttttccatattcattttagttacaggaattgacaagggggagactctgcatctgaaagctgccccttgggccctagagtcactctgactgctctcctctggggaacacacttgaggcttttgacaaatgaatgagcaccaagggtttttctattttgaaatggctcgggatcccctgtctccagacaagtggtctagagggcaaggtcttggccactgacctcatctggctccctagcttagattccttgttctgggacacccactgggccccaaatcttaagctcctggatgtcaagagggagcctggctgctactcagaaagaggacttgtctcatctagtaccaagtcatggtgccatatcgccaacctttcaaaagtagagtctggaattgccatttacatatactgagcccagtgttggggtgttttcacatcgggagacactaattaggggtcctagaattctaaaatctgtagactcctagactgcagaactgttgcaaggggctttagggagcatgatgctgagcttcagaggggttctgggatttgtctgggatcacacagcaggctagagagagacactgtgggctagaacccaggaatccctggtcttagaccactgcttctgtccctctacccacaactctgtgccatctccagaaaagctcctctttccctttcctggaaatccccagagtaggagattctgcccccaggcagccctccttggccgtctgtgagtcagggtctgcaccagggctctgtatgggcctgaggagcccccatagcaagcctgatgctgatggcctggagttcctcaaacctcactttgcctgctagctgtgctgttctaagcattctgtacatttttacaaaatagaaaaattagggctcagcccgctttcagaaagctaactattgctagggaggaaaacatacatatctaaaaagataagtaataaaacaaggcaattggatgtgatatacctgcactaagaattgaggagtgatgtttttaggttccccatccctttgtctgcccaaaatccagtctgctgtggctagacacctatggcttctgcacacagcatttcccccatgttacttctctgtctgatctctcaggtgcccttggtttgacagctgcagcttgttggtctgaaggcaagtgacactgggaaaggaccctagtgagaggtttatcacataagaccccaggatggcggcatgctctgtttttgaacgactgcctcattcctgtaagacaaaggtggcaatggagggtggatgcagagttgatggctgcagcccaagttttggtgcttggcctcatgtgttacatcctaggtaaggatgtctctgccatcttaacacccatacctgctcttgcgtctctctctcttatccttcaaagcatcatcattgtcttaccccagctacacagtgaaatcatttagaggaactttatgaaaaaaatgtattaatagcaagcaaaggttcccacctcaacccggatgagtcagaacctcctgcatggggctcagacatggatgtattttcaagctccccaggagattcctatggataaccagggttttgaatttccagatgggataagattagactctgctgcgtggcccagaaggttcctcacaatcagagtcacaggcctcatcttttgtcaccccctatgatgcgtgtacactgagccacttagaatttcccagactctcctggctgtttttctcctccatgcatcttccactaacccccacactctcatgtgtcttgtttgcctgatacacacacacaacacacacacacacacacacacacacacacacacacatattgaggcagagtttcactttgtcacccaggctgtagtgcagtggcaagatctcagctcactgcaacctccgcctcctgggttcaagcgattctcctgcctcggcctcctgagtagctgggattacaggcatgcgacaccacacccagataatttttgtatttttagtagagacagggtttcactatgttgaccaggctggtctcgaactcctgacctcaagtgatcctcctgccttggcctcccaaagtgctgggattacaggcgtgtgccaccatgcccagctaatttttgtatttttattagagatggagtttcactctgttggcccggcttgtcccgaactcctgacctcaggtgatccacccacttcggcctcccaaagtgttgggattacgggtgtgaaccaccacgcctggccttgcctgcctggtattaatagagtcttctcagctcatttgtcttctctatgacacccttttcacagttgaccctccttctggtctccagcaccatagatgtacaccacttgcccttagctatcttgccactgcacgagttagggtgaagattgaaccaccttggggacttgggcctttctactgtgttagttcaaataatcattcaataaatgcttattgcatgattaatcaaaaacagaaaagggagcttcctgattagaagcaggaatgaagaatctgttcttgtctggcttcagatttttgctcttcacttgccaggtgaaggaccttggaagagtcactcatcctttgcaagtctcagattccttgtctgaaaaattaggacaccatacctgccctttatacctcaaaaagggatgtgaggaccaaaatggtcttagaacagggtagggtctttgcaagcagtaaagcatgattcagatgtaaggtgatgtcattgtgatgtttcctcttgctgtggtttcctgtcatgggctctggcttcagggtgccctgcaatgccaatgcaccccagtctgtgccctctgcacagcctcccatcccagcttttctgggcccttttcttccgttggcttcttttatcttgcacctaccttgctttctccctgcacgtaccaccaccacaaatgctgtacaagagcaagttaaccactattgtttggaatgatagagaaaataatgagggaaacagactggtccattcagtgattaagtattcagtaattaagtattcagtgttaggtggtgggcagaagttaggaagaaaggtatcttaaggtttttgattcggcgtcatccgaatgggtcaatgagacagattccacaggcaaaccattccagatccataacctctagagtagaaagtttcagaaggaagagattccccaaactgtgtaattcccttgtaaatctcattcattcaatgggatttgagaaccaaccacttgtgcaggtgcccgcatccgaagataacttgcccccaggagacagcagataagaagagggcagagacaaaggaggtctttttgcgacttgcatcatggatgcagaaaaggtggataacccaactctggtggggtgagtgggcagggaaggtttggaagcaggaggaggagacactcaaagctgctttggggtgcacttattttgtgtgctggagaaggatttgctggccatttcttgtgaaataaacttttttgtgtatgcatgtgtatgtaggctgttactaatcccgttcctttcttgatctactgtttttcaggttaatggtgtctgggatttgtggagggaggaaggatataaaagggcaaaaacaggagaccccggtgcctggattcagagccttcacattccggagatccccagaggcccctctccccagacccttcagctccagaaagccattgtgctccctcctggcctctgaccctgaggctctgggaagcagcaggttgttgacacttggacaatcatttcttgcaaggcaactgcctccctggggggctctcctctgccttagggtggtgactattcccccaaccagggttaaggaagagaaaaattaactgttggtcagagcaggaggcaaggatagagaatcctcaatttcaggcccccaggcatgttcacccctctctcacttgccacttcaggagtacaccacagcccagggataagctttaggaaaatgggttcgagagaggcatttctgatcagagttccttctggcatcctgctgtgggtctcatgtttgttgaggggaccccatatttcttcatgaaggatatctgtatgtctgctacagtctcaggaatgcagccacaggaacaaagaaatttctagccctggtgctgctacttattaggagcaagacttcagacaagttgcttgtcctttcagaagcttggtttcctcattggtagaagagggtcaaaaagccacttgcccggtgagcctgctgagaagagcagatgaaggaggtgtactctgcactctgtgaaacattgcaaatgtgcgggttgatcattaatgttttctcttacagccaaagctagtgtgtgtgtgtgtgtgtgtgtgtgtgtgtgcgtgcgcgcgcgtgcacagtttgtgagtgtcgggttcccaagcatttactctcctctctcctttctaggacatttcaggaagcattattcaaaagccggtggggtgggacagagggactattaaaatttttaagaatcaccttgcatttctttcactttggtcttaataataaataactctaaccctgcagccaggagctgggatgttctgtccaaattagcacaaatctctgtctgcaacagccgagcatccccgttcagtgggcgggatcagtaccatttccccagcaatgagaaaaagccctcttgctaagctacagaaaaatctcccttgtgctttaattttggaagaagcggattagtgtggccatatttaacctttgaccctgaaacaaaagcattatcaaaattatttaccaagagcgtctgtcttcttctcctcacccccacttccctgtttgccggggctagtttagaatcttggtaaacttcccagagcaagagcaaaattttggaaggccatcattaccttagagacatcccaggcctggtgttcactgccagggctcttggggtctaaggtgggttaaaggacagagatgagaatcttataccacagtggggttcaaaatttgtgagttggatgtaaaaactctttctcctctgaaactagcctagtttctggctgtcttggagatttaactattcagatgatatgttgattttttttttgttttgttttaaagatggagtctcactctgtcgccaggctggagtgcagtgtcttgatctcggctcactgcaacctccgcctcctgggttcaagcgattctcctgcctcagcctcccgagtagctgggattattacaggtgtgcaccaccacccctagctaatttttctatttttagtagagacagtggtttcaccattttggccaggctggtctcaaactcctgacctcagttcatccaccctccttggcctcccagagtgctgggattacaggcatgagccaagtgagtgacctaaaagtgcagattgatttctaccttcttctccttccaggcagaaatccatagacttggtggtgtggggtggaggtatatctagacctgagccatttctgtgggtttaaatctcatcttccctgtcattaactgtcactgtggccttggacaaattatttgaactctgagccccccacctaccttccttatctgtaaaatgggcatagcaataatagtgcccgcctcctagagttatttttgaggatagataacaggatacacatgaagtgcttactgtggggtttggtgcttactaagtgttgagccagtgctaactactgttaccacagttgttaccattgtcatcagtatcatccttattgattcttcgtcacttccccaggtcctggttggctcccttccccctcccccgcattggggtgttattggcgacccgccccatttcctgcttgtcctctgccctcaccttctttgcagtgattttcagagtccccgtttgcgttcgcagtggggagtttgacttcatttcataccaggaaggccagcttgcagtgggggattgggagggcagagcgctttataagctcgcgatgaaagctgtaaaacgagatggtcaaggatctggccaggcctggttcgggattatggccggcccctggaatgctgaggggggcctcttttaagaagccagtgtctatttacagtgtatctctcataaaccccaacgctggggcgagggcagggggactcgccctcctggcatgtgattgattatctggtatttatgccattgaggacttgtcagcggtctggggtcaaagggtcatctcatgtgtcttgccgccagcccacctccttttgtacagtgtggaccgggcgagctgtgcacaaaacagctttttcttttccttgggaaaggggggatggggaggggggagtgtcaatgaaatttttttttcagccttttctgaatagtgttctttaaattctaaagaacttttaattaaaagtcgcaggaaaattcatcttgagaaggtttaacttaccttaacagatacttttgtgtcccaagaagctgggagtgactttgaaagaaagaaagaaagaaagtaaggggctttgttgtgcctctccccctcccccaggcattttcaaagtttcctggagttcttgtccactcctgtctggtgtggaccctgcttgggaaagcaggaagggaagaggtcattcttctcctttaacatagccacacaaatttagaaagggacttggggattctctgctccaattttctcctgttatagatgaagaaactgagccttgacaggtgaaaagacttcgctatagagtcacacagctacacagttgcggagtcaggcactgggctctgattctctgtatttcctagtgctcctttgagcatgccaggttgcttcccgaagctgctttggatgccaagtgaagataaatgtaatgatacctttgctgtcgttcagtcctggatgtttgagacttgggaaccacccttaaattccttgggctggaagcatccctgagggaccacctggcttatccccccatcccccatcgcctgcctcggagcaggcagtccgtgctcacgtgtgccggaggaattgctgtgggtcccttttctaaaaatctgcagaggaagtctctatgttttctgcttggtagaaaatgccggcacccctccctcaaccttcatcactggatggtctggacatccttctgaacagctgactttgtttcttccttctgtggctcaggagtggcccacccatggaagcttgtctgtctgttcccccatccccccgaccccctgtgtgcccacagggggccatccagagctgtgactggccaggacacctcagtccactgtgctgctccaccatggcctggctgctgtagggaaacattgtccctcttaactctcacccaggcttttggtgacgtgaggccttgatgaaatgctttgtccatcgcttccaactcattgaaccaaggtggacactgggcagagaaatcatttgccaagagataggtatttgtaggactcgcataaattcacgtgtcctgtatcctgttgtttgtcttctccatcccaccacctcctcatttaaaaaatgcaatacaaagaattttcttctaaagaatagctttagaaatcctcattcctttccattccctccattcccattcacattaaattagcgaatgctaatttggactgatagggcaccactgtgaaaaaggtgtgaagaaagatctgcttcttgctcatgggaggagaccccagcagtaattagattctcactgaagtcactgggtgccacaaactgtgccagtgcttacctcagactgtgttatttggtcctcatattaactttccaagatgaacattcctgtgtccagatgaggaacatcagggctagacataggtagccttctctggggtataatttgctttaagctaagtagtattaaacatgttaaacacgtcatctctttgaatccacataaaatccctaaatccctgtgagacagggattgttgttatcctggttttagatgaaacaggcacagaggagttaagtaacttacctgaggtcacacagcagtagtaagtggtgaagtggggtttgatccaccatgaatgactgcagagttcacacttgaactacttgctgctccacctcttttaagttgtagagcttcctgatgctggcgctcatgttttgttttgtcttttcctactattctgacataaatctgctggggagacactatatatagacatatataaatcagccagagaccagcaaaaggtcactgtgtaatcagatgccagcctgggtggtgcgtggagaggaatttagagaaggaatatgttaacgaggacacagtatttagtctcatgtctggacccccatagtaaggggacagtgccttactcatctttccatctctgggacctaactcagggcctggtacacattatatgttcaataagtactgattagattactgggaaagagttagtaggggagatgggacttgaagttttttgaaaatgatattaataactgtgacagttatttgtgaagttttttgaaaatgatattaataactgtgatagttatttgtgaagttttttgaaaatgatattaatggcattaccttttatggcatactggccaggtactcagctaagtttattatttagttgtattaactctcacagcagccctatggctattatgatccctggagtaaacttaggctgaagagagattctatatcttgctggaggatttaaagtctcagggtggttggtgttatttgggggcttttttttggcttttttgttgttgttgttttgagacagggtcttgctctgtcgcccatcctggagtgcagtggcgcaattttggctcactgcaatctccgcctcccgggttcaagcgattctcatactttagcctcgtgagtagctgggactacaggcatgcgccaccacatccggctaatttttatatttttagtagagacggagtttcgccatgttggccagcctgtggtggtttgtttgtttgtttgttttttcttgattttgaaattattttttttcctaaagcagagaagaaggcacaagtgaaggagaaaaggcagacgtgagtgatgatggcagaaagtctgctcaattggggtggagggatttggaagccagagagaggagcttatcttttttttttttttcctgcttataggtggaagttgcttctttaatataaagatttctggatctatgaggttaactgtgtccagttaattgaatttataattcagcaccaaaacgctgaaaagaattgtcttttatgtcccttaatgagtgctataaaaacaagtggtgaatctaattttacgaatgttcctttatgacttacctgataactagtagttgttcaacacaaaggacacataactcagtctggacctacactggctgcctgccgtaaaataacttgttttagaagttggccttcttgcttctcttgagtggcccagggattcacttgttcccttctctgctccctcttctcattgaggatcaggctcgggttcttcattctggaggattgagatgggttaccttccctgccagtccaggatgaccaagacctcacatctcattggctctttccaaaaaggggaagggaaagatatggcagctcattcagatgtctctctggtgcagcatattgcttctacctagaagttgcctggtgtgctagcaagaaaagagaaattaagagaaagactccttttgtctttaccctacaacgagaggtaaagagctttacagccgcagcagccgcattaggttagacattggtgagaacttcctgagttgcaaagatgttcctaagagagactgataactgtccatctctggagctgcttcagttgtgagtgggcacatatatagatgcccttatctttttatagcttttgtctttttttatgttttgaaagtttaatttgaattattttgtgattacagatcttacaggtagatgttgggtacaaaattcaggcattctctgatggctatttgagaaaggttggctgttcccatctgcaatagtcaggggcaggagcctggactcacaggccagtacagcactcagggagacagcctagaaatggaagggcttttggaggagggaagctcttgaacagagcagacagggtaggggtgtgggagcgttgatgaaggaaggccaagataaggctgtggtttccatttgttaccacctctcccgcttatcttgagtgagaacaggccctacagctctgagcgaacctttccatggggctgttgagctgtgaagaggacatatacgagctctcctatcctctcttcccagtgcaccctttcccttgcacacacaggcacctgtaaaggctgcagctttggtctattggatgggtggggacaaatgcagaagtgtccctgttctgggtgctgattacttcctagcagagctggggggtggactggcacatttgtccttcatgatctgagtcttacctctgctggccttgtgctcagactggctggtgggccatcttctgccttgtcccacccttactaggctgataaattgctgttccagtcaacagggctctgacccagcccttatctttggtcagaaggaggctgggtgacaaggacagggggaggggctgctgcacaagcccagcctttggacactggtaaccttttgtgggggaatgtacacccagctgctttggggcccagaggaacattctggcaagacagtgctatcagcctaaactcatcacaccggaggcagcctgcagcatatacacatttctcttgacttacaggagactggagatggagggaaataagaagtcacctccccttaccccctattctcactgagttggcatgacactaaaagatcccctattccctatcattttcagaagaaccaagacggcttgccactcattcattcaacatttattgcatatctactatgtgcttaaatgctgggaatagaaagatgactagacccagtctcttgattcaaggaattcagagttgagaggaagacagacacataaacaggcaattataatgcagaatgctgagtgcagcgatagagatatttattatacacaggatactgtggtagcccagaggaagggtgctcagcagatacccaggggacagataaggcttctagaaaggaagacaccacaaggttttcaagaagtagaaagtagccaggatgaagggagagaaggacagaagaaatggaactgtatgtgtttagaaacagtgacactgtggcctgagtagctcagctgagatagaacgtggtggatacagttggaggcataggcaagcccaggccacagaaacttgttaggctgtgtttaggagcctagattttatccacagatgacaaggagttcttggaagcctttaaaaaggaagttatgagatcagatacattttggataggtcgcactggtggttctgtgcaggtgagatcagagggaggtaagctgtgtttaggagacttttgtggctatcctgatgagggatgcttacatgatagaaaatgagctggattggggtatctcaatcctaatgtcaggcaagaggacctagaggccttcggggtgacgtccaggcatctagctcgagtgaccaagaggatgttagtgctgacagctgagatggagatccaggccaagcaggtttgagaggcgaagatgtgggtttcaggtttggatattcaggttgaatataagatgtctgcggaacatctagggagcagctaggtatatggattttgtgcccagaagagaagtccaggctggaggcctcctggcttcctggtggtcactgagaccgtgagagtagagttcacctggacagatggcggggcatgaagcgtcatgagttaagggcagaacaccatggtggggatgagagttggggcaaagggcactgctcagcagagaagggcctcctgcagccagctccttaggctccctggaaggtgaggaaggcaggaagcatgggacctcaggtgcagagggcttctcagaggcggattctcaaggtatggcctggtgtggggatccctgcagatagatgggtctctccagggtgaggagcgctctcctggcccagctcctggcattctcaaatcccagggatctcttgtgaacagggccctggccctggggtaggagagaagaggctgacaggctgaagaataatctcagaactggtggggacttaggggattgcagatccaccctcttgcttccagggggattggatgggcagtcctccaggctgctgttggaaatttctcagagaaggacctgctgtgctgcacggaccttcctggaagtccaacccaggtgaacccttcttgctggttccattgctgcacgtaccatccctttgcacatgtgtctctcttttctgaggttcatcatgcttggttctgtcgcattgtctggagggaatacaagcaccctgattccttccaaagaagaggagctcagggccctgggtcctgccccactggggctttacatttcctgaaacccctcttccactttccctgtcccacactgatcctagaatgagcactccatttgggatgggtggccgctctccctctacaccctcctccagtggcttggcacttcgggaccagctgctggagtgattgacataaagccaatctataaataaagtctttttcttttctcataaagactttgtggttgagtttgccttcaaggtcaagatcagacctttctaaataaacacatatcaaaggatcattagcaaagcagcactgttaaattgagatattaacttctgtcaactgcttgtttcttttttgttctgtaactcatgactgcagtaggtttttattattttgtcctcaggcagtagcatctggcttctgtagagactgtaaaaattaaaaagcaacacaaatcattgcgagagaaaagcagtaaattcaatgataagaatttaaaattaaaatgtttcggtgcttttatattctgcaaaacatgaaatgagtgagtttgttgcctgttgccataaacctcacccagctaatcgtccgcttgagttttttcctgtctcttttgctcatcaccatcaattctgtcttggcacaaggcgtaaagtgagagccgtgtgtgtgtgtgtgcatgtgcgtgtgcacgcccatgtgctggcatgtgtatgcatgtacgtgcgtgtatatgtatagcggggctggggcagagtggtggatgcactcactgacctccacctcattagaatgggggagacaacagtagggaggcatcatgtgggaaccagggtagggaaggaagagttgaagattattacatccccatgggtcagagttcccttttttcatcaccctttctagttaaatacaaaaacaaaacaaaaagccccaaccaaccaaccaacaaacagaacactccaggtcacagacatgagcataaacagcaacctgtagcatccaagttaaaatgtaaaaaagaattccctgagcaagtgtgtgatgctggattaggggtctgagtgggtggctgggtctttcccattccagagatgcccagcctttggatggggtgctggggagtgggatgggaagcatcttaggctccttattccaatcagaagatttagggtttctgtgttgaggtcactcattcttactgcaaaatcgagttgtgtctctgggcctagctatgtcctgggctgtgagggagataaaagttgattggttttttttcttgctctggaggaactttaaaaaaagcttaaaaaaaaaaagtcttttaaacagtcagaggacaatttaagacaaatgtgagtaaggatgtgatggcattgtataagctgtttgcagacattctgggaagcgtgcagagtggtgtggggtgagttcaaggggagctattaggcctgagttgccttgaactaattctccagtctgttgggcttggggtctggaagccttggaaagcctggggtgaacactgtcagggtgagctcacccccatgtctaaaccaggccacaggactgggacagtgagggggaatgctgtgggtcccttttcacatagtctgtcccagtttgactgctggacccacaggcatgaggccagagctctttgtcccagacgaacttctccagcctagagagaggtgaggaaagagagccagtctttggcctccgtcaaagggaatgaaggaaagtgtgaagattagtggacggaggggtcgagttaagagggtatgactaataggctggtcattcagataggagagcacattgttctctgggcccagatggtccttggaataaatcagctcaggcagaagcagacttccagtacaaggaagtaggagcaactgcttgcctgctattctctaatgacatagcccaggcccctggccctgaatagcagccattcaggcctccactgtggtgttggagtgggggatgtgtgtgtgcaatgcatgcatgtgagtgtgtgagcaatgcatgcatgtgagtgtgtgtaaatatgtcatgttctagcctccgatgcttacagaagagtggatgagtgtttgtgttgtaaggagctggtacagggagatttttaccttggagcccttctcaactttaaattccaaccctgaaagccgtggaagtactggagtcatttgattaatgtctccttcagtagatgggaagctctaccagggcagggactgtgtcagtctgattcatcagtgtctccccagaccaggtgctggtggatgcttgatagacatagatggaagaaagttgtagcaacattcttatttttctccattgccttgcagtcacggcccccgttaattaagtagtatataagtaaatgaatgtatcagctactcctcccatgacttccctctagggacggtcatgaggacagagtgagctggggtagggatgcacaccacagcagttacatagagttttgggtggtgcaggtcctttatttctgtacttgggacactccacagataatgtggctttgaagcaggactttctgtcataaaagttttccaggtagacagcttccctagtttccctggttgaagacatgcaggcatgtgcaggtcgtagaatacgtgtaagcatcacggtgatccgtggtggtttttctggcatgatggccaacatttcagtggaagagcctacccactcccccctcatgccctacagtctccattcaaaggctgtgctagttccttttcccttcagaacccattcagcttcttaggaaggagggtagggaagagccaagcagcaatatcactgagtaaataggaataatcaaacagatactccctggagagagttttctttctatgaagatcttaattaatatgaacgctttgtcctggtgttctgaggcagactctctgtaccaaccgtgtgtgactgctgatccagctctgcctaaatcagatcactggggtctttcatcctttggggaataagctcctttggagaatcaagccagatcttgcctgttgggagattaaataagttgccctgtcttaaagtttaaaattaagtgcatattaagcaaatgacagtggaggccactgaagacaccttaggcctggaagcatttcagttagagaatgtttcagggactccacacacattcattccccttctccactccaccccactgtcatgccatcctgactttccactcactgtaaggtgcttcagaagacccaagactcaggctgccagagtggctgagttgggtgacttgggggttgtttctctcccattcatgtctgagatcatgaatggtcctctgggccatttcttgagtgtttcatttccaaggcctgtcagagggaggcagtctttagcattctctgactgtgctggtattactgggaaacaacagtcttctcttaaaaggcaatttcagaaaacaactgcaactgaatgactcaggaagagaaaggaaaggggaataggatgagtgaaatgtatggcccaagagcttttggagtctggaagaacaaaggaggaataaaggatgggtacgtggcaagaggagacccatgttacagagtgtccatgatcatgcagtgaccatccagcttggctctgctgtcgcctgcagagaatacactaatgaaacaagtgagtcttgggtgaggggtggtgtggaatcgtgcttggtggaagcatcttttgaatcacagggtctttcatgctgatccttgaggcactgaaaacttcacagaacttccatctgggttcaaatggggacatttagaaagttcttcaaattcactcctctcaatgacttttgcccgaagactccaagcccacaattactttaacctgaatgaacagaaagtatcatccatgctgtttaattctcagtggcctcttggactagcctgaaagtcacagctcccccaacccccaaaatataagttaagaaagaagcctgaaggtgatggaataaacactacggcttgtctttcttatttttaggggctctttgagagagggggaatcaggaagtgtaggagtgagcaaagtgattctgggcagaaacctgaatggatatgacaaggacgagggatcctttgtccgggagctggtaaatccctgggggctgcctgtattgtcacatttgcttgcgaggacacctggcattgtatccaccactgccagatcatctctagatccacaagaaccaggatctttggccaggactgagagcaactcacatctgacaaaagcctgttcacctcttaaaagaagcccctttttattttcctagcaggagggtgttggaggtcatgatttctgagcatgctagtgacatggcttttggcatttccattagcatccctgttctagagaatccccatatgctgcgaaaattgatctcaaaacagtatatcatatatatcaccgtctgaggagggacgaaaacccaccaagagtgtgatttgtgggggcccattgcttgagtgtagagggctcagactctgaggtcagcttatgtgcctgagggcagctcacagcaggccctgcagggatagctgagagcctgccctggtcttggaggagaaagagatagggagtgtgcaccaggagacatctacatgttccaccagtgcccagaagttgttgtcaggtttgacttcagatcccaaactgtaggtgctcgttggctgcaatctcacagctttggccacagagtgatagccgttctgcaggcctctctagagatctgtgtcttcaattgtgaatgactcctcatcaggaagggacatctgggtagcactgcactgagtaccacatgaatgaatacttccaggttgagaggagaaaccaaacccacaaaagcctatgccctgctcctaacacatgtggatatgagtgtacacctaacaatcgcacgtattaaaagatatgggaatatacggactcagaagcctgcaactcatagggaattggggatggtgagtgggtgggtggcttgagagaggagagtaagccagcatgtttacttgagttgaagttggtcagagtcagatattaatggtgtaggctctgaaaattatgacttgcctggagctctggctcaagcccacagaagtattaatagattatttttaatgtatttatttgtttattaattcattcggtaaatatttattgaacacccattcttacttagtagtatattaggctctgggaatacagtggtgagcaaatcagaacccatgtcttcatgggtttcatgccttctagggaggcacacaagaaaataagcaagtcatatacaggataaatattgttatattggaggtataaggatgttattagagcacacgtgagcaacctccaacttggatggaggcttcctggaggtggtgtcatctaagctgtcatctgaaggatgagaagaagttaagacaatgaaggaatgggggagaaagggaagaatgccaggctgagagtcaaggtaggtaaatgtccagagtagggagagagtaagacaagttcatggaactgaaaatgggagtggggaggagggctaagatctgaacttggagaagtaaatgggcattaaatggtgaaaggcccttgaaaaccattttaagtagtttttgcctttttctggggacaatagggaagtaatgaaaggatcttaatcaggggagggacatcaggtgatgtcatggaaaagttactttgactacttggttttgactcaactggtgggtttaagctgaaggcagggagattgggataatattgccatcatttaggcaaagaatatggtagtctgaaccagtgttgctgtatgagggggtggataaataaatgcacaaaaagatactagaaatccgaaaacatttggtaattgatctctttcgagaggtgagagaggaatctaggataatgcccacttttcttgcttgggcaactgagtgatagtggagttctttactgaaatgaagaatacaagaaaaaagagctttttttattgttatcgttaggatactgaacagttttcatatacagtagcagggtgtgcatgacatccaaaggtagggtgtgcctaggaggcatgtgggtatacagacgtatctggaattcagaagagagagacccactggatatgtccattttggagttgtcatcaacatataaatgatcattgaagcccttggaactgggtgagtttatataacaagagagtatagaaagagaagagagcttggaatagaatccagaggaaccccaacatattccacccctccagaacaatcccaatccacgatggagatcgaggagttgctggaagaaataggagggacaccagaagagtgtggtgtcatggaagctaaaggaagaggtttcaaaaagaaaaaagcagtcagttttagatggtgctgagaagtcccctaagaggcagactaaaaaatgtctgttgctcttagtgacatgggagtcgctggatatcaaaggcaaacagttttggtgtcagtggaatgatagaagcaggagtgggattacagtgggttgaggagttagtgagcaattgggaggtagaggcaacgtgggtaggcagctctaggagtggaggaggtggttagttagaccgatccaagcttagggtacagcaggctggtgaaattgaaggatcccaggcaggggagttcaggaattggccagaagtcagtggggagttggacgacgggccttgaagtgtgggccgaatatgaaagaagtaaggaaaggaaaggcattctagggagatttttgaagatcaaataatgggtttggtgggagtaactggatgggagaatttaaaaggtgggaatgaggtttgaatataacactgtagagatagagctcttcttggtgatgaaagacatagagtgttctctataagcacctcctagagggggcctaagtgcagctcatggtacctgtcttagtctgttttgtgctgctgtagcagaatgcctgagagtgggtaatgtatacagaacaaaaatgtatttggttcacagttttgaaggctaagtccaagatcagggtgccagcgtcttacaagggccttcttgctgcaccactccatggtggaaggcgagagggcaagagagagcagagcacaagaggggactagattcattttttcctaaggaacccactcccttgagaacgacattaatccacgcgtgagggcacagcccccatgacccaaacacctcccaagaggccccacctcccaacactgctgcattaagatcaagttttcaacacaggaactttgggggacacatttaaaccatagaagtacctaagttaaaacaccacagcccactgatttaaatatctgtaccccacacccttcttcacccagccactggatcagtgttctaagcagctactgtttctccatcccctaatcatgtgacactgtgatagacattgttcatatattatctctaatctgcccagcaaccttgcatggtgggtactataactctaatacagaaaggaaactaagacccagagatactaagtgatttgcatatgattatgtagttagtaaataaatggaagagtcagaatttgaacccaggtgtggtctgacttcaacaccgaggctctttgctttgtacttctcagactgtaagcttcttggggccaagaagtattttcttatcattgtgtagcctcagggtttgattcctatacagaattgggactcaagaaatttgaggtgcatgagtgagtcagtaagtgagtaactgagtgaggggtacataaagtaactctctaatgctgttccccaggggaaataaagcaccaccacccaaagagagaaatgaagagcactggacagaagaaaggaagagcagaaagatttggccatcaagcgatgctggtgttgggtagctagaacagaggtgtctctcttcactactgtttctaaccagggtgctggacagcctgtggttggcctgagagagtcagccctaaggcctccatctgccccagcatcaaccccaggctccagagctgtcaggcagtggcccaaaaactccagaggaggagctgaaaggggaggtacctaagaaacaaaacccacatgggaggagagaaccccaaaccacgaagtgacattctacttcacgtttccttttagtgtcggcatctgaggctggggtttctctccagaccctccttcagagtgcccagggttggcgtgtctgaatgtgtgagagtgttgggagggaccacgctgcccatgaggagcatgcacaccacctgacatgaccttgaactccagccagatgcctaccagacactcgtcttccttccctgaaactgatttatagaatcaggagagcaacctacttgaaaggagggtagttccagatgtgggggtaatgggaaatgctagtgggcaatgtgctcttttattttactatttttctttatcatatcatattcctctctctccctccccaaatagcaagaaggacagtatcttccttccaggctttaaaatcccttgcgtgcagcctgacgttgcctaaaagcctctccctcaggcctacggactccctctcattgcttgcctattcagtaagcctataaatttactgtcccctgtccaccaccatcaccaccagcctgttgtggcagggaaggtggcctggtgagcccagtggactccagcaggactgcagcaaggcgatactgctttgtgcagcagccggagcagcgctgtccctgaggtctgcaggaaagtcctggggcccaggaagacagtggcccatcacccccagtattgcacatcaggtatcccccacctgtgtgcaccatgcacacccccaccatccacctcctgggccccatgtgctgggggaaggtgtggtcagcagacaggggaggatgtcatgctgacggagccccttagaacaataggagcttcacaggatcacaaagcctatcccccctcatgttacagaagagttgaagtccagagaaatcaaattcatttgtgcaatcctttatccatctattcgtccttctctccatccaataaatattcattgaacacctgtcagaaccaagagatagagtgctgtataagagaagtgaggtcgcagctctcatgcagctttcattctgacaggtggggaagacagtaaaccttgaacttaaagcaagtctctaagtcttgtgggtgtcacagctgaagactaaggctgggcctcctgtagtgtcctttgcaaggccccatactccctgcttcctgggaggccaagcatttagtttggctctccattgcagatggagaagtttgagggaataaataccagtttggactagatacttctgggcggcagaagggtacaggtagtttcagaccaggattggtttttaattttttaattttggtaaattatatgtaatgcaaaatttgcatttttaaccattttaagaggacaattcagtggcattaaatacattagcattgtcatgcaaccatcaacacacactgtatctccagaactcttatcatcccgtaaaacagaaactccgtacccattaaacaccaactccccattccttccctgactcctagacagggattcttaacttttttgtgccattggctccctgggcagtctggcgaaacccctgaactcttcctcagaatcaggtctctaaatgcagaaagtaaaatacataggattgtcatggaaacttgaaatacaaatatcaaaatattttttaaaaaccatttgtaatatagaaatatgtgtgattctttgttatcccattaaccaataacatcaggctgtaattgaataactaccatatttttgcgggagtggcttgcatagatgatattttgagatgactgcaacatttctagtgcagtgtgaaaatacctgtaaagtctaccggtgaccaagtagttaccagtactgcccatatgacttgctggttgcttatattcctaatggaaggagccactgaatttcagttggaggttggtgaaaataaagatgtcacttttttcccctctctgagttcaccaatctcctgaattctgtccctggacagcttaggggttccgtggactccaggttaagaagccgtgcctagacctgagctcactccccttttctgcctagaggggcagtgcacagtgcacggggctgggagcgtgttgatacgtaggatgtcgtgagtgaagcagtccctttgcagggcatcacaggagcccagccaaggggaaaaggtgcccccactctccccaggccgccagcctgctgtctgaggtgggcggggccggtgccccctagaagtgtgccttctggcagcttcccccgcccccttccaccctcttgtccaagggctcaatgcagaagggagccatatggtcctttgtggacacattttccctagtacagtatcttcctggtgtgaatgcaggcctggcgggcgccctggtgtcagctgtccctccccttccctggcgccccatcccccatagccagcccagagagtagcaggttgtggggagtcggggagccctgcagagtcggggtgagtaaggagtctttcagtaacacccacacacacactcacacagaaaactgtggaagtgaagtcaaacgtctcaaagtcagatccctttttggtatgaatttgctgtgtctcattctgggcactaattccaatttaattgcgagtggcctgaagcctcttcaataggagtaacaaatggtttgattttgtaaacttcatcagactgcattttaaatgcgacacagtagcccaactcgaatgccaatgaagcactggagtagctctctgtttactaattatccgtttttactccaagccacgctggctggcttgtctgattaaatcggatttgtgggatagagaacagctagcagagttttctctatagtaaacgagattgaaactatgggccgcctggctgcacactgtaaattatatttccttttaaaggggacgtgtctcttttatttctctgtcatccctcctgcatattaaactttacggtacagaagtatacccggctgcttctaaatccagcctctcaccctctacctggtagcccactctcactttctgtgatttctgtctccttctctgaaggactggaaaggaaattcgtagctacgttctctgctcctttatctttttaacccttttcttttcttcctctttattctggaattggcttttcattattccattattttcaaagatacctgtgatgacatggatgcttagaaactatattgagttagctaaaagagagttctggcaacagaatttaccaggacctaacacagactgggttttagctttttagaaggatgtgaagatgggtggtattgggccggggcaggcaggggttgggcatgaattggtaatgatagtttgaattgtgaaaaaagagtcaatttctgaaaaatcaaatgtgttcctttggttcacctggaatgatgaaatcccttcctctgaacgcagtgaaatcagaatcacctgatttctacctgtggcccagcggagaaggccgtggggcaggtgttggaagggtgaacgttggtggtcccgccctctcggttgaagcccaggttggggcagtgggtgtgtcctctttctactccctggctggttctgggtctgacgtagagctcctgggctcgatttattgtttattcctctgaccctaggaaggcaaaacaacctctgtccttggtccttcctgtaatgtgcacgtgcatgtgcaacacacacatgcacacacatgcaggtacatgaaacaaacgcaaggagccctgaatcaggtgtaatcaggctgtgcgtacattctgccgttgctaagaccaactccatgagctcgacctgccctgccctcattcttggtatctatgtatgctctgggagcttttttatattttaatttgcttctgaatgtcctgcagaattaacagtatctgtctgcacttttccctttttggctattgtgtgccgtacagtacgggaaggccgcatggtgtctctgatattgatagcctggttaccgtgggaatgaatggccaccacactctcaggcccacagccctccttttaattgttgacagtaaaaagcatttaaatgctgcttaatttgtaatcatcttctgtggggggggggcgggaaggagaggagccattaaaatgtcagtaaaatgaatacatcctctccttttttgttattttgttttgcttatttatatggggtagtttttcttttcattgcccagtgtttgggagatatttaaatggcgctgaaacaatcagtatttcgttttattttgaatttctgtctcgcccaacccctgctcccctccccactccattctgtctccctgggcctttgtcttgcctctgtctctctctcttttctgtctgggtctcctcctgcctcctgcctctgcctccacctccctatctctggaatacattggggtttactggaaattttacatgagagcctagctgaggtttttgggtttttttcccccagagaacctactcctgggctgcagtttctctgcaggggcctcaggatgactttgggaatgtctgaaactagagagagtgaccatctatagaaagcatcttttacatgtgaagtatactggagatgaaagagtcctggggataacttattgttcagacaaggaaattgggtcttaccttcacgtggaaactccgtgcctcccgtgaagctctggacacacagccagaatgtaaatgcctactatgtgttggacactgtgctcttgtaatgaaactgctagattcagagggtctggttctctgacttgctctctatatgggctttcttgggggtcttctctatcattctgctgctgggggcttgggagagaaagctccccctccatattccccaccccaactgctcagccctcacctggcacagagaggcttcaggtactctcagacccagctactcaataattgcctctgtgagtgttcagccagttctaggaggtcttaagctgctaactggtagtcccctagaaaagggacctagaggttctctcaagtcctgtgaaattttcccatcttcctaaaaatccccatctcacagtgctgcttgagaaaggttgaacctagattggcacccagcaggtgcccagtcaatgttggatcctttctttgccttgtctgtgactgtccctctgtcagcctaagaatgtggttccttttagttaaagagattctctttagctaaaagaaggctgtgaagtctgactttgaaagagaaaatgctgacgtccatctcagtgggagaaaggaccattcaacctgccagcaccctcttcaatagaattgttgaatattagagtggagaaaaaccctttaaggatcacttatatccctcttcattttactgttgaggaaactgaggcccagaaaggtctagtaacccacccaggagtgcacagcgagttagtcactgagccaggacttgaggccaggttttgtactcttgttcctgttcagttgggagtctgcagtaaaaagccacgtgagggcaagaggatggctgggatgtgaagatcctggcctgccctttcatgctccgtcccgatgttcccccacccgctttggggcttcttttcctggaagcctctaagatcagctgaattcgagaccaagggacccatatttcttgcagtgctcatgcaaccttgcagagggttacaggcagaatacatgccagggaatggacttaggaagaaactgattgtagcttttggtttatttgctacccacctacccccaaatgcaggaagtagggagccctttggctttaggaaccctgagagtaaacaggtgcctgtctctctcctttgaacttcatttctacagaacaagcagtgtagagaaaccgaggaaaacagttctctgcatcttgggagaagttgttgagcacggggccctcaagtcggcaccctgcctacttgctccatcccacagtccatcattctcccagcctgatcccatctcagaggcacctctctgccagaacgggcagtccctgagagaggcttccacatcagatgccccacccagggttgggctgggttgggttgggctgggctaggctaggcttgctctgcagagctgggctaggttaggctactgcaagctgcccttctcctctctgggttgttgaagttggtccgatttttcaatcgtgggccaattagtttcacaaatgggggcccccgtggtgccagggcacatttgttccgggcctgcgcactggccaggccccattgttctgcctcccacccccatgtgggcccattgtcctcgcccccagcgggtgctgcttactgctgatttatacgggcaggcgtcctgcgggctccaggcttctctgccacagctggcggaggtgcttaaggccttggaccccgtgacctttgccctagtcctgctgtcattttgaaagttacagaccagagggctgcatacctctccggatttactttccaccccaactcatccccggccccacccactctactgcacatacgcatgcgcgcgcgcgcgcgcacacacacacacacacacacacacacacacacacacacacacactctctctctctcacactccctttccttcttcctctgcttgctcttggagaagttttaattcattctggaatgtctggaagggtccagccactggactggaaaccaagaagaaggagctgctggggcaggtgggaggtaccagcggaggatattagtctctgctgatgtgcttggaagcagctacttcccggaatgtggtttttaatcctcggattcattagttccatatctgatgctgggaggaagggaggaggatgttgctgtcggtgtggcactgccagggaatcaggacttgatttggcttcttgcaacttaacatgcccccttcctgccagaggcccctgcaccctagaaagggcaacgcagcgtaggaggtagattgaatgtgaaggtggttttgtagcccagtacgaaaatgcagatcttgtcccctcttaacccgtttattctctctctccttgcaaaccaaacttctctcctcctttttttttaaaacctccttccctttttttatccaccccttttcttgtccccctccctcattttctccccctcttgggctggtttgttggagtgattgacaaaattagtaaatccattcatgttacttttattgtgcaggtctcaataaatcccccatgtccagggcgcaccttaatgagctagtgagctgacaaatttgtttactgtagctggaggtgccgagtaatgaaatgcacttgtgtctgcagctcactgctaaacaaatacacggttttccgggagccagctctgctagctgctgctgcctgaggacacagccacattccccaagagactgaaagttgtatgtgtgcatatgttttgaaaaatgtaatcactctctcatccattgcttagttttaaaacaaatctgaatcagctgctcaaactcctccccttttttgttatgcaatgaagatgcttttgctcccttgactgacggtattgaaaccgtaacattccccttttctcttgtggaaatggaatgtcatacagatgtatagatgccttccatgattctacgcagataagaaaggaaggaaaaaggggcagagagggctggataaagagacctaaatttgacaaggacgaaattgacaagtgatgctaaggtttttggctcttagcttggtttgggaagatgtaactgaacgcctcagcagtgggtgactctatatgcaggagacaaacacccatgcatgagctcaaagctaattgagtttgagacaagtcttccaagatggtatctttgtgtattctaccccagtaaaaggaactggggaacttgtctcccactcaccagcagctgattggagtttccagggttcggtgggctgatttggccttcattgcccacatagctagccttctgaggaacgccaggagtacagtagtgcatccctaatgatcctgaaactcatgcccaagaggaaaaccagagaactaaagagagggctcttggccatttgtccagtagattccttgaaaaggaggtgagtcctaaatgatagcacaggggaagtcaaaatggaggagccactcagattcaagggctggactttgttcctttctgtctattcctcaccccaccccagccttctccatccttttaagatgcagacagagccttccttccttgggtgggagtcagcctgatgctgcttgcctctgcctctctttctctcttgccgagtggatggtacagccctgctacctttttcagcagcaacctgggggcaaagggaggagaagatgggcgaaaggaaaaggcgtcagtttatatgatggtttgagtgtgtggtcacgaaggttgcccatgctggagatggtgtcttaggaaagagtaatcccccaggatgtcagagggagcagaaagacatatctgaaggatttgggggctgggggtggagggagggggaagtttctagtttaaatcaaggttttcacaccctcctaaatttgatattttctttctgtggggagaagaagctttcggggtggcaggggaggcagtccttcctttgttgggtgaggttgggtaggattggacgtgagaagcccctccggggtacatgtgcatgcacgagcacacacgggcatgcacacaccccagcacatgcacacacagcagtcccagcctgcttaccaaaaaaagctggagtatatttagatccctctgctcctttgattaagaaactgcttatagcaggagataataagagctttgctccaagaaggtgtagcacctgaacatcttctccagctgtgtacccctctgatcctcttccttcccatctattaaagagataattggtatggaaatggcacaggtgtaaacatgaggggttttgtgtttcataatttcagaccccgtcatcacctgggtgaaataccctaggtctgtgtcaccccttctgcctactattccaccctggcctggctttctccctttctctctctttctttctttccctctcccttcctttctttctttctttctttctttctttctttctttctttctttctttctttctttctttcttttctttctttcttttctttctttctttttctttctttctttcttttcttttctttccttccttccttccttccttcgttccttccttccttccttctccttttttttttttttgctaaaattaagcttgttttaaattggaagactttgagtcatacatgccctgtagtcaaaactggcagtgttgccactggggggtctggtgtgggtcaccttctctggagatagaattgatgcaaatgtggtcccagatatttgcatggatcctgcccatattactaagagtcatgttccttgagtctcgatagcatcatcctttctacatgcatccccttttcctacttcagattccctttgagcagataccctgggagtccaggctaagactgagtcccattcattcttcagaacagcagaggtgctaattccttgacctgaaaaattattttcttgggtcaaagctgacttatatatctgatttacattgaaatgtacagattgatagaaaacaatacatttttaggatttacataatcaaaaacatttgtcagttgcatcataacagggctatgaagttagggttggaaagggcaggttagttatgaattctcttatcctagatgaagaaaccaaggttaaggacaaccactgcctggactaggatcacaaatccaagaagggctgtacctctgggccagaattgggatctttggactgtttcactgtataatatggcaaaactgatccttctatggtctgggtttttgcttccgagcaacagagctcagacatggagtgacaacgaaggagtcctgtccagcccaccagacagacacggggggcctcagtgagatccgctgcctgtgggtcacttgtcattactgatttccaaggagagtcttgttggatgctcttagtagtggtttcatttgtggactgtagtctgaactttcctcatccctagccctctgtctgtaccatgactctcctcatacctcctcctctaccctttgtgattgtcttacaaccccttatttattttctaattcaacatgcagttattaagtgcctactccatatcaggctgtgtactgtgtgttggggaatataaagatgaatacaatagttcctactttggaggcttataatctattaggcagagctgaaagtccaaaataaatgcaatacagggctttacgtgatacaacagagctcagaggaagatggtgttgttggcactgaatcctaagtggtgtaactcctcaaagatgccttctctagggtcagcttcccagaaagtagcagcccaaagacaacaaaacagcttaggcatgtgtattgtgcagggctgccatgactcatgatccaggtcgttcactgcacaagggtgcccagctgaggagggaagatcccaaaaccctgccctctctgtactcaccataaatatgcagccaggtctgtggggctggccagaggaggagacgtgattttctaattcagatgaaggtgttgtttggccatcattggctctgtgaccacattataaagttttttcgtgtggatatctcattcgatgttcttgataaccacagtggcagataaggagcaaatggatctggtgaaaagaatgacttgctcggggccacaaggcaagtatgtgggagagctgggacccctgtgctgcttttccttcccctgtgtcatgtggaccatctgacttctgagggtctcgtttatccagtcagagcacctcccctctccccagtggtaccaggcctgacgtctctccatagcagaggacggaacccaggcgttgaagggagcagagcgttccagtgctgccgggcccccctgccccgccgcacatctcactgcagctaatgaattgctaatacaattttctagataattttatttccatagtcccacattttaatgtgtttccaaaagctagcatttatttgcttaatctcccagtgtaatagaatctgccctgactcatcatacatgcgaacaatcagctaggctgaaacgccagcaaattgtttaataactcacatctagtctctagatttttaactcgcatgcaccaatagcttttcttgtgtctcatccacatctcccccacttttccatttttttaaaaatacttttctatcatcatagctgttagtttctaagcagaaaaatggggaaagtggatgctgagtctcagaggctcccctttcttcccctgggagccttggttggtggatacgtgaccaaggagcacccctgcaccttgtggaatgtcccaggaaggggagagagaccactgtagggacatcatagtgtttcctttccagctggtgaccatatgacttccagcctgttggccagttgtggaactggccatctgggattttttgcgtgccactcctcccttgctgtcccacctttctaggattttctctctccctttgccctggcagcctctgccctggtctggtccctaccctcctccagtggcccatcagccctctcgctgcttctaaccgcttgctgctgctgttggtccccatgtgtgcccagagtcactggcttcaaacacaggtcagatcgtgctagcaccactcgtcttagtcaagtcaggctgctataacaaactgccacggactgggtggcttatacacagcagacatgcatttctcacagctctggaggctgggaagtctgtgattggggtgccagcatgttcaggttctggtgagggtcctcctcctggttgcagactgctgatttctcggtgtcctcacgtggtggaaggggctagctagctctctgggccctcttttacaaggacactcattccattttaattacctaattatctctcccaggccccacttcctaataccatcaccttaggggttaggatttcaaaaaaggaatcagagggggacccagacattaggatcatagcaaccctcggtcctttcatggcactgcattgcctgtagaataaagtccaacctgtcctgcctggcatatgcagccctctgatctgactcccatcaccctcccagcttgtctccatccccagggcctgaccttggccccatctgctctgacatttgccagtggtgtctctctccttagcctggcacatgtgtcccaacttcttgtcctttgcttctcagatactcaacttttaaaagcctaactcaaaatctcaggagctcttggagtcgccctgccttaccctctgggtggttgttaactcagcatctcccactagtctgggacccagtttctctgctcagccttagcctgcccctggtcacctagcacagtgcctgtacttggtagtggctcagtgagttggctgaatggacatgaagtgggttcaggccaccctgagaagtagggacagcatagtggggcagtatcgaggggccttggaaaggccaagggggcagagtgctgcagtctgccttgctgggtgtattgacactcagagcacctgtgggtctggctgtataggctgagatgtcctattgggaatgccattcatgttccctctgcccaggttccttccatgccggggatctcagaggatgcataaggagaagccttggctcttaaagggcatggctggcctccaaagcctactcaaccctactgatttaaggtagctgtttgaacacctggcttaatttgggctctctgtggggtgggggttaagggcagagagggagtagatgctgggggctctcaagttgaaggagtgggggccaccgggcacagaacgcattgcagatgcactgtcctcctgtgtacgtcggccaagcagggagggacattgaagactcactgtcaactcttggcattgcttctgtccagaaagatacatctctcattatgtctccctccagcaagtgaagctgagtagactactcagcatttctgagagaccttggtggctcccagtgggattggaaggcctcagagagctatgccttgtgacccagccccagctactgcccactcctggccaggggttctctagccattgctggagctgtactagaggcaggagtcctctgtaccatccttactgggcctcttccagggtaagcccagacaggcgggcagtcagctccagaggtagcattgagtccagccccgtggtttctgaaagacaaaccgagatattttcagatcccaactctgcctctttctgtgtgatcttaggcaagttatttaatctctcttttacactggtaaaaagggggataagaatgcctgccttgtaggattgcaagttttaaatgaactgacaacatagataaggtacctagcataacgcctagattcgctccccttccttcctgctttttgttggccaggagcaaaatcctgtgctggctgtttttctccttccctgctcagccttcctgactgctggtgagatggggcgtggctccaggtgcttagacttcagtgtctgcaaagggaagggatatcagggtgggtgtgaggggcacagaagtgtgggggacagtgagaggtgggccttgcctgcctactagtccatcctaacccagccatgagtgggacggaggtggtgaggaccagacctctcacttgctatctccattgatggccaggaaggcagggaggttcttcgtgccatcccttctcttccccctaccttccaccagacacttcccgattccatgctgagcagcccatggcttccagcagccaaagctttaccccctccccccacccactctggactggactgacagatgctaggcctacttacgtttcctgcttgtgccttcccacacaggggacagcggtgtggggccaagtgcaggtgatattgcccaggcaccagcacagagacacacagatgggcctgccggggagctcctgtgctcaggaaaacagagcccaaaagggtgggcactgagctgccagttaggactcagacacaaggtcagatacttcctcctgtggtgctgcagctggaaatttcggccatggctccagagcagtgtcagaaagggattggtaacaaacagaaaatggcagcctgtatgtgtggggtactttggggatgaacagccagttagaattaaatgaaaatctcacatcactcgctagctttcaatcctttgacagttgcccatcgggtttaggatggaactaaatctcttgacgtggtttgcaagaccctgcatggcctggcccttgcctttccctttagcctcctcttcttccccagctgcactgcaccattcctctgtctgatcctcccaccggccatgtttcctcctggcccagagtgttcacagacactattccatcttccggattccgccattcacctggtgttctgggtaacgtcggtcatgagagcagggactttgcatgctcttccttggttatatccccagtgccaaaaagacagccttgcttgtagaaggcatcaaataatacttgttgagtgaatggacctaagattcatgctttagtgagtggagaagtagttaaaaaaaaaaaacaaaacaggatctgtagctagtcttgggaaagcattaaaatctagggtgtgtgagtgtgaaccccagccctgccacttacgaactctatggcaggagtccccaacccccgggccatggtctgtgaggagctgggctgcacagcaggaggcgagcgagtgaaactgagctccgcctcctgtcatattagtggcgacattagattctcacaggagcatgaaccctattgggaactgtgcattcaagggatccaggctgcacactccttatgagagtctaatgataaatgtaatgtgcttgaatcatcccaaagccatcccccaaccatacgtggaaaaattgccttccatgaaaccagtcccttgtgccaaaaatgttggggaccactgctctgtgggattttggccaaagtacttaatctctctgtgcctcagtctccttgtctaagggatgaggataacagaggctagctttttgagttttggatttatattagttatgttagaacaatggctggcccatagtatctttgttattgttttttctcgcagggtctaccttgcctcccccactttttgccctgtactctgtgaagtccatctggtatatgctgtcttagtaccttgccgccttttacataccacccgacacagttgcccactacccttgctgctgcgatgtatttgatcaatgtctatcctttagctttagcttccagagctcgggaacgacgtcgattttgcccatcactggggccacatactgggtgctcagtgttgcatagcctgggcccactctggatttgcccctgagcatggggatttggaggtgtgagtcccgacactggctctcactccagatgggtaaagaatgcaccttgtattcccacctttctgaggcaccccctctcctgtctcccacaggcactgacatggccgtcttctgtctgctgtgtgggaagcgcttccaggcgcagagcgcactgcagcagcacatggaggtccacgcgggcgtgcgcagctacatctgcagtgagtgcaaccgcaccttccccagccacacggctctcaaacgccacctgcgctcacatacaggtaggtcagtccagctgatgggtggatctgggtctctgggagccagcgtctatatttacctccaaggacgtaaagtggaggtggtgggctgagtcagccttcagtccttctgctcaaggcttggacgtgcagaggctgcccgtcgtgcaggtaaatgtggacagttctcccagtcccctcctgtggaccgtcggttcaaagtctttccgtgttcaacacaggatgctcattaaaaaggcaggctcttgggtcccactctcagaaccttttattccatgggtccagggtggggtcccagattcagcattattaatatgtattcccaagggattctcatgtaggtagacccaaaatgaattttgagaaaaactgacctgctgggtctcttaacattgtctgccctgcctcccaccactcttgatgccccgccgctctatccatacacatttctgaagtcagcttcgggcttctgagggcaagttgaagcagtgatcctactttccccacagtaacaaaggcctgtacttggaccttaaccctgtttagggaagacaaggagggcatttaaacgatgagcaatgaaatatcactgctcagccagttccaggtgatgggacaagggagggggtacaaggtaaggaggctgggccaggtgctgaggggctggccattccctgccaccagcctctagggcttgagggatggggacacttggtccctgatggccaagaggcatttgctttcctgcagcagctcccagttttccctaacaggggagtggatggcttaaattccttattttctctatgacaaaactggggctctgctgaaactacctggttaaaggaatgcccatttctgagtctgcctttgtgtgctgtgtttgtagggagggttggggtcaggtctctatctgggtatataacagagcgtatacttgtaaaaacctctgcatgccacgtaaaggaacagtaggccctctcctcattttgagagtcttgtcacagctcagagattgagtatgcagaccaggtcttgcatgggtggcaggctctgctaaataagggaagagctttacttctcatggactgagctggcctggccagccagcagcaggtatcctcattaaggagccttcctggctgtcacttctggatgccattttgttcaggggagcacattgtcttagcatcaccagatttgcacagaactacttaaaatttctgggacaggacggaggtagggcccagaggggtgggctcaataaaaagggcccaggagagtgggatgttgacaaggactttctctacagcgattgcgtaagcatttcccctgcagctatatgcaccttcctatgaacgcctccctcaacagttccccaggttcattcggtcttatgaaagatggctagatacctttcagccacttctgagcatgccactgggtccaatcagttggcttcatgtgacttgaatgatctcagtcctgctaaatccacccaggatgtgccctgctctgaccatgccaccttctcagagctcagatatgaaaatgtcacatgctcttgtgtcagtcatggctcagatccacggggaggggctgtttccagagttagggagaagcccttgcttattctaggaaacacggagcatgtgtgctgcctatgcacacacagagaaacacccatcaattttcacaccagcgaggcactgcgcacacaagccatatacaggctgtgcacaccccacacacaatgcctcattaatattccgttgttcttggcccatttgctgctggggccgggtgtttagcatcagcagctgtgtttggtaggttagtccagccgtgctcttggcattgatggatccctgattcacacggctcatcatataataaactctcagctgtgctgaagggaggggctggaagggaggggcctgaggagccagcaggatggggctggggtggggaggacgacagacactgggcttggccagtgccagagaaagcaccaagtaaggacagattggggggggcggggtcacaggtgcactgggcaggctggagggggctctaattagtctcgtttgtcctgcacttaatgtcaagctcattaaagaggctacagagttaatcaacataccacaaattggattttgagttctgcagccagttttgtgtacattatggccacactgacacaatcagctctcagggtgaagatttcacgccaggtgcacaccgtgcttccaaatcgggatggggatacgtgtgtgttggtgactttttctttcttttttttttgttgttgtttgtttttccttctaagttctttttattcttttccctgggcagactcaagaatttcctatttaaactcatttaacatgtgctccacttcataattaaattcctaaaaatcggatcaaacaaactcctctgtcttaaccctttgttttttaaattgttagggacccctctggaggggaaaggcacaggcagccgcccccttcccccccaccgccgccttcacccccacccggctgggtggctgccgatgtacgttttaattaccggctccagctgaagtctcacgtggccttggctttatttatttatttataccttaatgaggatactgaatctttgattaaagtcgtaatcgttgccgattcagtaaggagggggagttggatgtcagaccagacagggctgtgagtgcagacacacggagagagtgggttcgggtgcacacacagactggcccttactgtgttagacacacaactaattagtaccagggtctgcacaggcctccactcccttgagtttgatggggctgggggccaggcagtccgcatggctctggcagtgaggatgggcaggtagcaatttccccaactgagaaccctgggccttggcccatccccagatctgcaggtgagggactcgctggccgagcctctgagccagtgcaacaccccatagattggggtgaactggtgtcaaggcacgatgccactctttgagcttctctcatctgattccctgatggaagtgcccctctcatggcatgggtgcttcttgcaaatcttccacccatgagaaagtcactgatcagaccccagcatccgctcccctcagagccctaaaaacccctcagagccatcagaacagatgagaatttatgtgggtacaggggcctaactttgggaggggggagctttggttagtggcccgaggaggggagagacaggagagagtaaaatatcattttaaaaaggaagtgaaggcacaggcatgcgagtctataacgagaaggacaatttatgcccaggcacgagcgcagtttgacatggggataatgcaaaaacgtaggtcattgtggatgacttaaaccttcagcagctgaagaaaatgtatgaaatgcagaggacattacacggttggcagccccgcacatctgcagagggacaagtgaaatacagtgggccattctttaccataaactgtggttgttggagatgcagcccagagaaattgtaattacagtgacaagacgaatcagcgatatttaaatattcatgaacaaagtctggggtgatcaatctatctttattgtctgcgccttcactcctgtaataaataagtagctggagtcctcacctttcatcccccaagccccccactttggatatgaaaggcaagatggttattctccacaccccaacctctcatgctctggagatttaagagtgggatcctcaaaaaagaaaaggcagttctctccaagtttcatagacccaccatttcctgggtctgttctggatcctccctgtgcgatacactgaggctacaaggatgggtgaggcttgcttcttatcctggtggtgcttccatgctggaggtatggtgggcaagccagtagatacagcatagtgtgtcagcaagctgacaagtatatggtaccctgactctagagccagacccaaacctgaatcccaactcagctccttacttgccgtttcaccttagggatgatgtggaagcatctcatttttttctcaactgtaaaatgagactaatatctttctttaagtttgttgccatgatcatctgatgcgatcacatcacacatctgagtgctcaggaaatgtagcccattttaatgcgaaagtggcataaaaatgataccacactaataacagaacaaaattctgggcatttcttctctttggggacacagaagaaagtgtgattcattctgcctggggaactaaagggaagcgtccacgcgggggtatcatatgagctgggctttgaaggatgattaggagttcaccagggagaaaagaagaaatcgagcagaggaaacagctatgtaagactgtggaggaaggaaattggggactgtagaaggtgtttgggggacaatgtgaagttcctcaaattggagagatttctttgaaggttggggagtcaggctggagtgactttcacccttaacctaaaggaaggggagaagaggtcatctgagaagcaagatggtgaggtctcatgtatccacaagggggcttgctttctggggactgctgtccatccctgaaccaaatgggctctctttcccaggactggcccttgccccacagatgatcatggggccacagtaaagtatggtcatgtgtgaagacaggtattgcttgtttattcaatggaggtgtggccgtggatccttaagttgtctttggaggtggtgaatacaggccgtcgcatccttctcatgcacagaatgtgccctactgtcccctgaagagggggcagggagaggcaaaggcctgatccagccccttgtctccacaggcgaccacccctacgagtgtgagttctgtggcagctgcttccgggatgagagcacactcaagagccacaaacgcatccacacgggtgagaaaccctacgagtgcaatggctgtggcaagaagttcagcctcaagcatcagctggagacgcactatagggtgcacacaggtaccgaaggccagggaggggcctgagctggctctgggacctgggcggaggtgggaagcagatagtctcctagagaagcctaagtgaggatgatcccaggctgaatcaaagagtagaagaggttctattaagagctggtatggtggcctgaggaccaccacaccccagtcaaggtggcctgagggccatcagtcaaggccaaggcagacattactaatcaatcccagcacactttccagtgagcccccatcagccctccaggcagctataccagtagttcagaggtgacatgcaaaatgatgtctgtatatgagtcctgaattaggggtaagttggtccaattagctgaaagtgaaggttagggtaatttcatgttactcaagggttagagtaagaattaggatacattgaattaggttgttatgaaggttgggaagttgtaaagttagattgtgtttggttctgagattagaagagcagatatatttaataatccctatatgcatatgatgttttaccacttcagagtgccttcacattttttttttttagacggagtttcgctcttattggccaggccggagtgcagtggcacgatctcagttcactgcaatctctgcctcctgggttcaagcgattctcctgcctcagcctcccaattacctgggattacaggtgtgtgccaccacgcccagctaattttgtattttttttagtagagacagggttttgccatgttggtcaggctggtctcgaactcctgacctcaagtgattcacccgcctcggcctccaaagtgctgggattacaggcgtgagccaccgtgcccatccacattattttttgtattggaaaaagaaatgtgggccactgttttccctgaggtcaaaagacaaaacaagtgaagggtcttccacagtttcccaagttgggggcagtgaagtcctggagcttgcttgtgaaagctaatttttcacatttcttcacaacttcaagttcagtgacaccaccttagttgcttaaaattggccactgtaggagtattcacatcatagcaatcagcagatgctacaaaccagggctttttggaaagccagtcatgaaacatttaccaccagcacactgctggttgtggggaaggttgatttacagaagggtgagaggtggtggaagctggaaaacaaagacgccccctctgatcaggggagacagctgtcctgtccagaggaagggggagaggtggcttcaggcaggtcctgctggcttagaggagagtacgttgcccttggaggggaagggtggacagaaggagcagtaagcagagctatgtgttgtcagagctcgtttttcgtgtcccagtttgagcccacaaggagagggttgggtgtccgttgatgacaactatagtggcccagaggatttcccagagccctggggtttccttagccccttgtcagggatgtgacctggcaggtggatcattaactgtattggcagtgactattgtaaatagctggtcgatagttagatcactttggctgttcattacttcattatttgctggggcctgtgcgcgggggagtattgatagcgagatggctggccagttaattactgtattgaaacaaggttcccttacatcctctgctcagctctaggggactctatggaaggaaagttggggtatagaacgctagggtgtggctgtgcactcccaggttctttatccctcccatcccaccccacccccaattccagcctcaggagggaggcagggtccagggcaaggtcttagcggttttagcaggataggccgggtgggggagctcatgcctataatcccaggactttgggaggccgaggcaggcagatcacttgaagtcaggagttcaagtccagcccggccaacatggtgaaaccctgtctgtactaaaaatacaaaaattagccgggcatggtggcggcacctgtgatcccagctacttgggaggctgaggcaggacaatcacttgaacccgggaggcagaggttgcagtgagctgagattgcaccactgcattccagcctgggtaacagagtgagactccatctcaaaaaaaaaaaaaaaaaaaaaaaaaaggccgggcgcggtggctcacgcctgtaatcccagcactttgggaggccgaggcgggtggatcttgaggtcaggagatcgagaccatcctggctaacaaggtgaaaccccgtctctactaaaaatacaaaaaattagccgggcgcggtggcaggcgcctgtagtcccagctactcgggaggctgaggcaggagaatggcgtgaacccgggaagcggagcttgcagtgagccgagattgcgccactgcagtccgcagtctggcctgggcgacacagcgagactccgtctcaaaaaaaaaaaaaaaaaagagagctttagcaggataggtgtccccaggtgcagcatatttgaaggactgggttccctcaatttccccccacccctgctccccaccatctgtagccctgaaaggtctcgatccacctgctctctggacggaactgtggcttgaagagccattcctgaggactttggggcctttctctttctagacacccattttcttaattagaaagggaaaagactgtggccttgggagagttaagaatagtaagacaaggagctgggcaatccagtagtcaactagctacatgtagctatttaaattagttacaatgaaataaaattagaaaactgtagagctgcagtcgcaccagcctcattcatagccatgtgtgactggtggctgccgtcttgggtggtgccttcattgtcccagaaagttctgttggagcaagcccagctggaggaacccagcttccctggcacgcctgagggtgacatggtgccctcaccgccttctgtctgtcctcactttctcctgccctgtccctccgccctcaggtgagaagccctttgagtgtaagctctgccaccagcgctcccgggactactcggccatgatcaagcacctgagaacgcacaacggcgcctcgccctaccagtgcaccatctgcacagagtactgccccagcctctcctccatgcagaagcacatgaagggccacaagcccgaggagatcccgcccgactggaggatagagaagacgtacctctacctgtgctatgtgtgaagggaggcccgcggcggtggagccgagcggggagccaggaaagaagagttggagtgagatgaaggaaggactatgacaaataaaaaaggaaaagaaaaaaaaaaacagaaggaaaaggaaacctggtagctttttggccttggattctctctgggctccagatgacctggatgccaagccactgcccctcctctgggggcctccaccctcctctcccggctggaggtttgcctgattttctgggatggggttgggtattttgttcactcaaatggtggcacatttttctccttccttcacccagaccttcttttatgtgtccagaaatggaggctagaaagcaggtgagaggtcctctggtcagagccacacggtctgtgccggccttcctccaccaagacccccaggagatgaagggagggaggaggtgagccagaagggcgctcccctgctgatgggtctgggctgggtcactagctgctcaaaatggcagctctagtttgctggcggctgactggggaggagaagggctctgtttctcttcccaccactcagcccacctgctgctttcctctgctttgccacatctgggtgtcccccggtggtctctgagagcctcaggacccctgcccctcctccagctctttgttcccagcctccccttgactcctgtcctccaagtcccaggggagtcccagcccctcagggacctggcggtgtctccatccttctccggttccctagtgggatagctgcctctgacttcagggtccctcctaccctcagccttctgagaacacaaaacaaatccaataccccaccctagtccagcaccatcgtgagcaagattcctgctgcgctgcttccaaaatggaaaagcatcacaactaaatacctaatatcctaccaaacaaaccacagtccctacgtagccctacttcagtcccaggagaaggaatccatgaatgggctgaggttccgagggtaggttgtggatgtctttctctagaggggtcccacacctggaaaagaggacacccagcccgtgggatgagggaagctgggcaagggagaaagttgttgagtcacactggggaccccagatgtagtgagctcagcaagaaaagccaggtccagagagagtcgcacagaattcctgactcacagcgcccctcggtccacagtggagaggaggaggaggaggagcagaaggagggggaggagctgcaggaggaggaggatttgaaagcgctttggccttgtgttatgttttgcttcttttctgtgtcccctgttagcacattgtacttgaattacctcagttttttgtgacctcatgagctttcttaacctctgtatctctttttcggttggggcttggaggaatggggagggtgttcttttctgtttcttgtgtaaattaatagttgtttttatagacttcagctggtcaagaccctccccgtgcccctggagaccagcctcccagctggcaggaactgtgcaggaggagttgatactcaggatctgaatgtgagggccgaggagggcgaagagcgtgggtggggaggggatgttgctttggggtctcatggtccccagagggcactagggagtcac

SEQ ID NO: 678 - DNA, 812180 bp, Homo sapiens
  source 1..812180: mol_type = genomic DNA
acaaagcatcacaaagaacttatgaaaaagatccaagttaaccaaatgtctaaaatatatgaataaaaccaatttagtcattacagagttgtttgtgttggaagattttccctcgtttgctgcacagtttttgtaaataaaatgctgacaggaaaattagaaggaaaattaaattaaaatgtaatgtaattttgaaactaaaatacgctctcctttcttctttttaaaactgtagtttggtgttttgctttgtttaaagatttgctttcccctaagtatgttaaaatatgcccagcaatgaaatcactttgggagtttcagctaggtttaagaattcctatatttgagctggaatcccttcaggacactgtctataatgaaaatgtctctattataacaccttgatcaggaccgaggagagaaatccctactaggaagagagagtggcatctggtatgatgcaatagattggtggtcttttgaatggtggctgttggcatctgggaatttttttgttaatttccctaaaacctttcgaagaagcaagggttaattcgtcatctaaagaatgatcatcttattcagccctcttaaccatggtggaaacagtcagaaggtgatatttggaaggaaaaaagtaattttggcatcaatgcatcttgatctataacaggcttctcataatgatgctctttgtagttgggaagggtgaggagctatggcagagttttgtgaactcctcttcctggctgatcacaaaagaaaagaccccatttatcaagacttctagactattagtgtttcactaagaaaaaaagtaaagtcaatagaaattctagaattgtaagatctcaatgaaattttggagaagcaagcaatctctttctgaaagataaagtctcttccatgaaaaagaacagaattctagatgaatcagttgaaaaaattattcagtggggcaacttaagcttgctaaagtcaaagaactacatatcaaaatacaaagcagcaattcaaattacagcagggatgggctggccacagaggccctcatcaacccaggcaatacttaaaataataaaaattaagaaaaattaaaaaaaatatgaagaaaatatccttcctctctttcaaatataactttagttgccttttattctttctatctggaagcagtatcgctaaccttaacagtcttgacttaccaaaaaatatatatatgtgtgtgaaataaaataaaagagaaggaattggtggcagtgtatgcaaaaccaaaatgaaaaaaattacttttaacaatttcactttttttgtttttttttttacacaaatactgttgtaaatatattaaaaaaatcagcattctatctggtaaacgtcacttttgcccctctataaaattttgaattaaaaaagcctcaagaactttttattgttccccccaccctccatttctttttctttttctcttccacaagaatatatcctgacactttttttttttttgcaaagattgttggaaataatccttctcttgtacctagaaacataggtgcaaatttctgatatctttgttttatctgcattcctgcctttcatgaaagtccctcttgattgtgctgaggctgtggctcagcgaagacactgaataaatacgatagccactgttgcttgttgcttgtccaagtcttcctggcttctgctgcaagagggggatatggagaaggtgggccagggtgtgtggacccgggcagaatctggggaagaagcctgccattcgtctttctttcccacaccaccgaacccactgcccttcccacccccacagcccttttatgaaatcagacaacgtggtaggtggaaaacagcagggcctttcctctgggttttcaaccagaagtgatattccacagttttaactggttactgtgaagtccaagcggccagaattgtgaaaatgtccactgaaacactgcaagcggtgtacttaaagacagtaggccttttagattttgttatatattttttgtagtgctcttcacaagtggaaattttttttttttttttacttttttttaaaagatttttttgtaaagaagggttgtatttagaggccagtagctagagatccaaccagtggacctcttgaagcactaccaggccttaaggccaccatccgagggagactgggaaaactattattcacccaagcctccggaaatgtaatgtaccagcaggcaaaaaacagttcttcatgtagtacaaaatgaaacgaaacaaaaacaaaaacagaaagtaaaaatgaaaccaaaacatttcttaaattctagtgccatagcttttttgtttgtttgttttttgttgttgttttgttttgttcataagaaagagagaaagatactacttatccgtcagacacatgcatcctcatgtggtcgttgaactgctcgatttggtcaaactttgctgggcagacggagcagacgtaagtggtcccctccgtgcaggccaccacgcctggggggccagcgcgggcacctgggggtgtgcctgcagggggggtcccattgctggcactgtgcagggccacgtgtcgctccaggagggtcttgtgagagaacttctttttgcagatgtagcactcgtaggacttctctccccggtggaggcgcatgtgcacgttgagggagctcttctgggtgaagcgcttgttgcagatactacactggtatgccctcactcctgtgtgtgtcaccatgtgcttgataaggtaatcctttaaggagaaggagcgccaacagatgctgcattggtggggcttctcacctgttgatgtaggaagagacagcaagcaggacagagcgagacatagcaagggatagagaatgaaggacaggaaaaacaagacaacaaaaaagaaaaataaaacaattaaaaaataaaatttgattgcttaatggatcatcctcgtttggaaaaatccaggccctcctagcctctcatgtgcagagaaattttgctttatggtgatgccaggacagttttgttttccatttccctgtgccataaaacggctttcttggaaagctaccagatattccccactaaaagtcttcaaggtcactccgtggaaaagggagggctacttttgaagggggtcactttcagtgtcctgattaggggatttagtgtttcccattaacattatcaaacaaatagaagaaataagagagaagaaagatcgttggagacatggggtgctctagaatccttgagaactaaggatattggtcactatagcttggttccttggggtaagtccccacttctagtagtctaagaaatacacctatgtgttgattgtgagtttggaaaatatttgccaacacaggaatacgttattttgaagagctatactttcaagtttatctattttagacagaaatctttctaaaatataacttaagggttaattgcctgttctctattgactgtagtgagctgcagattggcctcatcgggtgtagaggctgagtaggcggtgggcaacatgatgatatcagactcaaatgatcctattcaaatctgggcaccaacacactacactccactctgacaaatcaccaaatgcctctgaggtatacagtcctacttacctcattgtgctggtgttgacataaaatacatatgaaatcactttgcagaccaccaagagcagtgtgggaatacatgcatggtattcttattacaaggatacctcccacccccattaaatgcttccatatgccttttgaactcttgggtcaatttttaaaatagttttcctgcgtcctcctttgctctcagcctgttggcggaaacccttgtttttcctcagtttactgctttggtttggcttagaaaccaaatgatcaagtttgttacaaacagtaaggtaaataataatactcagtgcatgaggtattcttaaagtccatgggtccgtgacatctctttaagatgattacttaaagacttgttttctttgtgctgtttgttctcagctctgctcctgacaggtgagatgaactgcgtgtttggtccatctctaccacctcattcctgactgcccagtgtaggccctcacctcagagaaaaaagtccttccatgatccaaactaaaactgaaagcctctgaaactccttaggataatatttcaacatttggactatgcatcaaggtaagaagtcttttaaaatttgagctaacttccacttaaaatatatgccttgactgtttttcattttttcccattatgaaataggagagctttgatgtattatggtaatagcagcaatgaaaacaatcaccatgtattgagtgcttactatgaagcaaggttggtattaagtgctgactatgtagcagggttggtattaagtgctgtatgttcatgatccattttattaaactttctctcatcaggaatttgttgttattgtgttttcaaacataaacagatatgttttgaagcacactgaccagacagtatgctgcgtaagatcacatggttagaagataattttacttttagattaaaacaggaaaggttagggaagcctcattgctaataatctcaatttgctgaagacttcagtctatgcatagtgtttacattggtaccttttttttttttgaagtaagagattccctaagagagacagtcatgcatgtttttagctgaaacatttctgtcagctgtaaacatgcctggaagtcagctggtctttgctatcctcatgctttcagacgatttatagaggctatgataggctggccaactatcatttaaaacatgtccacctgtcaccttttatgggaagcgtgccttaaattccagatggtattttggctgctaagaagttgaaacttcacctatgttaaaatgctctgctgtttgaaactttcaccttctgtgtgtttttcctcgaggcaaggtcactgatgaagactttattttcacactcttctaatctgtctataaattgattcctcatagttgtcatgtttctctctatagcatatataggtatgttgtttgtgtgcatgtagtattggttctaccattaattatccatgtgaccctgggctttttaagtgttttcatttctctgggtttatttcattttctgtatgtgaagagttggaccaggcagttgcacatggtcctttgtggatttagtggtcctgagtccgtggtggactgcaacccctgaggactctagtcctggccttgtcagtgaatgacccaagggcaacctacttagtcactgaatgcattaacagtctcacattttaaataagacaaagtatcctgttcccttccctgccacagaacaatggtatgttacttaataaagagaaatgtttgcaaagaacttgggagctccttaaaggaaggtgctctctataattattaaggtgctgtgatggtgaagtgtaggtatttcagaaactgtcttactaaatggggtatattttcagattagtgaggtgctcacaactttcatttctgtatgaatttgaaacgcagtcactcagcaggaatgaatgattgtgttttaagaaaattttttttcccactattttcttgcatattacttacagcaatcccaaaatggttttagacattatgcataaaatggatgaggtctgtcgattgttgctctccaagtaaagaaacaaaaagtgaagataaatggtcagagatggttttccaggtttaagcctatggtcaggaatggcaagtctgatttgtcagaaggggacacaaagtaaaaagtggataattgaattataacatcaaggggaaggtcatataagttccttcactttaaatgatccattttgggcctatacagatgtaggagtcagatatgaattccatttccttggctgagtgacttgggcatgtcatttaacctctataagcctcagtttccttatctataacttgagaataatatagtaagtacctgtctcgtgaaggcgttttgaaaattgaagagataaagcacttagtacagagcatgtggtcattttaagaaaaattaaactgttccattcatcacaaaggaaccaaggataaatgaaaccaactgcaaaatgacttgcatggcatatggaagtcaatcctgaatttttaaaaaattatttcagataatcagtaaaacaagtgattatattgcagctatgtaattcagagttaaaggtatcgtctactctctcaattacatatgcgaatggcaagaagtggtatatggataaaatgtcagcacagagcacagacagaggatttcctaggaaacccgtgactgagcactggaggcacagaaaccaaacagcaagggaagaaactgagggggaggcagtgccctttactgccttgccaagggtgttgggcgtggtaaaagtatacgtttttctcaatttttcaatgcctgctcatcaccttcttctcaaggaccagctctgacacttaactctaccatgactgaaaagtgaaaaaaaaaaaaaaaggaagaaagatcctgcttaggttagaagatgcagagggttctgcctgaagctcacaaagttcaagtaaaagccatcctaatgggtaaagacaccccaattttgaataggaacctcttgcactgggggctcagcaagaacccacttattctactgatttttttcccctcattttaaccaaggcttctcctgagctgtgaaaaagacaatgaatgctgttatcaggagatttttcagaagcactgttcctacctgactctcctgttctctctgcctccccatcatctgccctagtacaatgccctcctctttcgtgagtacagtgatgggtcaaaaaaccaagacagggtgcttgatgagacagcaggcagcaaggaaggaggagaaagaggagaaggtgggtagcagaaggtggccactggtgaggaaagcagaaggaacacttgaaagtccaggtcctctgaatggggaacatcaagacacgaccagaaaatggggaaggttccatattaacaatggaagtacattcagatggaatcatatggagcttttactggctgcagagtctagtctccgtcaagagacgtctgtttaaaagggggcccacacggctgggcaccgtggctcacgcctgtaatccctgtaacttgggaggctgaggcaggtggatcacctgaggtcaggaggccgagaccggcctgaccaacatggtgaaaccacatctctactaaaaatacaaaaaattagctgggcatggtggtgggcgcctgtaatcccagctactcaggaggctgaggcaggagaatcacttgaacccgggaggtggaggttgaagtgagcagagatggcaccactgcactccagcctgggcaacagagtgagactccatctcaaaaaaaaaatggggggcccacacacctgagatatcagcggtgtgattgcctgccagcctttctgttcattccctgggatgtgatcctgttgccagcttggactgtgaggctaagagggactgcctattgggaacatgctgcattcacaaaatatctgtggcttcagtgacaactaagatattttagttttaagcagaactttggagagtttcatccatgctacttgacttttcttaaaattttgtgaatagagtggatattaacatccccagaaaatagcatctccaagtagagagttgtactaacatcttgaaggtcatctaagaagtcagtagcacctgagagtataatactagcccaaccagattatcttcctctcccttgttaacaactccttgttctctggattatgctgcaaaatgtatgatgctactataacacatattaatggctttgatagttttacagcattcataattaagtgttttcacataaattatgttattcaattcaaagagcaatcatgtaaagtaagtactacagatctgaaaaactgaggcttaggtcagttacagaacttagccaaagtgactcagccagaaagtggtaatatcatggccttctcactccaagccttatacttgttactttacacccactggcttgatataattaatagtccaagctccatatgaggattaacacattatcttcatatgactattatggcccaatcaccaacattgttatgctactattgttactatgtctatttacactgaattcatggctgaaatagctgaacttctcaaagtaataagcaaaattaccgtatgtgcagaggataccaatgggctaaaaacagtcaccagtgaacgggctgttgataatatgattcagaaaacgccaaaatatttatctcttgtgggtaaaaaaaaaacacgaaagtgtgaacacagatatgtgtacaatatattctatagcaaataaaaaaagagaaaaaacaaagaaatttaaaactcttgctgtgaaaagaatgtatctgtgtataagtcccttgaattaaattctcctggaaagcgtgttcacattttaaaattttcttttatttattttatttcaatagtttttggagatcaggtggttttcggtgaatgtgcacattgaccaaatgaatgggcatgtgaaagtgtgatatacatgtatatatacgtgtgtgaaatgtatgtctctgtgtgtgtgtgtttccgctctcacagagtttacattctaaagggaaggtgtaaagataatacatgatgatatgaataatacaagtcagtcctgctaaataccagaagggatacatttgccatgtgacctatgtaatttggaagactcaacttacctcatatgtgagtgattagtttctgtgatataatttatccactacaaaatcaagctttgatccataattttgatttactttttctaaacagattcttattagtggaattttaaaaaatgttatgtaacaaaagcaacctgatgccattcttctaattacccaggctcacctctctagggaattgattctcaacttcagcatgaaccagggcttgttacacagatttctaggctccattgcctgagtttctgatttaggatgtctggggtgggggtgaagggtgggggaacataatttgcatgctgctagtgtagggatcacactgctccagggttatctttgaatttgccctattgcttgccttccacatccatgttgacaccaaggcttatccttcttgtattctctgtctttccctttcatttccattcctttatttgacttctgcttttttctcttgatgaagggggtagaggggagcactgctttcttccctgacaggatggtttgtattatctttgtttttttctctctaattctgttgctttcaaacatgcccttaactcttagtttcctttctcacaacttttatgaagctgcagtaagtgaatgaaagaaactcctagagataaggaagtcctccgtggtttgtttagcagtggataaagagtggttaggtgagcaattttcttttactgttataaaaattgttaagaaataaaaaaattcttgttatgaagaatattcaagagcaatctaaggagtataaaggagtttcagagtttaaattccaaagaggaaggacacatgtcaagcatgtattattcagagacaggaaatagagcaaagaaactaagtgtctcctgggtagtaggggcgaaaagtaataatgatgaggatttttaatttttctaattaagtaacactttgcctcttctgaaaagctctcacatgcatcatacgtttacatcaaaaggcagaaaaaatcatttttattttaaactcaaagaaatagacagttgtgaaattaactgatttgttgaaggacacacaggcatttagaggaaacaaaactggatccaaatcatctaattacagtacaatcgtctttcatttatgcctctactttaaatttttgggttataatcactatgaaatatgctttacaactaaagcttccttgattcttaaaggtagagcttagctccaaagccaatatgatggactacttctttgtctcaaacagattttttttttttttttttttgatacagagtcctgctatgttgcccggggtggagtgcagtggtgtgatctccgctcactgtaacctctgccttctgggctcaagtgatcttcccatttcagcgtcccaagtagctggaactataggcatgcagcaccatgcctggttaatttttatagtttttgtagagctggggtcttgccaagttgtccaggctggtctcaaactcctcggctcaagtgatccacccacctttacctcccaaagtcctgggattacaggcgtgagccaccatgcctggccccaaacactttctttcatgaatgtggatcattaacatagagcagtacaagattttaattggaatatgaatcttataatttattctcttcaggtttttttttttttttttttttttttttttttttaagagataggtacccaggttggcctcgaaactcctgggctcaagtgatcttcccgcctcagcctcctgagtatctgggactattggtgtgtaccatcacacacaatttatatctgcagttgttgaaagcaactaccatctatattaaactttggagttactgaattgctaagacagttactctgcaggtctattggtttgcatagcagctgtaatggagagaactcaaatttctttttaactttgtcaagctattctttttttttaggactctttttggttagagtatgggtgggaacacagagtccaactctactcttacaagtatccccgtgctttctagaatctttttatactaacatttggactttttgctttgaatttttatcacttccactgggctcttggaaagttttgaggctccatttttttatgttttccctagaaattgaaaagaactttgtttggaaatgcgagctacaatgaacccaggtcttgaattatttccacatgttccggctgtcttgctttttgaaatctagaccaattgttctaaaactttgttaggttaggggatccttcagttagacaatagtcttgaaagactgataggatttccaaactgccactgccaaataattctggaatgaaagggaagagcattacttcttttaaattaggtgcctgattgatatatgcacattattattttcagatggggctatattatacacaccattacaataacattcataatttactgaggatgttcataatttactagaaaactgaagtccacattttaagcataactcagatttataaaatgactctacctatagcttttgcatctgtgtctgagtgcacaaatcctttgctggttttcttatgtccaaatctagttatctcggttaaccacagaatccttcagtgaatccattggagaaatgtatttatacatcacgaagatactttttggtagtacattgaaaattttatgttgcaaatttaaagacttattttattatgtgatctaacagaatgtgtgaattttacatctgataggtctacttgaagagatgtacagaggggagagcagatatgtttatggatccaagaccagcaaagtcaactttggttaaggagatactttcacagatggtccttcctgcacccctcccccatgttccttaatttaatggcttataaatcagctatccaggggaggaaaggatataaactatgtgacagcactctataaatcataagatgctacaaaataaaaacattactatttgattaattcacctaataatggtgatatccataccatatggaaaatttcttgtgatttacctctggttattagtacattcacatttatcccaagtaaacaaagcaactcaccactacccaagtttcttcataaattcagtagtgagtcactctgtttatttggaagtgtgaatactgtgatctttaaaaactgattctcataaaagtacatacattaatttacataatgtcctgacttacattaccctgcaaagaaggcaaagttcatcttaagcaacgttctgtttcagttgtacaattccatgtttgatgccttgcctctatctctgttgctttccttcccttcagtccccaatctaaacttcactgttttatgtcttctctcttggattcctactagctgatctgagaaacaaggttgttttgagaaactaatttgttttcatgtatcagaattcgagtatgtaacttttccctggtaaattatttgtcatttaataagggtattctgaggccaggcacagtggctcatgcctgtaatctcataactttgggaggctgaggcaggcagatggcttgagctcaggagtttgagaccatcttaggcaacatggtaagaccctgtctctacaaaaaataaaaaagttaaatgagcgtggtggcatgtgcctgtagacccagctacttgggaggctgaagtgggaggattgcttcagtccgggaggttgaggctgcagtgagccgagatcatgctactgcactccagcctgggcgacagagtgagaccctgtctcaaaaaaaaaaaaaaaaaaaagaatttcaaatataatgatcatcactgttataggtattcttaggtccaagagaatctaggtgacatcacaatcgcttatgtgctcacttatatggaggcacatccatggaatgcccaattctatgggaattccatatctctgtaccactatggagctatgaaaaaggattggctgagagatcagaagatcttagctctggaatcatagaatccagggatgaaacatgatcttgcccatcttgatgactgaatcctgtgtacaaaatccctaaaaatgttcatccattctctccttgaatgcgtctaattacagaaactcactccatttaaaggcagtctatctgatattagagcagatctgattgttaacaaaatttttcttttattttgtggaaaggatctcctgatagcatccaatcattggtctagttccaccttttggagccaaactatacaaactgaatgtctcctcctcttaaccatcttaataatagctaccacttatagagcacttattatatgcttggaagtactctaaagacttcacatgtattaatttattctcaaaacagcactataaggaaggcgtatcacgattattctcattttatacacaaggaaactgaagtatagacaagttaagtaatttttccaaggcgacaaggtttagtagtagctaagcctgaatttacacccaggccatctggctgggtgtaagagctcaagctcttcctgactacagtatgctgcctctgaaacacaaatacttgaatatggcttatataatgacctgagtcttctcttctgcagtctggacatccctaggacatcccttctccataaagggttcctgtgacggtgtctcttggtggcagggtgctttgttcttatgatgggaggaacacagttggggtttctagaagaggcttgtggtggggtctgtttaaaatctgaaagatgatcccaaaccttcccttctacctgctctcttaccttgccttcccacagccccctcagcccctgctgccaggcctccaggtggggtgacactcacctgtgtgtacgaacatgtgcttgacgtagttctgtttggcggtgaaagtcttgttgcagagagtgcactcataaggctttttttcgccttgcccactggctgtgctgtggcctgcggatgaggccaggggctgtggcgctggcagctgtgcagtaaaggtcgacagaccgggctgggacactgtcacaaactgggtctgctggcctgccaggggctgtggcaggctgaagaggaaaggcttggggccactgcccgcgggctgggtagtgaagagggctggcaggtaggtgttgccagctgtgccaatgacctgcgtgttgctggtcaaggtcagaggcatcctcaggttgctggtgagggtttctgtctggcgtaagtagagctgggtacttggcaatggctgcccgatggacgtgttgaccgaaggctgttgtaggacgctcttgtcggagctgttgctgacagtgataacagtgctgtccatctccacttcattgcttctctccggagaggaagcacctgtttctagctggtttgtctgcggaccaccctcagcgggggcttctgcagcctgctcgggttgggtgggttcagcctggctgtcccgcgccgccccaggcccaaactgctgctccaccgagtcaggctcggtgcctatggaggagctgacgcccgagtcgaagctttcacctttgggctcactctcggtgccctcggcctggtctgtgtcttccgtgcactcctcggattcgttgcgttccaggatctgcaccctttgctgcccgtagtagtcgtaatcgtcctccatctcctgcttgatgtggatgttgcccactagggtctggatgcgcacaggccggggctgcttgcggcagtgcgtggtctcgggggtggtggacaggtagcgctccatctgctgcgagcgctcatggatgcgtgtgatccagctggggtcttccatgtggtggtcgcggggcaggccgagcgcagtctcgtggtggctgaccactgcgccgctgtaaaaagagcgctcgccgctgccattctgcatggagcacgcgtagagtgccgagtagatcctgtccacgctgtgctgtgggtggctctgcaggtagcccgactccgtgtcgctgctctggcctgacgtgcctgactcgggagtgccccgcggcgtgtcctggcccgagtcctggatccccgggaacacatcgcccacgttctgtgacacgatgcgcgtgcactcgtcgatgactgttttgatctgcaggatgctggcggccgtgaggatctgcagagcttccgactgcgagacccgtagcacgccgctgtacatgaagtcaatgagcttttgcactgactgcactgacaccaccgacgggatctcgatgtcgctgtagccaagcagcagtttgtcctggaagaaggggctgccggctgccagcacgcagcggtgtgcgcgcagcatgctcccgtggatgcgcaccgttacgtcacagaagtggccacggttgcgctgctcgttgagggtctcgagcacggaattgctgaagttgtgaaggttgatgctgtgaatgcgctcggtcatccccttgcaactgatgtcacctgcagcatgtcaacgcagacacaaaacagggcatgggtcagatctagctggttgcattcctaacacctaggtttcaggtgagtaatgctcatggctcctagaagcactgcccttacatacgcaagtggggagatggacaggctgcggcatacaagctgtaggtacgatgacctgagggaaaaggaccttgaattttgctccaattccggcctttagtgccgcagccattttgggtatccatattaactccccagagcttcggctgaggtagagtggcctaataaccagatgatttgtttgcctgctattcctacagcttcagcaaagaactgaaaggcaaatggaagacttgttcttatggaacactaaacctccactttatttttatttatgtatttatttactttgccttcactttagacaggcctaagcccagattctttgggaaagtttacatttcccccaacttatcaaagtcccttattttattcatacacagtgaccatattcatagttaacaaataaacccccttcctattaagtcatatggcatattatcaaaacccacaccatgtatgcaaaaattattggaaaattcaacccagactaagatatctaccaaacagtcatgatcatgctttccggatgatggatgggctacagaaagcaatctgctagctaaaggggcactccatggctgctttctgtatctactcattcttcttgtcatctctgacaacctgtttgagcactttctagggtggttgcatgtgatatggaaggttttctgaattttctgaggcttaatgaaggaggaatgttaaaaaggtcagagatggcagttctgacccaggagactacagtacattggtgatcatatttattatgcaaacagggcactttcaagagtgaaagagagcattgttaataattaggccaggatagcaggagtaagccagaagtgggatatatgatctccttgggtaatagggtgctttatgtacttgccacagggaagtattaaacagctcccaggaggaaggcaacagctatgtggaggctgcggatagcctgacccagcgccaccctataacgtaggctgttatggcaagggatactattgataagatttggattcagaatgagaaagaaaacaggtggctacagcagtagatcttagggcttttctatttttctagctcatctctcagatggctctagagaatccccctccaaataattcttcaatcagattccccattcttgcctttacaactgaacaatcagcttgggaaagtgaaataagtgggctttcaaaaccaaatggcccaagcactgattgttggcctggacccaaatctctctgtcttgtgagaagccacctgagaggtaacagcctgcagataggaagaaggcctacctcctcaaactctttccgctctaccttgcgatagaagacttgttcaggaaactctgagttcaatgagcgtttctaccttgcttcactcaatcaccctcacatggtatgagcttaacttaataaatgttcaataatacaatttgcactaatttgtataagagcattctttctcgttctgactctatcaggtctgttatgtgcctaaaatattgtattaggctacagattccatcgtttttacttatataagacaagttctctttgccagattaaagaattaaggtaaatcccctgtaaccatgtgaacacaaaatatggccccaaaagaaggcacaaataacccaggaagggctgttcaggagctcaatcagcagcagaccaaatttcaagttcttgctgagttcgccatacatacataccatgatagtaatcacaagataacattttttaggggttacagttctaactgctttctgtatatgatttcatttaatcttacagcaaccatgggaagtagatgatattattcccattttacagatgaggaaactgaggccagagaaactaagaaacttgctcaagtacacacaggcaattgctggtagactggcatttaaacccaggcagtctggctctagagttcaccctcttaactgcttcattatattgcatagtttgccctttactgaggtctggcccttagggatccacggctctgttgtaaagctgtgtgaaaggctttgtccactactacctccagctacttctatacctatccgtgatttagtgtggcttttatgtttttaggctgtgatgctttgacatagcctcagttgtgtaacttaaaggacttatttttttagatgtcacagtgcaagaagtaagacaactaactggcactatggtttaggattttctatatacaattttactataaccaaggtctctttcatttaagtaaaacaataagcagtaaaactggttgtgtctgtgatcatctctgtgtaggatggatttattacaacatttttttctacacaagtgaaaacactctttaaacatacatttgctcataacattagttacaacaataacactagagatgtcatatatgacagttttctttcagataattctgggaagtagccctatcacaattatcacaataattagtatccatgtagtgtttgactgtgtatacaacttttttacatgtaacatctcatttattccttacaacaatcctatgtgtgttctgaacaggtttttttttgttttgttttgtttgttttttttttttttgacagagtcttgctctgttgcccaggctggagtgcagtggcacaatctcagctcactgcaaccttcaactcctgggtttaagcgattcttgtgcctcagcctctcgagtagctgggattacaggcatgcaccaccacacctggctaatttttgtatttttagtagatgagttttcaccatgttggccaggctggtctcaaactcctgacctcaggtgatctgcccgcctcggcctcccaaagtgctgggattacaggcatgagccactgtgcccagcccttcaggacaagtcttattattgctatttcatataagagaaagtcgaggctctcaaaatgtctaaatgacttgcccaaagttttgcacagtagcacatggcagtgttgggattagaaactatgcctcttaaagctttttccactgcataacagtggatcactgaggaatggaacttgaagtgcccaaagatcgagagttatcttaattctcagcagagaaaaaagaaagacactgaaagtaatgatgaaggttgctttagagataagaaatgaacacagataatcacacacacacacacaattccatgagaaaaatccaaactgtttgaccagattggattgcaaattttgttcatctaaacaatcaagttatctactgaatagtctgagttaagactcttgcgataatattgccaccaacttcattaaaaaccacagagacaaacctaaacctgcacacgtacacaacctgatctgacatgcctggttgaattttatacacacaattcttaaatatctccctgagtacactggccccacactgcagtgaacagccatgaaaagctgaatcgtttttgctgatatgagtacagatgcgaagggggaccctgcctccccattcaagcatgcctcattcctccagcacacaatgctgaggcaattcctttcccaggctttcttttatttttaacactaatacagtgggaaaaagtttctgccacagcaaggcaaagtccaggcttttgtgagcatgtccttttcatccaatgggcattaatgtatagattccaatggaataaatctgaaatactctactgtagaagatttgtcccccattgaaaacaaatcttgattagatggttattcagggagtgtataggaaggaatggtgtgaaaatgctaactctattctttcttagattggcactgaataggcatttgggctattcaagaaaaaaaaaacacacacacacacacccaaaccccaaccctatcaactgtacaaaaccacaaaactttacatagattatgtgatcatgtgtatttggggattcttccccacccaaaataaaaaatgcacagtgttatgaacacaaaactgatggcaaaatgaaatagtgataaaaatagttctctgtgttttaaaataataacttacctcctttttactagagtaaaaatacagagtcagcttgtgatggcattccctcaaaacatggaaggaattgcagtaatgaaagtcatcatgtattctaagagactgttctgcgagagcacaacacagacggggctaaagcaggggtgagtaccgaagggaaaatctgcctgtggggaattggggatagagggcctgactctctgttttgcaggaacgttgctcctgcctgtcccttaagctgcaggggtccagggataggacttagcatgagaataaaaagctgcctgctcacaagagaaaatgagcaagaaaggaaacagcaggcaatacaatctcttttaattaggtgtgaaatccagttctttctcaatcaggagagcaaaaggatatataaaatgagactagtgcaagggtaagatgctacagagggggatggggatttgaagtctctggacttggaaggaaacatcagctctcaaatgaaaaccaatataaatttcggtccagttaataagcctaagtcaagtggcagggccagaaagcccttgagctttcaatttggggcaccagatgaggttagtgggtcttgcacatgaaacagggtgcagcttgccaagttagtcacactaggaaagagccagtcatctctggagaaaggggggatgtattttggtgactgagcccccttattctccaaaccccctgcctggggtaagacttcagttacatgtactttacctcctcatatatgccaagggagtcctgctgaatccctgcactataggaggtatagtagtttcttgctaacaggttccatccacagcaaatgactctgcaccaccccactctctctttctatctcattagtatcatcacagtcttgggaggtggctgggagcactggagaaatcacacatgcaagtggaaggcagcaagcagacaagatctctttctcctatcttggctctatatacctagcatatcccagctgctattacctctgtagtgagactagggagggtcatcagcctatgggagggcgagctgtacagttttacttacccattcttgggtgaaaaggggggtgttttgggccatctcccaataaaggttctcctctatcttccagattgtctaagcccagtgtggaggaaccatcaaggatttcagcacgtttttttagccattggtaacagaattcttcacataaaacatatatcaattgttgaaatttgcagaaatttgacttcgaacttgcagaaatttgactttcaaacatgtttgcaggaatggctacctatgaaagttggggactagctggatgtgcttttttagtcactacttattattttatctagacaaagattaaaaattactaacttgtttacagtatttacaacaccattctatttatgatcccaatactgtaattgggtatgcctttaatattacctgaatttttattcattcatagaacatttctagagaatacttaaaagtatttaaaggtccttggttttatgtttgggttttggggggtatgtatagtttttataaatggacatgtttatacttttataggaataaggtcagtggctttcatcaaaatctcaaaggggtctgtgttttccccaaattaagagctgtggattgagattcaggcatccctctttaaaatacttgtaactactttccataatcaaagcttctaaaactgatgcaaactttgtgattgcattactctgatgcataaggtctgttgaactgatattttccatttacttaagttgagctgatactattttgtatgagaaagcaaacaatcttggccaaaatgagaaaagttacttttcagaagagaaatattttttaaaaagattgaaagggaagagagaaatgtaggtaactactaatattagcagaaatctggattatgacagacatatagtttacaactgttgaagctaactattatttagcaaactttgttttactcagagtaagtcccttttgacagttaagacaaatccacagaagaattagaaaacaccctttaacatcttttgactgttaaaaattagatattgtggtataatttgaataaaaaataaatataaactcaatatacacatctaatcagccaaaaaaatagtttacttgcaagatctatagcacttgtaatggggagactgcctttctttctattttcctccttccctttcttcctttttgctgtcataccacgaagttttactaagtttgaagtatggggaacaaagaggcaaaattgagaactagaaaaacatttgctctgtgattttcaggcccatccccaaatcttgacttatcttccattcctgacttctttttcctctcttcactccaccaaaaaataagagctttatactttatctaaggctgagaatagatttacagtactagtgggattttacaggtccaaaggagaaagtaattccagaaaagtctttttacttggccttagaggtctcacagtctcccttggttagcccaggcctttggcttgcctgattttatgttaagtctgctgttctctctaagaaaggatgagggcatgcctatccatattgtaaaactgtaaatacaactgacttatgaatgaagctgctttgggggtcacttgaattttcaccaattcattagtgaaacatttactgagaataccccagtataaatggaaccataaggatacaaaggatcttaaatctaaatcaatagaagaaatttatccataaggatctttgatattggaaacatatattaatcaatcaacttctcccagacctcagtgctcaggaaaagctgtgttttgcttttctttgtggagcctgtgaatatcataactgatcatgtttccctcttggctctgttcactagggagctcagaataaaaatttaggcccccttttagcaactatgtaggacctcatggtatgcttttctatgtaaaattttcaccagcctcattatattatccattctttattttacctctactctgatttctttttttttgtagttatatagaaatacatttcctacatatttattaacaattgaatattaatttaagctacctcaaatcccttacttatgaggtgagggcataatcaatcaatcaacaagtaattgagcatccactttatgaaaccaattccaaccataagttaaaacttcagtcttgagtattatcacactatatgctttatgaattttttatactttgagcatctgattccaatgaggtaaactgttgaaatttactttacagtacagtttgtgaaaattaagttttactctgtgaataaagaattggatagataattccagacaacattctgaaagacacttacgccgtcattccaaagttgaaatgaaatgagggggagaagacttgctgggactaaggaaaaaagtcaatgaaatctgaggttgatgcctttaaatcctcttatattgtaaaccttttgagacaccttttaggagtttcattttttctctctctaaagcgctttccttacaaatttagctactgccctattgtaaccttttcctttgttcactaaatctggggaacaaaaatacagagatgctacatccgtgggtggtatacaaaaatgaaccaaaggatctacttaaattcacaaatttgtgctgtttgaacttggctttgaatagaccttaaagaaggatctgtatattcaattgtacagttaataagttaggtcttttgttttgcttaagaagcaatcacaaatttaaaaattgagtatatgaaaaccagcatcttcttacttgataatctgttcttgtggtctctacataatcatatacttattttatagaaaaaacagatttataaattcagtgagttcaaagattcagtataactctcaggtatggcatttctttaaagaatatcatcacacactgatgaattatagttaggtaagaaactgattttttgactttgggaaaacttttctctggacttaaacgagtgagaaaacagaactcaatagtgtcattaaaaaaaaaaaaagctttctggcaaaaaatatcattgagttcccaattcatagaacttcctttagtcctctgttgctgtgctgttctgaaactgcttttgaagcaggtcttcaaattcatgctcaaatgttctcttcccttgggtctttctaacaaataaaaaaaagttgcttccaatgagaccgctgtttttcaagagtatctctgtttgttggtaggaggggaatgcaagattttctttttttttttttttttgagacggagtcttgttctgtcccctaggctggagtgcagtggcgcgatctccagctcactgcaacctctgcctcctgggttcaagtgattctcctgcctcagcctcctgagtagctgggattacaagcgtgctaccaaactcggctaatttttttttttttttggtatttttagtagagacggttttcactaagttggtcaggctggtctcgaactccttaccttgtgatctgcccaccttggcctcccaaagtgctgggattacaggcgtgagccactgtgcccggccaatttctctatggacttgagccatgatagataagttcactgaggagtaaagaccttctatcccaaagcaacagggaaaagccaaggaaaaaagtaaatctgttttgttggatgactggttaaaatggaagcactgagatgatttgtgtgggctaggttaagagagtagctgaaattcatctgcgcacctagggtatagaaccaggcacgggaaatcattaaaaaaaagaataggacctaagttcctttttggctcatactgagatgaagaataagtgctgtcagatagaactcaaaaccttgggaggttctggtaaataagtaaagtagaaggcatactttataattattttaatcacaagtaggcattttatctttatgatattctttatatagtcttttgtataatatttattatattatttacatattgtcaaaaaagacattgagctatagaagtctcctatagctatagctaacattcaaattatctgatttcacttcactgatttggttggatttgattttctctaaaataaaatctctgtgctaatccaaaaggttggccattttgctttcctgtgtgtggattacattcatttttacttctcttctgctgaattttccgcagttctgaagttattgtggtttctctcctcaccaattcttatcatccccatgaaccttattcaaactttttccttttctgtgaagccttctgtgattactagagttcacttttcttggtttccactggttggtgaggtaataaactaagacattcatttttggcttgttctcactgaattagaaaactttcttaatgagaaggtatctcccctttcctccacctgtaggaatgaatggccaggtttttgtatactttataggctcctttgcctcagggagttgtggtttcagagcccattaagccctaaagaataaaccataaaacaaagagttttctttcctaatgtctgttctctaaaatgaattattaacccagaatgggtaaggagagtgaggctgattgatgctttggagttagagaattggatagcattactggagagaaaaacaatccactttccctcaaatgcagaaggtagcaaggtctctacttgcatacagctccagttggggtaattgcttggcacacttctggaggctggacataaaaaggcaccactttgagaggaacagtgatcatctgggggctgggccaatggtcaacagcaaggaccactgtggagggcatctgtaaacccagctagtgcagtagtgctggcagtcagaaggacgaggctcaatggcatctttgtggggtggtcaagcaatgtcaatgttggagaccatcatggactaaggacttagatttaatgagtcttgtaccaatctagggatgagaagggagccccaaaacttgtctgtatttcttgcgaatttggtgacaggggcctcaggtttaattttctttagaaaaatacgggaatttttttgtacctgaatgttgaggagtgttggggaagttcacctgaacttcctatacatgtagcacctaagttagttcttaccaatatattattgtttcttttttcatttgtgtctgtcttatctctctaagactcaaagcctcccaaaggctagtatcttgtcttgttataaccacaactacaatgacaactacaaatatgtaactggatccctcattgtgcccagcatgtttctttataatgtgtgggttctatgtgagtgcttgtttggtcagctcttcgctacacttcacaaacaagtgggaacctcagggcgcacatttactctgagatatgtctatgtgatatggtcctgacagggcttttttgcccctgaagttctgtgtaatgctcttcttcttgtcctttatttccctacctacccacagttctattttcaatagaatttaaagtccaagcaattgttttatgtgttcactgagttgcccacaaactctgctcattcatttatgatttctgatacatgccatgctgtctctgtctccctgattccatttccccagagagacagctcactgggtccccctgtcaacagaggattcagtggaacccaaagctaagccatactttgtaataaaaaataagaagagatgaccaatctatgatgtgatagaaaaatgatcaggccaaactccgatcacttttgcctatgttagggaagctaacctgcttggtaacagatgttacagaaatatctatcaatcagcattgataacagggtatttatatgtacattaacagtagtgtcaaggattgtttagaatattttctcttggtggccactgggtgtcctcatttacaaagtaaatatgcaatatttagtgaaggtcactggagagaataaaagacactagttttctctttggcccttcacatactggggataaatttattgctgaactcacaagcaggttatatattagtacagtttaaaaaccttcaggtcaaactgttaaaagtttataaccaagagtaacttattcagggtccagacatgaattttaaaggctgtttcctcaacagaggggactgtgatcagctattagaatgatcccttattcatttgaaaattggcatgggattttgactatctgccgagagagccagcagagaggagcagagaaggtcttaatttattcttgaaagaaaagagaacaccaaatatctctatgggatatttgttagattctgtttttatctcaccttttctgaaaactaattaaaaataataatgagaagataaaatatgtcctttgcctaggaaacctgaaataatgtgaaaaacattacaatgagctgggtcagtatactgattatcaatcatttcacatttgaagacaaagaattaaactattcctttatggacctgttatcccacctgtaaaacaaaggtgtgtatgcttcacagggatgttgtagggacaaatagaatatgaggcacacaaggttcctaggaagagaaactgtacatgagatagatttagggcattactagtattctaattgaggctgagtcacagttgtatatgacttgttcctgctggaagacagtagtcaaggccagagctcacacagccaacaaatatgttctgatttgctgctctcagacactgagtctgacacactgctcagcaatcacttactgctccctaaagtggtattttgcatttctaggattgtcattgtctctaaatttatacttatatacatcgctgatgaggttcttcccttgcaaaaagaaatttcagccttcctccaattcaagatacaggcctactattgaatacataacagtacatggccttcaaatgtcatgcctagccaattagctaatcctttcccaaaataaacttcactgtaatattttttttttcactagcatacatccccagcttaattactattctctggcatgttatttcagtacataaattatcaatatgattttgtgtcaaaaccaacaatttgaccaggcatgttggctcacacctgcaatcccagcactttgggaggctgaggtaggtggatcacttgagtttaggagtttgagaccagcctagccaacatggtgaaacctcgtctcttctaaaaatacaaaattagctgggcatggtggcgcatgcctataattcgagctactcaggaggctaaggcaggagaataatttgaaccctggaggcggaggttgcagtgagctgagatcatgccactgcactccagcctaggcaacagagtgagactctgtctcaaacaaacaaacaaacatcccccaacaatttatgcaaacaacatcagggaagctaggaagctctatgagctattctctgccgttcagatatgttcgattgtcttactagctgagcttaacagccttttctgtttttaaaggaccaccatgcatgcctctagtacagcaatctctaacacttaatcaacagttacgtctacagcaatacacaatagccaggtcactttcaccctgagattatactaaaggctcacaatatgctcagagtgtatggaaaagtgtctcatttcttctaaagatccttaaattccttgcttttatagtattatccaactgattaattagtagattcatttttcaactactgtagccccaaagatacatatcggcagagccctcctgattgtattttacccttggccttttctccttttagtttcctcagtttgcacctgtaatttcacttttagaacttctctaggctcggtggctaaacaccacacagcacaggctttatctgatgtgccggcgcctggtgtggtctaagacacactggtgttttgttcttgaagtacaggattgatgttctgaaacctaggctctaacacaaaggagatcattagctcattttaagtgtctcttttcttccctcccagcctcctcctacccaccccaatacttccttagtcctaagcactggcagcagatggcaaccatattccaaagctgagtatacataaaatagtgccatggagaacagagtggcttcaaagttagcctttctattcaagtgggatggcggggacttctggaggagtgaactcatctctcattcatttaatcctctattcattcagccaggaatttgttttcctacacatccatctactgtccagccagttgagggagggtgggcatgaagcatctctcttgagggcccttccagcaggagggcactaagatttctatgccaagctcttgtttccctgggccagctctgcctgctgctgatcaaatcatgccattcctgtaagaggagcttgggaacacagtgtgtagggggtggatttctcaagaactatctccttgctagactgacagtcacatgctgtattccctagacaaagattagacccaggaaaaagatgaaacaaggaggaggatgtggggttgcagaaaactgtgcaggatgttacagtaacgggaggtgggagtgggaaaacctttcctttttgttgtttcaaggtttgctagagcttttgcctaatcatctgtttgagcatcttgaaaataagtatctatttccatggtatctatcaaaaacaggcaccagattatactacaaagttgacctgccatattgctattagaattaaaacatgtagcagcttacattcaaaagaaagcttttctgtttccccagcatgaaaagcagagggtatttgtgatacactttgttttgtaggtctgctgaatgaaaaaaataatcgggtaaaaaattagtacctatattttcacaaatgggcataatgcttacaaatgcactacatcattattttagcttcattctccccacaacattcatttattcattcaacaaacatttgctgagcacctactcctaatttgtgtaagcactttgctgggtgctagggattcagcagtggacaaggtaaacaagattccgccctcctgaattctgtcacctggccaaaataaacatttaacaagtacgctgctagaattttacttgagaaaaaggaataattcatcttacctagtatttcttctgaatctttcttaaacatatttcttgaaggtccagactcctttaactaagaagttctatcttaaatctctctctttccattgttatattcattcctttcttggttacaatgtggagagttcagattgcaactgctatcatttctggggggaatgggggtgggactgtaaccctgagaatccttgcttttcaaactacacatatattttctctgtaaatattgtaccatctaatttgcgtctttggattttgttgattagccatcaacatgtgatttaaggaatactgcatatgagatgcagaaatcatgactcagtaagttattattttaaagctctattttgggatttatacagacttgtgtacagtctagtttggctttcaatctaatctgcaactattactaggaggcttttagatcaagttccatacccatgtgtctctggaattctacagtgagaagcaaaagtgctcaggagttaagagaagcagacgtccgaaattatctccatgcattaccaaaaaccgtgggcaccacggcacggggaaaacttaccaggtacaatgagccagtgactgttactgaatttcttaagattacacttttcccaactactgcagactgcttcagaatagaagaaggtaagtaagcagggtgattacaagcaatcctcctcggaagtgaaactcactcttctaagtttacctctgttttgaattatttcagacaactctcatgccatcaagccgacggactttcaaaaaaataaaagatgcatttctttacttgtaagtatttgtctttgcaaagggctctctgatatggtagcacagaagtttgcacattctaaggatctgatgttttgccctcttcgggtatcccggctggaaggagctacggtgaaagggcacctaaggtgaatggacagattgtagatgggtgcacacaggaaaatgtacagctcctacaatgtattctgaggtaagagagcacacaagtccattccctataatttgaaaatctctcttctttttttattttttagagacaggatctcactctgtcacccagggtggaatgcagtgggatgatcatggctcactgaagccttaacttcctgggctcaggtgatcctcccacctcaaattcccaagtagctggactacaagtgcacaccactatgccccgctaactgttttgtagagatggggtttcactatgttgctgaggctggtctcaaactcctgggctcaagtgataaatccacactggcctcccaaagtgttgggattacaggcgtgagccaccatgcccagcgtgaaaatctcttattgactagaatgcacttgaagacaaaaaggaacttaacaggttaacactagaatgtaatgctataatattaataacactctaacccttccctataccaagaagacaacattcagagagatttgaaacttctttcagccccagtttccttatctgtaaatggggtgttttgtaataagattatgcatattagtcctctttcatttttaggaaaaaaaaacatacaaatgggggaataaaagaaggcaaagagataatggagaaacttcccagtctattcaggcctgaatccaagaagggacaagaagaagggcactggcttttcctcgaagtgaaggatgtaactgtcttacacacaatctcctcccatagatctagggcttttcagcctcagtcgttctcagggggaaaggatggggacctgcaacaactttcacttaggctgcatcaattttagttcatattaataattttcaagcacttaaaactgtagccgacactcaaattcacggagcgctggctgtttttctggtgctgctttaagggctttacatgtagtgttccatcgaatccttctaataaccctatgagatgcatactatttttattctcattatgcaattatgcacatgaggaaatggaaacatagggaggttaattaaaggcacataaaatgcattcataggctgaagttcatgttaaaaagagcaaataagtagaccatgggggtgagaaaatattttctgaatattggaaaacaacacatagccccagtcttagtccattagcaacatgttcaagaaatagctttagcagtctgttatcatacctgcccccaccctgaaggcatatcggagggacccgagaggacatcaggagccattctgcattgggatgttcacagggacctctcctcattgcttctaagttcactcttgggtgccaggtttgagggtgcagattctgattaggatatgtcctggggaagtggctttttccttctgttagttctctgaccctaatgtaacaaaatctttaaacctgtgtcccagaacaacacgcaggaaagaatatgaacctctaaaagaaaggcccagtaatggtaccagtagagtccaaggcctccaggtcaagaactcctgctctggagcagggctggaagtgggggcacgctttgcctgtatcactgcccagtgaaaccaggcctgctttgcagtgcctgttagcatgtcaacccaggattacttaggccacttcaggaatcccaggatctagtcacccatctgggacctttaggtcaggaagaaaatggaatgggctagatttatgaaaattggaaaaaatccagtcaggtgtacctataaagacctacagtatttccctgagaaaatgacatgtatcctttaccctggggttaacttctaaaagttttagtttagaatttgcatgtgtcttttccattagacacagagttatcttttgtagttcaaacttatatgcacctttctttcattgtctcctttacatctaaatacctggttaagatatgaggcaaagagataatcagtgattatatagggaagaacgtgattacagtaaaaaattgaaggacaaagttaattcagttactgctttttgaaattctttgtagtattctacatgccacaccaagcttttttaaaaattctgtactctttggtctaatatcttggtataaaactgataacataaccaagctaaaactagtgaggataaataagtaggaggaaactcatttttagaattggagaggaaaggaaaaaactcctcaaggtcaattttgacatcaactataaattcatttggccttgtgaaattataaagactcatgttcaacattgttccatgtggttgtttatataattttcagtagtgacaaaataatctccttatttagttttacaggtaatttaatagtagaacaaagtatcgtttgattcagttggttccagatcaccatcctacagtagaagtatatcagatacttttgtgtacaggtgggattggcctttggaatgtcttggaccatcacagaaagcagcatactttaagtaaacaaattgaaaccctccctacaaataatgaatttgaggatgtcccatgacaatgaaggtggccttgagaacaacacataggtttgttattagtaattacagagctacctgaattgggcatatcatgaaagaagtacacagaacatggcttttaaagaattatgctttgtcatttcaaaaacaattgtttttaaaaattgttttaaaaattgttaagatgatttaaatgttcaaagtgtatgacacctatcctctgcttagtgttcagaggttactgagggtaaggaactgagttaatatttgtgaagtaataatacttgtaaaacattatttctcataaaaaataatagaaagcaatgttgagaagaagtagagaaagaaccagtataatataattactgcctcactgggcttgggtagtgccttcaaattcctttcacatatatttaccattccaattgccctgtgaaatggaagatctaattccttctcactttgcctatttaattgcagagtctcccttaacactggtttttctcagtctataatgggctaggaactcttgtatcataaaaatattcattactccacttttgagttacccattcattatttctttttaaaacattaaacttgtactttgtaatagttgctttcccatttatcctatgtttgctcctgaacccctctttatggtcttttttgtgacacatctgattctgttttcttgacaacaatcaggaggctagtaatcccaaaacctaaggtaatcttttcctaggtctctccctcgttggtgtctgtggcacctgatactgactgctgatccttcctctccctgatggtctctctgcactatcctggtttttctcctatcccttagaactctcttttcttttcctctatttattcattcttcattctctttcttatcactcatgtaaatatttcccaaggttttgctttccttttttctctcaacaaagacttctttgaagtttactcccatatttatggcttatagtgctcttggccaaagtgtttgctagtcctaatctcacgcattcctgctgtgccccaggaccctgtttgtaactcagtgttagttgtctccactgggaacacctgtggtagctcatactcggcactatataaaatggaattcaatttgattcctttaaatgcttttcatctttacttgataccttggagttatctttgataactgcctttgttgtaactaacactcagctcccagagctgtctaccctcatccacaaaatctgttgcacctggatcctccccattcctcctattaccgcccccttcaggtcaccaatagtgtgaaatactgacagtgctgtctggaccctctccttcctccagttgctccttctcacatccaggctgccaaattagatcttctcaaaatcttgctcatggtaggccctacttaacacccttccacagctctgcaacagaggtgcaaacccctcatacctagtcctgatgcctcatttccagtctttcaaaagagctcaaatggagccatgtctaataaacctacctagatattactgttaactggattaaaatatactttacaaactttctaaattctcagatactggtgatgtgaggatacatattgttttaagattcttggtggtggggtctgtttttctccacctttgtgtcctcatggaactcactgtagtgacaggcacaaaagatatattctatacatacttgctgagtgagtgaatcaatgctccggtgggtctctgtgtatggggacatatctttaaccacgctgcatggaagttgtttgtgaatgttatttgatcttctctacaagactctaagtctctgagcctagggctccagtttataaaactgcgtcctgcacaatacttagcctgtggtcctccacattgaaagcatccactatattgatggatgaatagtcctgactcctttctgttcagagaacattaagtttgtccagaagcagacttagtaacaagcagcataaatggtgggagaaagggcagggttctgtttctgactctgtcattcattatgctgggaaactttcgttataacacttgtgttatttgggcctcagttttctcatgtgtacaataatgggtatagaccaggtaacctttaatcttgcactgctgataaaaagttagaactggcacacattcctcagagagaacaaatgattcagaggcagaagaaaagcaaaaaagaaagcaaaaaaaaaaaaagggattctgctgatgaagtaataaggtatgtgattatggtacctagtgtgaggtgactggtggaaagatccgacttgaaatttccttaaagcaagaagtccttaaagaatcctcatgcttgctctcaatcaatcctaaatgatccaactctaagggcagtagtgcatgtggcctcttttattttaagtaaggatgtgagaagtcttgacagatatggagaagcactaattttatataatgaaatctgccatgaacagaggaagcacacatgaaactgtcactagcagctgtagataagaattaaagatgtattcctgcatgggatgagatggcaagatgaagaacagaaccgtgaaaatcagcattgggccctaacaattacatgtggataatcatatctatgcactgtttgggagagcaatatgacacagtgtaacttgagccaatgggcattgagaccagacttgccaagggacctgggaggattttataagaggacagactgttagagtcgggaagggccacaaatccatgacaaagttccagcatgacacctgtaggtgactctggctccatgaatgaacttttctcaacaattagttattctgagccaggtgtggtggctcatgcctgtaatcccagcactttgggaggccgaggcagacggattgcttgagctcaggattcgagaccagcctgggcaacatgatcaaatctcacctctaaaatacaaacaaacaaaaaaccccccaaaaaactagctggctgtggtggcacaagtctatgttcccagctactcaggaggctgggtgggaggattgcttgagcccaggaggcagaggtggcagtgagctgagattgcactgctgtactccagcctgggcaacagagccagaccctgtttaaacaaaaaagaaaaataaaaagaaaatttattttgtgatttactgatcaaaatcatcactaggtccttcagaatactttctttttttttcctgagatgcagtcttgctctgtcactaggctagagtgcagtggtgcaatctcggctcactgcaacctccgcctcctgggttcaagcgattctcctacctcagcctcccaagtagctgggactagaggcacgtgccaccatgcccagctaatttttctatttttagtagagacagggtttcaccatttggccaggatggtctcgatctcttgacctcatgatctggccgccttggtctcccaaagtgcggggattacaggcgtgagccactgcgccttgccccctcagaatactttcttactttgactggctgtgtggaaggaagggttcttttgcctattagaaaataagtagatgtcttgctttattatatatttggaaagcaaatgtctctgaaatggatataggattcagctcagctgaattataacaatagacaatgttacccaaatacaaatcttcccatgattaaaatgaggcaaagtataagaaggcctcagtgtcataactgaactgttctgttttctgaaaactctgcgctctgtttgtgcctctatggttttgcttctttctattccttctgcctggaatgccattacttctgccttctactttacaaatgcccactcctttatgatccagtttaatttcatttttggtgtggagctctttccacttcaagaggctctttcctcgggggctctgtagcattttgtgcatactggaacactttaattctgcatttatatttaccccgttatgttccaaagtgtggggatggggtcttattcctatcttcgtccctaatcttagctgaggacttggtgcagaatgagggatctgataacatttgatcaatgactgaattaatgactaaatgaatgaatgaataagaacgactaccagaaattactgcattaagtgactatggaagaaacccagttaaattggtgttgtagggaaataataagttttataaaaagagggccaatttaaaaaatagaggtagattaagatacaaagtttcaagacctgtgcttttttaaaataagtgtgtccccaaatgcacaaagtggaaactctaggaaattagagcaaataaaaaaaacgaactggccttccaatgtataagtgctggactaagcactaaaatctctaaataaagggtataaaaggtaacgaaaaaattccaaagagattatatatcaattaactaagaggcagaaaggtgactttttaaaacgggaaagactatctttaatgacaggaaatccacatttaacagatgaggggcttacttggcaatgaaatgacagaaaaacagtttaaatgaaaagataaatatataattccttacagaacatagaataaagcagaatgcagaacactgggggcaacgagagcacttagttgtaccaaagacactctattactgcttaactgatacggaatttattagaaaattaataacaagccattggatagtaactgtctgtggttgttattccattccattttggctatattttctctgcaaattagtgtgaccctaaaatgttttcaggattgtccaacttgtcctaaattccataaataaactctttcagaggatgctgttttttgccatgtctctattacggttcttcacagatggaccatttttgtccttccaaagtctaagaataactctttcagttatcaagacataccaaaatccagttcagctgctcctgtgggattccagttagtttagacacatctgctgagatacatgcatttgaatccaaatgaagcttttgtttgattatacattttgaacatttatggaggttttctggggccaaaatgtttttcattttttggcacaccaaacagagatcttcagttataaacactgccttctgagcacctccaacagaaatccaatcttttcatgtgaacaggtgcctcaggaagtttttggaaggttttacactgaatcagctttccgattggaaactttctgaacatgcagtcaaatttgccaaagagaccttcaaacttgcttgagcagttttcactcatacagacatacattcacacatacagacagcccaagtaaaagcaaatcagagccctgtaaaactgaagtatttttcttaaaggttaaatatcatatgcaaccaaactgaacaaaaagaaatacacaacaggagacagaatgaacggatagcacgaggttcttcattgagcgtgtctgccttaaagccttacctagagtttaagctatacatcctttcagtaaagttttttatttcatctggtttcaaatatatactcaagcattcgcatttttaaacacggcaccatagagtattgctactaacgcctttcaatcacaaacccgttcaaacagttattttgaaacactgccttctctaacacaaatgggtaaaccagatttaaatgtaaaggaagaaaaaaaattactctttaagtcaggggttctttagcaaagccctcatcttacctgattccctataacttttactttccagtttgaatacagcatagactaaaaagttgttatagagtaaaataactttttaagccttaagcctataagtttttacagagtaaaatcactcccccagtgggcatgcctgcaattcaaggggaaatctgctttcaagttgttctaatggccccgaaccagatgctctaagatggccagaaacctttgtctacacccacttagcagatttctggctcgttatcagggactaaaaggtttattcacagaaatgaataatttccttcgaaatatcccttaccctatttacatgcttgcatattccttccattttgttttccccctacagctttactaagggaattaattatctggaagaacaggaacatacagtaagtacatctgagttacaggatgagacacagtatgtcatctattaggcctggctaagaccagcagctgatgctaaatgggaaggaacatgcaccaaatgttttttaatcacaaagttagtaattaattgctctttaaaatacattttatgcttctttctgtctgtgtacatgaaatgcacatttattacatgccaaaaattacaacattatggtttaaatgtgactggcacggaagtccggaaatcagagttaatgttcccacagcaactttaattctgtccgtgtgcacatgtagagctataatagtcttccgttccaggataatacgtatagatggttttgggagggaagctaaagacccatatcctcaactgtagttacaggaaaaaaatcaaaggataaaagctgtgctcctttccacatacgtggataaaaacaatgtccccacacccagtgttgtgtaatcagggaatgaaagaatctgctgtgatgccagcactcaaggggacagtttctgttgctgtgggaacctgaactttgcatttcctgactttggggtaattaaaatgtcagccttaatgtggcattaatggagtttgccataaaaatcttctgttttgttctctaaaaaattgcttaaaagttcaaaatgagccaagtgtactaaaaattttaatcacacagacttgggcgggtgaagcaaatggttgggagggggaggccaaggaaggtggatggcaagagttggaaaaggaagagcccattggcctctgtgagtgtccagccccagcagaatgatgctacctacggagctaaagttaaacccacccacacaacagtttggaaatgtgtaaaggttcaatgaaaaataaataaaaactgttcatgcgtaagtgcatcttggcaaagacacaaaaaatgagacagtctgatgaggccggtataaaacatgggaaggtaagtcaccatggatatcagcttccaacaaaagaaagacatcagaataggtggatctacagcagaagtagggaggacggccacagggaggaaaatcacttctttcaatgggagccttatttgggggaaaacaaaatggaagaaatatgcaagtaaaagttctggtcgcgtctatcacatgtatatgactgtgatgtgctacagcttgatagctgtcaagaaaggtttttcatatggagagcttcgtctgctttactgacttggtttagtcctgcttaagcatttaaagggagcacttggctcagctcatactcagcttgcttagtgagtaactgctctatcaaacacctagggtgttttttacccttcagattccataactcatcttaatgccttccattatcaccatgtgaatttgcttaccattagatttttagcaatggtgaagaggtggtaagctagggggtaatgggggaatattgctaaaaggaaattgtgttagtaggcgcactgcaaagcaacatacattttagcagcaatattaacctcatcatctcacaaaagaaagcatatctcaactatatttcttcttgttttgaataccactgggatcttttgccgaatttgaagaggctcaggaggttaaacagccaactgagaatttagggggtcagacttgtcatctttgctgtaaaacacagcctgtgtccttcatatgcaaaaaagatggtggcttacccacccatgtcagttcatatgcagagctgacttttcttttgtggcgatgctttatccatcatgttttacaacccagtcaccaatatgagtagttgcacattttcaagatgcctgttcagagccaggaatgccgtctttgggctcagaacagagaattccaataagaaatgctctcacaatgagagcaaatccataaacacccctcggtacccaaatgagttaaccacaagcgagtcttccatctacctgggtgtcaattttctcagttttctcatctgtaaattgggaaggatcatactgacaggatatgggcattaaatcatgactaagaataattttgctaaacacatgacaaataaaaaggtgctataaaaattcaagcacttgtgaaagcttggaacaacacacactggtggaatgtttctgaagttaaagagactaacaagtcaagggcactatttttaaatgccccaaatctgttagttctaaataggaactgaatattttaccttaaagaaattaggcttttaaattaatctatggtaagaatgacatttgaaagtaaaaaaaaaaaaatcctcttgaatgcaagaagagcatccaaaaattttaacagcttaaaataaacctttttcctgtcttctctcaagcaatctccaaatggacagatttctgtgaatctttcctaaaaacaattttcttctaagtgtaggctcaaatcaggacaaactacaatccaaatatatttggagaaaagtataatcaatttaaacaacaggttggaacagagaagacttacacatcttaatggcaaaatcaaagtgactgtctaaaaacagctggagatcaggtttctcctcctggtttgtttttccaactgagctcacatccactggcttccccagggccaccaaggagatgtatggtgacaccatactcacgctgttcctgaaacttacttcatgccaatgctaaggcctggccagaggatgcttatgataaagcacaataagtgaagcccaatgctttttctattcacaaaacattcatttttgctgtaacagaagatttctagcctaaggcaattctatgtaatccatacccataaggtgtggcagaaagctgggtaatgaagacctgcatgtagaaactccaggcccttcaccacaggaacgggctattttcctggtgggaagggacagtgtgcacatgcctatgggcactgtgccactctactttccaattctttctgtcattactattacactgaagattgccaggcaagaaggtccaaggatgtgactattaggacggtcctcagaacacagtccctgcttctgccccctggtttctctatagaagcctcaacttcgactgttcaaatcacataggccacagagatttgtctcacgttacttcccttttcattttctagtgacggctagaatatggtcttagcccaaccttaaatagaacaagctctcttcaccccaatcctgccgccagctcatttccctctctttagagactatcatgatgaagcaagtagagaatggaatctcctggaccattgtctcttgccttctttgcagaattttacatttgttctgtcagaaaaataacaataaaagatttagaatctcatttcctaataatttttgtctttgtggacaaaattttatttttgaaataaaactttgcaggtcttatgttactcattttaaagaagaatatgccagttatttgcatgttaccagacatcctttatggagatcagttcagaagagttgttgggtatgttaagactaaaaggaatattcttttggattcgactccaaagttatttcattcctttccattgtcaacacacatgtttctttttctctgaagtattgggttacatttcagaaaaagaaaaaaatctcctaaacgtgatttatcaacttgcttaaaatagaattagaagaagtgactcccagattagtgggaagatggcaaaaataaacagcaaagaagtgatttcaatagcgacgatctcattaagctgcccatttccaaatttagcccttaggcagtttttttaattaaaaaatatttttaacctggattctcattggctgtgtgaagtctgggtggcttctgaattcttggaagccattctcttttcttctgtaaatttatgctatcctttaaccacttcaaaataaattaaaaactggaaagacagaaattcagccaagctacatgagactccaataactaatgcaaatctgacttgtgttatgtaatttcaaaatggatgtttccttgtgtctaactggccttctgaggtccacatttggttgttcaatttagtaattgtggaagtgccattatccagatcaagaataaatggataccagcaacaaaacttcattttctgggttagtgttatgaaaagaacgtgttttatgtaattaatcagccctttaaggccaaatggcatgtcacctggcttttaaatacactctagctttgcaaacttatagatattggctgaatgaaaatggtggcacattacttttggctgctttagaagaccaaatgcaaagagctcgctctgaaagtagaaaagccagaacccagggtagaagcactactccaagcactgcaaagacaccatcaccttagtggtgtactcacaatcagatgacccggtgtgagcgtgagagtttgtcagtgaatgtgttgagtggatgagggctgggtctggagacaaaacagcttcaaagttcaggcagggaaggcccggcttggcgctggatccacccggctgagtaatctcattctcctcagatgccttctggttttcagctgtcttgggtttcttcctgaaaataaacaaagggccctttgaaggaactgactgcatatttgggaaaaggcatttttagaatctgttaaagataacttgattttttttttctgaagggggatgggagggagtccagtatgtcccttgttttaaaacaagctgattcttgttttttttccctccagtaatggcctaactgggaacacatgaaagcatatgggccaagcaaacagcaccacatttggactctgttggctgcataaaaagaccctgtcccagaactttagacagcttgagctacgtatggctgacattatccaagaaagcatccctcttccccccttaggagttttaacatggtctggaaaaatactagtggaagttttaccgttctagcatttgtcaggaagcttagagacaggactcgtggagtaatgggaggagcactggactgggagtcaggagacttgagctaccgtactagctgtgcctctaacttgctgtgtggccttgggcacctcacttcacctctctgggcttcagtttcctcatctgtaaaataaagggcttggattagaaggccttaaaggttccttccaactttaaatttctactcatggactacattaaggaacattcaactttcctgctcttattaagattttattttaaataaaatttcaaatcacaatttaaatttgcagcctgtacggatgagggggtagtgatgggaggtttctgttagagtagcaagtgaaaagtgaaaagaagagcttagattctagtagctaaagagggaaggtgtcatgcagagatttttctactccaactctttactcatcctacgcctaagatttttgatttggtgcatcgtcctggagtttagggtgtgattgtgtgtttgggacatgaggaagagaagggtgaagggaattagaaagtaattgttactaattgttatatggggtcaggaataggaagtaaaacagcacagctatcagtcagctcaggtctcctctccccaggacaatgcaactgatatgaaattaacaaatacttagcttatactacacagaccctagaccacagccaaactggtttattagtaatagttcctgaacatttctccaattcccttggatttgtgtctttttctatcattatgtggacatgaccagaaaaagcatttattttatttgtagaagactatgtgtggtacagaatttgttgtaagtagatttgtttccatgtttcccttgtttctgtgagcatggtaatgtacttgttatgcagaatattttgtatttaaatttgttgtgctgggtagttaaatctgccctcgcagaatatggtgttatgattagtatgctgtgttttcagtccaacaggttgtgaaataaaatctgtttcttcagagggcaggaggcagagatggcatggcaaagattagaatagaggtgaggctttcagacatctttttcagtatggaggaagccaatacaagagaagcaacaaattataagaccttatcaattgatttttgaatggtgactatgggagtaacccccaaatcttgagtgtctacatggaccctgaaggagctggtattctgattttcagtttaaagatgtagccaagatcaaagttgctaaagcccaactcctttattaaaaccaatgctttctctaaggtccatatctctatcactgttgtctaccaccaggttggaaacctcagggtcactatacaccttcctctgccttaaagccaattcatcagtaagttcttacagttctgcttccttcatattttttctcacatctgtgtttccattccaatttcactgcaatcacctactgctttttatctagctgattgtttactaactggctctccaacctctttcactcctctagtcctgtttctttgcattcactaaatctaagatgactacattagcctgacactcaaggtcagttccgtatctcttctaacttttctcatgtgtcctgtatattggccatactgtaccctcagatttcttgaatatcctccagaacatcctgggaatctacattctgggctctacatctttgctcaagttttctcttactttgaatatcccatatttcatctctgccctgttgaaatcatacttattatccttcatacttattaaatggtgtcttcatcttataactgtcttgattcctctctgccaggtaggacttcactccccacagtgaattcctccctaggtctttctccgaaatgcctaagctcttttttttcttaatcttatttcactcactcaattttatttcaataatggctatttatgtgcatatccctcttgtgagactgtaagctctctgaaggtaaggaaatgtcttagttattttagtattcctagtgttcacctattcttttcttcttccttctctcctgtcattcattcatttacatattcattttacaaatatttatgatgtacccatgatgtgccaacatgggctaaagaataaaacaggactggttccttccctcccagagtttactgccttgtctatactattaagcaatgtagcttagacaaagctgtcattcaataattgattgtggacagaatgaaatgaagctgaaattaaagtgtattttaagaacggtcatagtctgaatcccaattaagtttcctactttttatgcagcaaggtagcaaaactacctgactggctgcttttgctttaagtctgtgaggggtatttaataagagcaggactattttgctcagtaaggctaggctggccctcatgattcatttaaatatagggtcaaaacagtaatgacatatgtcacctagcagaaaaaagtgtttatttttgatattcatagacagggcctaggatactttcagatgtgtgcttcagaaaattaagaaagctttctttcaaacataaggacatagcaaaaccaccaatatattactcttttatttttaacactgcaaaaattatattgttcttcatatcaatgcccttgtttccttccctagattcgctcttgtttcctacctgacatcttgtatcacaccctcctgttgcctcagtgatcactttgggagaatattgatagcacagaggcattggagctacctctataaacaggaaatgttagcaactcaacctttttggctcacccccttatttgtcttatatcactttacttacccttataccactgggctgtttcccaactgtccagataatagagaactgctcaccatcctcagaagcaattcatgtcctgtctcaccctctctaatggttcttcggactcctttttccggagctgagaaaccctaaaacatagcacccgtttacgtctagacatgcacaggtgctgtgaattgaccccatttttgcagttcatagtttattaaggaggaaagaataagccctgtcataattagttgaaaatacattttgaggctgtataaaaagaattataaacatggcacatctgagggcaagtcttttcaagcctctgtggcgatgcactattccctggagcctttagagggcagcagcacactggctgactccagcggatttcagagaggcgaactcccgaccagaaccttcctcctggtcaccatgccaaaggttgatttgccaggctctggcctctcagtctctttcttttcagttctcattctctctctctctctctctctctctctcattctctctctctctctctcattttctctctctctctctctccaaccccttcctcctctctctctgttaaaattatacactctgatgaagtcgcccctcaaccggaaaatgaaagctccaatgaaaaagttagacaagccaacaacaacaaagaaagaaaccagggaaaaaggaaaagggggctggtgacagggaaggacttaagaataagaaaagggcagatgtttcgcaaatatatgcaaagcaaaactgggtgtaccctgaacacttccacagagaaacagaccaatcattgtgcacttcctcccgccacactggtggagctctgcattcaaaaaaagaaaaaaaaaaaaggcaaaaaagcgtggccgcaggcacccgcctttcaacggtcagttctgacattctgactgaacatctctcaattgtccaaggagaacaaaaacattttcatctcctcactgcaaacatttctgttatgagaaaaggctgcttcaagaattgggagtgtgttttaaggagactggcggccgagttagccagcagagccttctggtttttaactctcattgtgctggccccagcaagaagttttaggctgaaacatagcagtgagtaaggctgtggaggatgttggctctttcctaactagaccatattgtatgtggaaagaaatatgcattaaaacatattgatgatatggtaggtattaagcatgttaaatgcatggaaattaaccagatcggcggcatttgatgtatatatttcacactcttttgcacatattgcacacatacagtgatggcaatgctttctgcaacatatggaaaaataaatattttatctgtgtgagctcttagcagtctccagggtgttgagagtgctctcttctttcaccctatcccaattttctctcttcactgggctcccaccctctcttgcacgttaatgtgccttttacttatcagcttggtcttttcctatctggtaagtaatgtgcctgttacttatcagataggaaaaaattagttggaacctcctattggctcatgataatttagaccagtgatgcctcccccaatcttactggagtcgtaacaatttccctactcttttccccaacaatacattaaataggcttagtatctgggcaggagagaaagggtaggtggtaacaaaccaccccaataagggtggtagcggaactgcgctccactacctattagctgtatgtcctgggtagattactccgcatctctgagcctcattttcctcatctgtaaaatgggaataataatacctaccgcttagggttattgtgaggaacaaatgagataagccatgtaaagtgatttgccttgtgctggcacatggtaagagctcaataatggtagttcctctcatagggattgttagttctgtgatattcatcatgttagctttaagaagacatttccgggcaaggggtggtagctcatgcctgtaatcccagtactttgggaagtcgaggcgggcggatcacgaggtcaagtgatcgagacaatcctggccaacatggtgaaatcctgtctctaccaaaaattcaaaaattagctgggcatggtggtgcatgcctgtagtcccagctactcaggaggctgaggcaggagaattgcttgaacccgggagtgcagaggttgcagtgagccgagatggcgccactgcactgcagcctggagcaagaaaaaaacaaaagaaaaagaagacatttcccttcatttcagtaatctgtttagatatctagattttgggtaggggcaaatggattgttattgtagcaaaggcagaaacaatgttaggaccagcaatctcttcctcaacatttgatcttgctgtatacttcctgacatctcctttctgctcacatgtttgtcattgctgtggctacactacaccatgagctccttgaagctgagggttgagcaagctgcacttagcctatagaagcccatcaagcctggacactatggtctattcattgagaccaacctatgggactctggcttatcgtgttttcttgcaatttatcatttctctacctggtctgatgtcctcacatcaatttaagatattttagtgattaaacacattttattttctcaatcttattttttttaaccttggcagggctgatttataatttttttttcagtataatttcctcttaactgtatcagtcaggatcctggcaaaaatagatggcacatgcaaagtttttagctaaagaggatttaatgaaaaaactgtatttggagctgcagatgaggttaagggacctcaagagagatagcaccaggtactagcaatagtagagactgccaggtactagcagtagtggaaagctttaaaccatttaaactgaaggggcaagtaaaatggtgatgaattctgagtccagtcagaattggagttgggaaggagggctgaactaacacatttcctgacctctctcttcccccactttcacatctcctgctgatgtctccttttggccaaattcaaagggaagcccaaggacaagagagcctgggtaatgtagtccagaaggccagtcttctgggtcacacatcagggcaaaagaatggttctggggtttttttgggggtagaatggggtggcaagactaatcaacatatgtgttcttctctcttatactttcaattatactttctggaaggaaagacagaacaaaataaaataggttctgtcttagcttccatgtacctattatgtcgaattgccattcacagagcaagaaaagagaatgctgctcagccgagcagggatttttgtttgttttgcttgctgccatattcctagttcctagaacagtgtctggcacatagtaaatggtcagcaaattttaaatgactgagtaaatatactcacctctgccgtgacagactttatatatatatcatctcattgacttatcacaataatctggttaagtaggcagggccactgagcattattgtgcaggtggtatggggggggtgggtaggtattaaaatttaatatgtgcctccccaacccacttccaagccttgtgactaggcccgaagcattgtcaacccaccagaagagatatacttctgtaaatgattcacattttaattttttatcctctttattgatttttgcacctagcaagtttctgttttattattattatttctcttttatgcattggaaagccaagtttctgaatagcaaagactgcaaagattataacccagtctgtccattctctagggcccatgagaagtaaaagcaggcactggcattctgcacagatgaaatacttcctacgacaggaatacatgctcacttgtggacttctctgtaatctgtaggcaacatcagctcctgatttctaggtctggatctgggttctctgtagcacaggaaggtaagagtgataagaactcttttccctcttaaaggatatagaaacttttaaacccatctgcatcatagtaaggctgtgttatctgtatcagcatagttactctgtgatgaagaaaaactcagaaaactatccagatgtgggaatttctcgggtattccttgcacttgaacttaaggatgaatgaaggtatatacaagtaagttccttgtgtgggtgtggactgaagaaactatgtttgatcttctgtcatgtctttagtccccagtaactcagtcctattagtactatagaacacattcccctccgggaaaggcaggcctgtctatcacctacacagcagcccccatcaactatgattcagttgactggaagcattaaaggtaaaaaagcaacacaaaataaagcaaaactctggcttcatccctttaggtttgatttataccagaatagctaaagacatagaaatatgaatgtaaatatcctacctgaagcctaagagggatgttagtctcccaggtttagcgttttccagtaacatagaagtctgtaaaacaccatcccattacctgcctcataacatataggaaaacttgtgaatataacaactagttattgttttaaaatgtgtaattaagttactttgcatgcagaacttctaaataattcaaatgactggcttttctattggaaaatagcatatattcatctgttatttcagcaatgattaatgaatacttgatatcaaactttcatcagtattttcccataggtatcatatcccctaccccaaattatttctgtacttttccttgcaaggtctctacttctcctacataaatgccttgcatggcgggaactaaatcaactacacagacccatacatccagagagcagaggtgagctggatacaagtggcttagagatgtggtggaaggaggccagagctccaagggaagggcagcaaggagacaacagcatgggttgcagctcagacaacaggtaaataaaaccaagcaaagctgctggtcacagatttgaccagggtggcaagaaatgacaagctaccatgagattcaacagtggcacggaaggatgatgagaagcaaacagattaggagaagctgccaccaccgtacatagaggcacagatgaccaagcagaacagcaccagtccctgcaaggtgtgctcagatacagctcagcacagccatctggccaggagggaatgataatgcacatggtgtgcactgcagccgggaagttgagaaccgctgtgggcacctcaggactgagtctggttaccctgctgatccaagaaatgaagccatctaaaattttgcctgctttcacaattttctgtgtgtgtgtgtgtgtattaaacaaagtgaactaagaagccttttattggagacataatgtactcacagtagtttcaaaatcaatggtgtcactcttcaggtaaattactccaaggcttgggcctagtgcagatgttcattggggcagggagcagagagcggctgcatctagatcagacaaaaaacaaaaataaggttgttaaatgaacaggtgatggtgatggcaattatttattttgataggaaagaactttgggacttgagtgagaggttggttgtttggttctacatctttgcaccagagaatggcgaggtacggaagggagaatggagaggatgttgtccaggctccattttcagtgctttcacctaactgcctgtgcagcctgggacatcaacagtaccctgtcagtgcgggcggagctgattttgtggttctgacttagaagctgagttgtgggtgacagtgggggaaggaagtagaaacagtgtccttcaaccttcccacagttgattcttctagtatccttttcttttttttttcatttattatatttatttattttttattcacacataaaaattgtatatatttatggtataaaacatgttttgatacatgtatacattgtggaatggctaaatcaaactaattaaaatatgcattaccggctgggtgtgctggctcacacctgtaatcccagcactttgggaggccgaggtgtgaggatcacgaggtcaggagatcgagaccatcccagccaacacagtgaaaccccgtctctactaaaatgcaaaaaaattagccaggcgtgatggcgcacgcctgtagtcccagctactcaggaggctgaggcaggggaatcgcttgaacccgggaggcggaggttgcagtgagccgagattgcaccactgcactccagcctggcaacagagcaagagtccatctcaaaaaaaaaaaaaaaaaaaaaagaattacctcatgtatttatcactttttcatggtgagaacacgtaaaacctactctcagtaattttcaatatatactacattcttattaacgatagtcatgaggatgtacagtacatctctggagttattcctcctgtctaaccgaaattttgtgtcctttgactgatgtctcctcagcgtctggcagccaccattctaatttttgcttctataaattaagcttttatagattccccatataagtgaggtcacgtggtatttgtttttctgtgcctggcttttctagtacaaaaaaaagcctattttttccccatatatcatggatgacctctagattcatccatgttcttgcaaatgacaagatttccttctttttgaaggctgaatagtgttccattgtgtacttttaccacatttctgatattcttgatttcatttcagtctctctctttattgcttagttcttaatgtattctagtgacacccattgatctgggcatgttctgagcattccctctgtccttcactgcaaaggctccattttcttccataggctctaaccctgaggacaccgaattaccctattttttcccctatacctcagtctgctattctgccttcttcactggcttattttctttcttctgttctctaaatgtagacattcctctagatcctctcctcaggctttgtctaccccagtcctccctgacctcaacaatcacttctccatggagagcatccacattgctatctttagttctagcttttctacagagctgcacacccacattctaaataacagctggttattggttcattcgttcctttgtccattcattcagtgtttatatagcatctatgaggcacctggatgaatacaacagggtctctaactttgagaagttcacatcgccatcaaatactacacaggcttttctaattcagaaagtttagaacttaattcattgtctttcctttaaaatctgttccttctctagacgtcccatttcctgccattggtattctcttcatccagttacgtgggcctacagctggggagtcatcttcaattcttccgttttttttttcttcctatatccaattagctacccaatcctgtagattctactctgattgtgattcctgaatcaatacctgttttctataccagcccctatttctccctttgctacctactgtgaggacatctatgaaaagctcctgactggtttcacttttccagtttttctttacctcttgtccatccttcacacaaacattacattaatttttctaaagtgcccttctaaacatatcacttctttgcttacagtcctccttgcttattggattaaattcaaacttctcagtttggtattcaaagctgctacaatgtagcccaatctagtttctcactcttatctctacactccattctacgctccagcaaagtcctactctttcctaccatgttcatggtatttcttcctttctttcaatgtctacatgtagcttcttcaagggccatccaaatgccacctcatttatgaagcatttcacaaaggagagtgcccttcttaaatattattagcacattctgtactactccctttgcatattctaccaattagaatggttatttgtgtaatttgtcttccttcttcataagccctttgaaagctgagacaatttttactctgagtaccctatagtgggccatgacttcttgcacgttaagtttgcactaggctgataatctgctgaactgaatttaaaaagaataaaccctcttgccttgagtcatagaaacggggactaaattgaaaagacctaaaagctcatctgcttcaaccccctcatttttcagacgaagagatgaagggaactgacttgctcaaggtcgcatccttgttagtggctgggcaaggataacagacataaaaggccacagactaatatttatcagtgcttacttggcaccaataggcccaacagatcatcagtaatgacaagaccagagagagggaggttggggtgtgtaacctgcaaaaatatattgtgttccaaaatataacaaatttgcttcatttatttgcttcaacaaaccgaactaataaatatgttttatagttaaatgttgtctaaaaaatgagggtggatttaaaaaacaaggaagcaaagttttctaacattaccagcagaaataattatgacaatactgtcaacaccactggggaggaggtgcggatggttaatgggtacaaaaaatagaaagaatgaatacgacctactatttgatagcacaacagagtgactatagtcaataataacttaatcgtacattttaaaataactaaaagagggtaattggattgtttgtaacacaaaagataaatgcttaagaggatatatgccccgttctccatgatgggattatttcacacggcatgcctatatcaaaacatctcatgtaccccagaaatatatacacctactatgtacccacaaaaattaaaaacaaataaaatgttaaaaataccactggggtgataaactcaggctgaaaataagaataaagaaatttctcatgctttggaaaagctgtgtgttcagctggagttcttggtgaaaacatgcagtaattccgtggttaaattcattactttgtagaaacaaactattggcaatctgctattatgccacattaacacttctttttccacctagcttagcctagtactcattctctaggtttgtttaaatgtttacttgtttttctttccttatattactaatttacttgtagaaatgcatagacaattgcctctgagtctgttcaaattttcttgccttgttcttctcttgtagtagaggaaacattagttgtttctcttctctatccttatcctcaaacagaatcattttctctcacccaaagatgaaaagcccaacaaaacatgctgtggggataatagtgtttacctaggtgaggaaaacagacttttccagggaatctcagtaattattacttggccagaaaagctcagctcttaaatgttagctccaatactacaagacctcatctgcatctcccaggtgagcgcttgactcactgttactcaccagaggaaaaccttggtaggtagcattaatcaaactctttttggccagtatggtggagccatgctacgcattgagacatccattaaatagcatcaccccagcagccacacaaacagcaaaatgggctcaagagctcttcattgttctttctaacccatcataaggctggacagattattgacacttcaccagatagaacttacttctccttttgccccctggcaactacattaaaatcataaaggaaatcactcatcaatagtacattgcagtgaaaaattatctggcaaatttacaaatcctttgtgtaattatataaatgtacattttaaatatatctaaaatctgatttacattgtgcattttataattaatacaaccatagtatgtctgtcctttaattaaatccttctttctcagtcccacatcctgctgctataatcttactttcatttttggcaaagtgtcacctagctccatcttctttccccttttgccttagtacacacctgagcgtctattaatcagaaccactgcatggtgtgtcatgttttattgcttaaagggtggttacactctaaaaaagattcggtgagaatgacttcatggggtttcacatttattctcttttaatgactttcatatccagtgtactcggtttttaagtcaaaagataattttgaggggctgctgatgccacaaattctccctagaacctgaaaatccagctgttgtctctgcttcttacatcatcactgtaataaagaatctgctcttggaacccagctggcaagtttcttgatggtgtcagaggcgaacagacagtaggtcacttctctacagcccgtttcattgttggcgtttctgcagatctgtcttggaagcccttagagagcagagctgttatgaaatacactgccacatatcaatgtaaggaactttctgcagatgtctactttgagtatggcctgtcccagtcctaggaaatcacaccacatcgttctaaaattatagatggggggttcatgattaaagtttacaagaaaggtaatagtaacaataacagctagcatttattggatgtctaaattttatcagggactgcaccaggcatttttataaatgagtatgttcttgtttaaccctcatagcaatgctatggtgtatgttttagtatacccattttacagataaggaaaagtgagacttaatgggcttacgtaacaggtcgaagtttagaaagctactggatagtgaggccagaatccaaacccagatctctctgagtctaaatctgtactcttttcactatataacaactgttccaatgcagcatggacacgggacacatttctagttcccgctgtgatcacagtacaaggaagatgcttatttccacgatggttcagagccactggaaagatctgggagcacagactccaggagaaggaactatttcagaaactgccaataagtatagtcccttccctcctcctttctaattgcagatgagaatgtcctctaacagtcttctcaaactctaatgaacaaacgaatcacccagggcttctgattcagcatgtctggggtggagcttgtgatcctgcatttctgagaagctcccaggtgatgctgatgctactggtctgggaccacaggtcttatttctgacactctcctttctactagggttgtttttgaaggagcagttcaagccaaataacttggctaacagttcacacagccagccgactggcttctgattctaggccagtttgtcaggtcatcaggcattacacagaattcaaggagttcttagcatagagcacactgtcaaaaaattgtttttagatccccaagggttttcccctctctctggaaattcaaaatgataatgtctctaacatgtaaagttcctatttttttacattattgttatttttaacaataattatctggtaataattcaaataacaccttccctctgagaaattcaatgagctttactaaccttaattgtctaacagcaattcccaggtgaagataaagctgtctcaaagatcatagtaaatttaaaattgttccacttccctcgtttctttgccccaaatgtagtggtgagttagtggggacgggttactaattggcaaaggcccactatcataatttgaggcacagcaaatttcataaaaaggatacatctaagaaatatttagcagagaggtcattgtggggaatacaatgttagaaaaaaaagagttagaaagtgtaagataagaaaagagaaagcaaaatcaggactagctgatgacctccgatgagacatttaacctctaggtggctcagcttttctatctgcaaaaagaggaggttggttttatgatttttaaggtcccttaaaactctaatagtcccctgagaaggaagatgtgggaattaagtagctcatcaacctgttaaaccattaaacatgttaaggaagtctatttgacttttaactttttagctaattacccgaaacaaattcccaagtctacgtcaccagccccacctctctggaaagtggtgagaaaaccatttaatgaataaggcaccaaagacatcacggccagataaactaatcaggaacaccatcgtcagcttactgatgctgtgataactattttactttttaggttttagttccttaattaaccactagttaatacccatgtccataagaaacacctctgatggcttgaagacccctgggatggccctgccaacacaaggtggaatcacaatcccactgtttgtcacattaaatctatgttaattttctccatagagacctcttgattcctctttgacagttcataaactctgttaatataagttgcacatcccatgccatgagcgttagcattatcagatacagttgattcttgtttaaaataagagatcttttggatcagagtacatgtaaacacacacacccacacacccacacacacaatcatgaatttctggtattaatgaatctggcctggtgatgggaacccctctattatgtcaccggatactggaaccttcttatccagaaagcctgccacaggtcatgttaataagatcgttttaaactttgtaatgagaattctaacatgagcatgatttatgacacagcattttatttggtattatcagagtttcctataccttacctcttacagtgagtatgtgttctgaattaaccattatagtttgtggtaaatggaaaaaaaggtacagagaaacatcacagtggcattactccagataacacactctgtcactgttcccaaagtgaacatcatttccctcttcctgctcccatcacttcaatagtaactttggctattactgactaaatgcttaccgtgtggcaggcattgagccttttcacagataactttattttcttacaattactctttgaagttgggaattatattcccattttatagacgaaggaggtgaaactgatactcaggaaaggtacagttattggtcatcagtcatgaaggcagagggtagcaaagcagagttaagggccaggttctaaccacatgttctagagcttaacctataccaggctcacaatcaccaaaccactgatctgccttcattccactcctcttcatttgtgatccccaccattggcttaggctagattcttcttcatggctctctcatgtcttcttgaatatttcttgaaatttctcaaaaccttctacacttgatttatgttttccctccctgtattaataatttaatccaaaaactcattaacacttcttttcaacagactttatcaccccttttcttagctctcatactccttctaaattactcttttgaggcctcacatttgacatcagatgttccacacccagctattgaactcactttcccagaagcccaaggaacctattgttttcagctggttcattagtaggccccagttggccttaccagatgtatttgtccagtttgatcttgccccatgatcaaccatttcaacactgtcctcagtaaccatgcagatttccttccttttctaactttctatgtgcagtgcctccttttacattcatcaactgtgaatctgtatcaccattctccatttgctcccactctcagaacaaaaggctacacatgcatgctacctggacctatgctcctgcccactgtttccaggtacaacctatggcagtttttcttagtttgttctcctttatgaagtcccattctctttttcagttgatgagctagcatcctagtttaataaaaggatctacaccatgcagtgtggtaagcttattagctctcatctcctctaatatctctgaattttcattattttatttcctcaggatatatcttttcccatgttcccttcgtatcttgaaggttattctctctacttctctttatcttcctttggtttcatcagggatactttctctgtagctgatagcatatcaatttctaatagtactagattaatcatcaccacataccttttttttttttgtcccgcattcaactcctgcccttcaaaaatcttttcagatggtgtatcttaaagtgtgtttcatactggaacttcaagatgcatctcaaaaaaagttcctcagtcaagtaagtttaggaaacactgaaaactatatattctattttcaaactcgcaagtgtacacaggatattaaggtgctggaagcctaatctttgtccaggcttaccggattacagactcccccatccccctttttaatggaacacttatttaacctcagaatatgcttcgggaaaagatgctttaagggattcccctggttccaaactcttaagcctgggctcggaaattcactgactccctatcaaatgagtcctctcagatttcctttccattaatactccacatggtctaaactggttaacttatagggtgtcagaaagactaagcacatttctatctctgagctactgtatataccagtttggctgcttggaatacctttatcacctttcaaaaaattatataggacttttttctccttcagggtccatatataaaaatgtatcctttatgaaattttcccttgtgaagactgctttagcccataatgttttctgccactttttaagtacttcaataaatggttatggtttactgcctgtttgctatattattagcgagggtgtacatcctcttgggtaggaaccttgttttatacactacagagaccccagctttttgagcacagtaggatgttataaccatgtcatcggttaatataaacagaaatggatggcattaagacatgatggtttaaaacccaatttctgtagctattggaatagtttaagatgctaacagcccaggtgaaatgttccatcacaatattgggaagaaacactacccgccatcactgccattgccctgaaaatgataccatgtgtgtctaaggatgtggataaaggctagatacagaagagcaaaggcagctccgttcttaggtgaaagtaagaatttgcattagttaacaccaaatggcgataagattaaaataatctaggaacatcaagtgatccatgaaaggaatcactggaatataccaatggtaaaattaccattcataatcattaaatcatggtaacttgatgaaaagaaaaaggatattttcctacttaaggaagtcagggtaagtattgtctgaggttccactgtgtgctattgtgcctggtatacagaatgtgtagcaactatttacagaatctgctactgccttctagtcacattccaaattctatctctttgaatcagtctggagacacaatacattggtgaattcaaggcagcttggcaacgactggcacaacataaaaccccaaataatgaattccatctttcccataaagctcttttattgacacaacatacaacagcgcagggcaggttgtctcgggctagtgtgtaataactagatgttaaggggccctgagtttttcagattagatgttatctgaagttgggactcagcaggttccctaacagtgaatttttagtgggcctacgactagaagtttggtctcttgatgcttagtcagggagttttattatgtgagagagaaaagtatagctttctttcttaaaactgcagcaatttcatattttagcagaagagaaagtgcattttattagagtataacctgtggagtattttgctaccttcctggatataaagcggtatacaaacaaaaaatttaataaaaagctattttataaataagaatgtttacttgtgtttaccttaaaataggtatagcttgtattatttaacatgtgaaatagaaggataatggtaaaatttcataaatataaaattctgtgtccgtcttcagttaaaattcgtaacagtgtatcagagtgttggttattagtagtaatcaataataagtattttttaaattggaatttttattgcaggagattattgggtgggtgaagctaaatggcctagatgttttcctgtcatgtcaatacttaagaattgtctttctgggcaatttacacatgtgagagtgaaaatgaagggtggcctgcctattgggtgtgtaacaggccaccggggcaagactgctattttctgagagccatgggcagtttctgcaataaagtatctgagtttcttctttttgtagtaaaaataaatagtttacttttatgttctgggtgaagcctgagatctctggatctctttgctggatttcactcttggtgggggcagggagatactattggcaatgctttatatatattgacctagacatgttaaagattatgtggtactttcatgaacactctaaaaatgagttctccctatcatgagttgcatagatgaggagattgaggtggatggggtgaagaggaaggaaagggcagtttaagcgggctagctaatgagtagtagaacttaatctaaaaccaagattttcagcagaaaatgctttttttccccaaaaaatgccatggttgtcaacaagctttgtagcaaatctggggcagagcactagatggagaatcagaagatctgccttgtcttcctggatctggtaagaaccagccgtgtgaccatggccaagtcactaacttttgtgagtcttattgttctcacttataaagtcatgagcaaggaatcaatgaatggcataatacttgtaagctgtaaaatctctctcttgtaaaatggtattgacaataatgtatgctttgcctatcttataaagttgtgaggctaaaataagctgatccatgtggaagtgctttgtatagtgtggagtactgaatcaatgttgtctggaagatttaggaaagggtcccgaatgtgtgtgggaactgacagccagtccacttccattcaggttttaggagaagctataataaagcactggcagcagctcaaatcccactccatcctctcctctcccagcacgctgcagagaatcacttgaggaaagttacttgagtgggtgagccaaatgctcaagttccaacctttctgagtagaagccacagtgaatcctgagccacaacacaggtgacaatcactgttcctccaggtgtgtctgaaacactgggggaccctagggaaggaggtcagacgtcactgctcctgaggacccgttttctcctgtacacagctccagcccacatgatttcacctggcagccccaagagacaaaaaggatccagaattagcaggagcctcctctcctgataacctaagtgctctgattgaaaggcagagggtatcaggagaatggctgtaccgagtcggcattgatttctccagcctttgtctgtgtctggtttctgtctcgtttggaggtggttactgttactacaagcagcatgaatcatgtctctgttaaaaaacagagcttcaattgtcttacataacccctggtaactgaacgtctaataatagcaagccatttccaggtagggaatctgtctacctcccagacacacacacacacacacacacacacacacacacactactcccaatgcttcacagcacagtgagacagacagggaggagacagaaggagaaaggggacagcacaattgaatttttttgtgttttaaaatatattgaataatcatgcatcatgggatctgataaccaatatacttagctgagctagtttaataaactgtagaaaacaagaattcttctttaaagtatttgaaagtatcccaatccataccagacagacaccttctctaacactcttatactgcataaaaaccccaaacccccaaaacagagtggggtgaaaatttcactggattgtctgctagcttgtaccaactagcttcaactttcaaaggattttttttgtcctcttttttgtttgaccagagagtgatattccaaaggttcttggccgagatcatttcataaaattccagagagtgaaaggcaactgaaaacatggctgcagtgttccaccatgcagactatgtaatgtcaggcacttttgcccgagccactttctttgacggagatgactttccatctgaggacttacatttttcccatgagtacactctctggcttgtaatacatgatgaggtctttttatacttgatccccactcagctacccattaaggtggctactgaaataaaaaaaaataataggagaggctgaaaaatgatttttgaaaaatcacaaaggtaggattttctttaaactaccaatttgtttgagaacaaatacaaatgctggataggaagtttaaaagtttatggggaataataatataaatgtataacatatatacgtccatttcctcactgcttcaccttgcccatgctaggaaaaatcacttaaaggctgtattttttgagtgtgcattctcagagtgaagtagctgtacatatcatgtaaattggactggggaaggacttcgcagaaaattacagatggcaatcacatcctgccagtcatttggtctagaaccagagaagaaaaactttcttttctcttttgattgttcagtaacatgaaacagtggactagactagttcaaaccaaagaatgttttagggcacacccactttgaggaccagcacctggctatgctacatgctcttcaattgtttaggcatataaaaaggagtgatgagatggttatatgtcaaaatggctgttctccctccaaacaggatttgattggcttatttgcttttggagtactctccaaatccataaacaaaggagtattgaattgaagaagcaaacaggagaaagaaaaaggctaaaaaggaaaagagagaagaagaggaaggaaaaatactaatttctcagtattcctatctgcaaatctggctggatttgataacaaaactcctactactgttctctaatggtctttgctgcatgccatatggacatggcttctaaaggggatgaattctaggttttcctcacaaatatccaagcacagaacagcagggatcttgacgactaaatcatcctaactcacgacgaggatcacagaggtggaacatggctgttgggactagattcttctgcttatttcatgtgctttgtgaattaaattgttcgtagagttggaaagctggtggactaaatgttttaataaaaacagccatgagacacaacagttttcttcacaaaggctttcccccctagctactgtgaatatattgctgaatggttctgacttctggaagggcaggaggtttgcctcttctctttgcctcaaaaaccaggcttattctatgcatctgggagatgattatacttacccgaaatttcaggatactatgtcagacagttccttcacagtggtgtgtctggcacctaagcaaggacttggtgggccagacacatttaaaatgtaaaagtggatgattatattattttgcattgtaacaatgagagtatttctggattgtagctgacgtgtagatcatcataaccatatgtggcacaacaaaccacacaacattgcatcagaagcttgtagttaatatttttaaatgattgattattttgaaatagagaaatggtggatgcttttttcgacctctttaaataaccacttattgaatgtctattgtcagtgatggactctttcttcacagaagggagctgggctatgccagactctcaccatgttctttctcctctaacactgaacaaaatatcagtaaaacaccaagtacagctggttttgaacctagtaagaaatcagtctgtagtaatgggccatattggtaataattggaactggtgatatcgatagcagtgggaataactgacttacaaaggcacagcagttcaggaacgtctcagggactcagagtgggtaaatgcgtaaatctgctctcacctatttatatgctccaacaaatatctggaactctagaaacttcaagagtctaatatgatcaggccacgtttataggtattataggattcatataaaataaggaggcatacatgttgatctagtgagcgtctccatatttgtacaacactcaggatatgtctgagaacacattttaatttttagaatcagctatagaatctggcagttattataaagcaaacttcacttcaaaaaaattaactgagaagccagatgataatccagatatacaaaacaacattggtgggataagtcaaataattctctaaaatgattatggagaaactgaagaaatgaagggcacctatttatcatatgtgggtccccagccacgtttgtaatctgttgtgtgaccttgggcaagtcatgaaacttctctcgagtctcatttttctcatatataatgtgggagtgttagattagatggtttttaagattctttccagtaataacatttgatgattctaaagtaagaagagatgaaagagtaattcctctttcctcttgttttggtaaatacttgctttctcctgctccgtgcctatgcagtttgcagtgagtattaggtttctggactcaagaagtcaaatagtaaatactgaagctatttttccttgtacacatggacaaatcataggggaataatccttcctttctttgtatatcagtgtctcttctcaaatcagacttatgcctaaggtaatcacgatcattctggtactaataaagatttttcctcatccttcccacaaggccctcacccatgctcatgaaagcttatgtgattgggttatttctatatttatgtcttggctattttttctctttcaacttgtttatgaagtccctggtaagcataaagctgcaaaaacaaaaacaaacaaataaaacaaaacagctctgtttgaataatttacttcagttgaagcagtataagaaaacatcctaacgccgaggggaagaaaacaggtcataaaaataccctggtatcttagaaaagactaaataaaagcttatatcaataatagtttcatatgttattgtctttcattttcaaagagaatggtacatattggctttatagtctggtgtacagacgtggctatttttccccatagctctcaggtcagtgcatcctcaaagccaagaaggcccagagcctgccgagctagctttacataaacaaaggagctacacagaaaacccaatacccggagcttatatcatatcctgactaggcactctggttacccatgactcgctcttttccatctgtgccctgattctctgctggtttaattcccttcacctagaatgccctcagtttgcctccttttactgctcagaattccctctggacacaactcacgactagcataagccccatttccaagaagcagcttagtttgacccaacttagtttgacccagcgaaaattttcatggatagcaagtgaaaattagtccttgtgataactggagtcactgaaaccaggtatctaggaagcactcagagaataccagagaaaaactttcaagggttgcagtgtcctcataggaggaaaaaaaaaatcctagctttaagaacaagcccaatatagaagctgtggtatgtaagagaaaagttgtagccatgtacgggaggaattgtgttaaaacagtctgactttttttttccaataaaggagaagagatcctctgtttcttaaaagaagtttagtcattggatatagcaacatacagtgtcataaagtttaattgcattaattatgaagctaaaatgtctacattttagtagagagaacatggggcatagctaaatggcgaagacataggaatgtgtatacaatttgagtttcacttcctccaaatctctcagttagaggatccctctcagtctgacggtcttatcatcaacagcttcacaaactctgacaacacctggctgggtttaagggatgggccatgatatatcttgagagtaaaagatggaatgaaactcagaaatgctgaatgcttttatatatgtatacaattttatttatgtgtatatttatatatcaatatatacaaacatatatatttgtatgatgtttggcaacctcactcatggtattcctgtgaagtaggcatgtggtaaacataattagcccattaaacagatggtagggctctggcatatctcaccatattctaaaatggtggagctgtaagcagggactaaagagagtgtagtttgatacatggctaactgcaaatctctgtgaattgctactttcctaaagacaatctgggtaggctgcatttggctgagaactggggatagtttaggaagctttaaaaatatacaaagggacaacttttcacattcattcagatatagtatcttcatttttacttactagaggcatttttttttaaaaaacagctttttatcttaactcatctgtgttccaagcaaacttccaaattgctgagcagattaaaaaaaaaaaccctacatgccaagtagaaacactgggtaaatgttattttttaaaattgtcttaacaaagtgcacttttggaaaggataaagttgaaaagacgtttggtactgtaaacacttagctgtcattgtagcacagtgaccaaatacgtccaaaagcacatgtaatgaacttttatccgactgaattatatgaccatggcattgccactctatagtacagcaggcttcagagatcctgttattaaatattctagcctaattctttatcatttgaaataggatctagcagaagtgaaagagttactaaaattaagacttgaatttacaagtgtgtttgaactggcttcaggaagacatgaaacatcaatacatctggagaatagaacttgcaattgactgttctttaccatctggtctcaagaacattttctgcttggaagttgcataagcaatgaaaaaacacacaaacaacttcctgtaccatgtttttggtcacttataatgacgcattacaaagtaaaccagctaaatatgagcaactgcgccttactcgagatgacaacatacattatataactaagatcaatgaaaaagaacatctttattttaagagacctggacttaaaatattcaagaataaacatccttccttctaaggtgtttgtactccttctaaggtgtttgtactgagtagttttggctagacaggtttgtagagtcactactacaaaacaatccctatattttttcaaactgaaaaaggatataaaaaagcaagctatattgaggaataaaatgttccatatattttaaaatgttttttaatgacataaacttgcctttttaagcagtaaaatatattctacacatgtttttcatagaaaacttttacatatctttgttttcttaaacacagtatgttgatgtaatttaatttttttctatgatacagggtcatccttgtgactattcattgttcctgttttacaggaatacacttttcttacttgtggtgagaactggcctcatcccttggctcagcctaacggccacagactgagctatagcccactagccactgccatagccaactggcgtcactgtcccagtttttcagacccatcgcctctaaatcctctctgctaaatgtattttctaatgtgctttggattagaaaatcaaataaataagaactgtagagacaatactgcttgaatgcagggtttggtagaagatttgggggaaactcatttggacacttgaaggtcttcagttacttctttgctcagggttgtaactcagagatctgaactaccagaaagtggattttgaggtattattgtgtaacacagagtgaaacatttatgcacttttattgcaaggcttcttattttaaacagggttgtccagaaatccattcttgattactttacttgataggtctctgatccattatatttcactcccttgatttcctccagcaatgtaactaacataatgacaattgggaagtaaagaaatagcacatttttaggataaggtgagagagtcttggtaactgacttcatcatagtgatggaggcaaaaatatacagtcaagttagaaaacttccctggactgctaatgggaactctggcctgactagacactgggaaaacattaaaaactgtgaagttatttacattaattttcagtgttcagagaagtaacatctgatcatcttttttcctcttctccaaaaggagaagtcagaataattcgcaatctgtgataggatagggattgtatcgaaatttgcctttttattacctctgaaaataggatttctaagcaaactaataaccttaaaactgttgggaggaaggatgggggaaaccaaatgtaacctatatgaggggggggaaacatctttaactactttaacatacacacatctgataagttactgaaaattcttatttattttgaagttagtgctgaagaaactctatctgttaaaacttagaaatctcagttcaaagtacatggaaatattccatgatcacgttttcagctcattctagtcgtctgtctcccagtttatttgaactgatgaaattttacaaaataaacttctttagctttctagagttacgtttttacccatgtaatctatttgttaatttttgtagcatgcttatatgataaaaaatactatgtaagtactgagtttgcttgttatggattatttctggatacagagaatttgcaagaaacttcagtttacagcagccaaggttactgcagactaaagcagaagttcaggcataaacttgtcttctaccagttttccacaactttgctgttgacagcatctgaggacatggttgatgagttctgaaaatcattcacaacattgctaatgtttaggaatcttatagctttgccggacctttccataatcacgagagaaaacctttgacgaaattagaacaagtcctcataccctcccttcctttcttctagtgatttttttttttgtattggaacaatcgaaagattcaatgtttttaaattccatagaagactaacgattgaataattttctcacatctctgtttgcactttcgcagtctggttgcattgatttgtgtctcacaagtagacatttcctttgttggtcacaaatcaatgctacagaacaaacctgccagcacattccacccccacccccaattttttgcagtttaaaaacaaagcacatttatatactttttcttttaaaaattactttcattggttagtaatacactaaaagaagacaaagcctcagagttaaaaatccccgggagaaggagctcctctctagctggtctctgattctctcacactgcctggagcaaagaactgcctagtgggagagcagcgctcgtccgccgtccgctcctggtgtgctctgttaacccaattaaggtcctcgccttcatacatcacaaagctgcccaaagcaacacactgtgatgtcacagtcagatatgatttcatggcaggaaaaaaccaaaaaggcagaaaaggttgaacgtactctgcttttattcaaatcttctaagagggggaaaaagggaagacttttttttttttttttttttttttttttctgagagaaaaagagcacaagctttctgacgtgaatgtgaaaactccgttctgaagataccctggtgcttttaccccaagtggataagcatgaataaagaagcacaaagaaacactgtcatcaatcagaatgctcttgcctacacttagctacaggtggaaagcaagcaggcacgatttgatttacctagattaaaagagcaattttctatcttccttttttccttttaaaaatagccaatcgattttggcctagctattgctgactgtacaggtccattttaatacaccactgattaaacggtatgttcatggctgaaggcactacagcaggaacaaacagaagcagctgaaggaagggggtgggggacaggcgagagctccaaaaaacactccacgaaggccacaactactcggcacttcccccgtagacagttgatatagcacattttaggcttgaaccagctataattctgggagtttgaagcctggaattcatttagctttttaattctgaccttaagaataaaaaaaaatcaaagctatgttttttaaaaaacacaaatgagggaaatattgtgtcctaaactgcaatgacatctgaaatgaagatgtgcctcagaaagatgcttcttatgaaacacttgaaatttcataagttatagaattatctactgaaagaggacctagttgtttagagactttgtttagtgaaattgcatgtaaaagaaacagaaagaaaataggacttttatatagggtgactatatgttgggattcatcaggcagctctcagaagagggagaatatctctactagttctagaaaataaccatcttgattatcatgagaaagtatagcctttatcgaagtctgggtggcaggaaaaataaattagggagggaccttctcaggcaactcagagagagacccaacatccagcagatgtttcttctgagaaagacaaggtccatctaacaggtgagacatcagctgaacaatggatgccaggacatgggaagtggctctgagaatcagcgaactccatgtttaaaaagtcaacccactttttttttttctgtttgcttactgattccttgttcccttctctcctgttttctctctccaattatcatttacttaatttgaaattctggccttaatggggacagaaccgtatccagaggtactattaagataagaaaattcaggaagaaagatttaatgaggggcttaggagtttttggaagaggaaaaggacattagagagaaacgagggaaaaactaagaaattaaatatcagcctcagcacggtggctgtagaagaatagcttctgagagacacagatggtctgcattctccagaacaaaaacaaacaggaagtaacagggccagagccccctctccccttcattcctctctccagtgtaaattggaaaaaaactgaaatgtgttcacatcaaaaagttttccttcaaactctagcaagtgaccacagtaaaagaaacaagagagcgctggttccagcaggtaaaatgctgaaaggatgtcacatcgtgggggtgaggaagaaatcagggattaaatacatacagtttggagaaaaatcaggctctatagctaactaatgatgaatggagcagacaggtggcagatttgaggtccggaggagaggaagggctccattttgagccgcccattttctggaggagaggtggtggccgctgtggaaaatggctactcctggggtgcatagggagacaactgacttagtggagggaagggaagaaataaactagggagtcatccagggacacatcgagttagtgagggttttagtttggatgataacaagctcttaaaacatggctttgactcataaaaaatgtagctgggatggatggctacttacagggttaaaagcaaactgagagctcttctattcccaaatctgaatgctgaagtgctgcctagaacagcaaacatgtacatgcaaaatatcaaaaatacacaaagtgggggtgcagaggaggtgcaggatgcaccagtcacctccttccccacacccttcaacagcacagagctctggcagggtcatcaccagtaaaactggattcttacaagccattccacagagagaaaccatcccaggtcccccatggctccaggcatcagtgaggacagttttcatgttccaaaactaattggacagtaaggagtgtctgtaagaataaaagcgggtgggaatggaggatggaaataaaagggaaaaaaagtgtccttgttgaaagttttaaattacaggctcagtaaaaaactggcattccaccacatccggtctagttaccaaatggaaaaatagggtcattaacatgtttatttgaattacattagtccttctctttcatatttaatttattctgttagaaaaaaacacaacgctctgcatgctggtgaaaggcaggggtgtaatggatcagggagctgaaatacaatgatctttacccattatctaccctgctaaggcttttcagaacttactaggatcattcagggattcttccctcacaagggagggaagggtacagaaagatgtaaggtacagatgctactgagtttgttaaaataatattgaagcacatttaaattaaggagtggaaggacgattttaatatggaaagtttacaaaaagaagaaaagtttgggataaatgacctcttctgagactgaatgtccagatgcaaggttggtgctaggcttacggaacatctccacatgatatggaagttgtagaacattgtgttattagtattcggggtattaaaaggcgaagtctgcaggatgatctcatgaggcttgctgtcatccacaagaggtcagggcaacttcagtacaagcaagtataatgcagtacattcaggggaaaatgaaacaaggtatattttcaggaagatgtccagaaatgacctggctatctttgtggcggtgacatggaaaggacatagacttagtatcataaggccagtccctgctctacaacttactaacaccatttgcacaagtaattcaatcagttttcctcatccataaaatgggaacatgaacagttaccatagagttgtgaggatcaactgagacaatctatgtgaaagtgttctataaagcactgtacaaatgtaagacatttattttctgaagacagtggtgccaagtgtgagccaagcagtgtgccaaatatcctcagaaataggattggaaacaaagcagggaatgctctgacaaagctgaagaggacaaggatctcccatctcagtgtgactgggtgtatcgctcactcaaacctgaagggatttctcaccgggatgctgaccttgggttcatagactaactccacagtaggttgccacccactcataatgagtcatttaaagttcaaatcttacttcatgctagcgatgctagcacagaggcaagcagttttaggctttttttggtcacagatttctgctgccattgtcaaaacagtagccccaacctctaactgcaacctagggcagccagcccaacctagacttgattctggtcacttttagtggaacaaattggctcagaaaacatcgccttctacttcttctttaggatatccaaaatgagcaaaaacttcagtctctagcttttccttaagacaagtttctccctttgctacaaacggaatcacatctttttgttatgattcttcctctatggtccagtttgttgaacattttgccagctgtttctaagctgaactttggcttaaatacaattgcagtcacactaagatcattctgttttgagcccagagcatagagtgtaattttgatagaggaaggggagagttaaattacgatcagctctagtaaaaggtaacggcaactcatgggtgggatactttctggatgaagtacttcaaaaaataaataaataaaaagaataggagaacgttcagtattaattaaaataatcatgacataagatgaagatttctatttataatgataaaatccaggcaaggatatggtaaatgtctataaagaaacaaaaggtctgggaaactgactatggatttctttttcaaattctagtatacgtgaactggaagtcatcttactacttttcaaaagaaacaatttatgacaaactaaagaactactttacacagtaggcaatcaacttataaaattcattaaaggtcgatgacataaatagtatcacaaaggtttagctaaattcatggataagtccatagtgggttattcagagaaactaggctatctggaggaaaataactctaattctttaagttagcaacaaggacaattgtgtcttatataacagtttcctgtccctgtgatcagaaaatgaatgctgaactgaaaggaccataagcctgaaccagaggggcttttcttataatcacatgcttgtaagaaagtagggactaactatagtgctgatattaagcctgctggggccagaaggtgcacaaattcttgaacctgcagtcacatatgtcacattacctaagctgtattatgccactccttctctgcagcaactattatcatctccatattacagatgagagaagtaaggatcagggaagttcagagacgaaaagtaaattaacaaaggtcacacagctggtaaatggcagatttgggatttgaatttaggattatctacttctgaagctctgctaccacactgctgctgttttctgcccagtagcctgatgtattaacagcttaagatgactaatttaacctgttaaagcgatatgaagtcttgctcttcatttgccttgatatctaaactgtgtgtgcagtagcttcttgtcatcaaatcatgtgctcatctatggctttacattaaagatgtctccagctctcattaagagggaacaaaagaagcaaacagatcacgaggaggtaaaaggcatgctgctatggattattatagagtacctcagactataatgtatattaacagaaactcttctctatcaactaatctaaagactcattcttagttttcctaatctaaactcaggtactacaatagaagtaatatccaagaagtgaatgaatatgatgaattccaacaacctccttgctttggtgactctaatgttgaatgggatatcaaaatggaagatgagaaacacaagaaatagctgggttgggggagaagcacgatgaggagaagaaacattagagaagaatccggagtttactttcccagactctaatttaatctgaatgagctttgtttctccacattttgaagaaaatttaagtttagtaataggagattgtgtaatgcaagagtgttgctagcctaaaggctgtgataacatatcttaggagctctgtgtccctcataacaaaagtaacaaacctttcaaaattatttgtggccttgaaatataatacaaaatacctgtatcttaatttctatccttgtaaaatgggaaaagttatttttatatgaaacaacgaatacataaaatactatatatttatataaaatatataaaatataattataaaatatataaaatataaaatgctatatgatagtatataaaatactatatattttatataaaattattatatatgtttacatgtgaataggagctatttgtgagttttattaaaagtctaggtaaaagtaaagtcatctatactcctttctctggggttctcttccctttccttttgtatatttttgctcccctttctctgccgcccccccgcacccacccaggattttaaccacagatgtaatgggtttctgtaacactggcaactcatagctttcacaaatgttcccttggctagggaccacccaaatagtgaccaaatagtgactctcactggctaatgaaaaatcaatgtggtttgatatcattaggacaaggtcaaaataatcctctaagcagaatttccttacattccctcaacaccaatgtgacaatctcgctgcaaacaaggcatagggatgtggcactgctgaacctggtaaagctatgtcattgttaactgaactaaaggaactatcagtgccaaagaagaaagagagtaagagaaaaatgtcagaaatgactgtctagattcagagaaaaacttgatgaaggggcatatagggatggaagacatcttcgactgatgaccagcagctttgaactctgcttctggctcttgatacaaatttgatgtgttgggtggtacaaaatcactacactgtctaggcctaaatgccttcacctgtaaagtgtgggactcctttcaaatctaaagttctgattttgtgtcttgtttggctggcttactcggttagaacataggtttaataaggttaacattagagattcagttttcatataaatcagatggcctgatataatactttgcacatagtacttaataaatatttgctcaatgaataaatgtcttggaatagagaaaaactctatttcatagtcaaggattctaatttagggttaaatggagtggggccaagagagagcacggggcttgatactaatgcatctgaactcctgggcgaaataacttaaaacgtgggtctcactgacattgagtcagtggtatcaccatatagtagttgtgctacaagaacaatcttactattcagactctttgaatcacctgaaagtgttcttgccagtagcctcttcccaaaagagataaccaatcctgagagaattccctgattttaagattgcataaatagctcatcaaatccctacaacattcagttgggatatgaaaattacagatatttttttcctcttcacttttcacatggaaaaacagaagtctgcttccattgcagtcaccccatctcctacaggggtgggaaatgacttagccagtattacagattgagccactacctctttgtaaatactatagttgagcatagaatttgcccacgtatggtacacccagggatttaggtggcaatcacatgccagaattttgctttagataatgagaatcaagtcataaaagaacttgtgaaaataaaaattgagacacttaataatatcaaccacctgatcattgtggtcagacatatgataatttcaattccttagcaatacttaaaaaaaaaaaaaaaaacaactaactaaatagagggattagaacctggaagataaagaatcaaacattagaacaagtaaccttggatcataaatattctctgacattttcaatttgcttgcaacatacagggttttgttttgttttggttttgcttccatgagtgtattgtatcccccactttctccccttctagaagctggctaagtatagacgcagacggtgaaactcaatcgcagagtgctgacagagcttctcttagggtctacagaacagatctactgagtctcacatctcttggtcagcagcgacaggtaaacactagctttattttagcagctcagctgcagctccatgggcagctgtccttactgcacataatcagtccctcttttcagggggttataactcaactatcaaaataccaaaatatgctccggtttgaaacttggtgtatagagtcccaagcccaggaatgaatgtggtttacttccaaatttaagaaaatattgagttttgtaggtcatttatttactattttcaaatatgtttgaagaatcttttaaatgccataggaaaatgtactaaaaaggacacaccattttaatacctttggtgattcattctgaatttcagcacaccactgaaagaaccaaatggtggtggaaaaaaagagtttgttttattttcttaccaaatacagatgttttgaccacttgggtcctcatcagtgttcaaaatattagtgtgttgtaacataataaaataaaggcgttaacttctttgttttgttcttttcagtgatgtgcagaatggattaacgagttcttgtttctggccctcgtataactcaaaaactcgtttcaacttaaataaattaagtaagtaattagttcataatatggcctaatcacctctggtattttgaaacaaacaaaaacacaaaaatggctgttgcacatttgcacttaattacttccacagaaaacactcatgtggactttattacaggtgacataaatttcaaatctaagctttgtttgtgatagaaacctgggttatggtattgtgtagacttccacgaagattctgtaaccgtccctactattttccttaagaaaatgaaaccacagtctatgaaaccacattcttgcgctcttaattggcaaaagaaagtgctttatttcaaaaactctggagaatagtttacttcctacagaggctcaaaggacgttaatataaaaggtagtatcatttctggaatttctgcagtgttcaatttttgctcttggagtctgaacagttcttgtttgcatacacgtctatctgggaattgctcttagtgatcaggacagccttatggaaatccttccagatgaatatactcaatagagcaaaaaatcttgctctgtctttaatgtaaaggaaaaaaggacttttaaacaagtgtgtaattgtgagttctagccttaaaggaactttcttggcttggatttcttctaccctccccttcagatacttaataatcaaagtatatgccaagaaactaatgatgcaaaccagagtattgcacatgaacttggatcgctttcccattgtgtagtgtgtgtagtgaccaagattggacccaaaaagtcgatgatagaaaatagacaatgcaacataatcaaggtacgcccaccttgggtaaattcactaacccatttcctatccttcataaatgcatataatgattctcagtatagattctgaaacttctaggctaatctggccatcagctgtgaaaggaagaaggatcaaccttgattagtaaacttccaggtcatttgcttggcatgaacccactgatgtgttagctgcatacctcacaattctttaggtgttatctgatgttaccaagcattcctgatgccctttgaatttcaatacagaaatctaagtacaactaaacatttccccaagctgtgacagccttatggctattactcattttagaactgagaccaacttttcttctgacatttgacctgggagagtttcttctttagctttctgagtcatgcaaatttattcaaattctgtattgcaacccttgtcagttgtggccatacattcacttagtgatatcttacacacaataggctctcaataaacatttgctttccagaatgaaactagccttatcataagaaaaaatggaatagatttcaatagagttataaatgaactagaagaaagactaatagatcttgagtatattaaaaaaaaaaaaatcaagcagtgagaacagttgggttttgatacagtttcccaagggaagtagtagaagtttcattactcagggcattttaaagtagaatagacaaaacactagtggggtatgttgaaataaaatatgcgtagtccgtctgtgaattagtgtttactttcaatataattataagtgaagcaacactgtaatgggaatttttcatacacaggaaagctatggctactatgtttccacatcgaccatatgttgcacatattggttgctgtggatgtgtatccctactgccctctagtggatgaaatgtaagacctacctgattaaccagatctaacaagctactggtttgggggtatatcaatctttaatcatttagggtagaaagaaaatagctgtgttgatgcattttccatcaaattataaaattgaagggcattaaaaacaacagaatcaaactctgtaattaagactgccatttaatgtttgttcgcacacggtattcatttctgtgtatccctgccaaagatccattgtgtaatgttgtcctcacatgacattaaaaacaccagttccctggaaaatacaaaaaagaaaccgtgctgccttgaaatacacggagttcactttcagaaacataaaattaatacagacacagtaacataatttggaacacaaataatggctacaagaaacttgaaaaccaggactgctccttaactctgagcaagcgtattagcagtctatgggtgtgctggctggtagtcagaagagggcaagcaaaatgggtttcagaacagggaagctgatttgagaaaggactgactaaacacatagtaatagggcaggaaaataactctaaacacacatttggtactgtgggtatatatttaatgctgtcacattgaggctgcttttcaagtgtagcacccagatgctgtactcccaatgaagaaagatagggacctgtacagttctttggcattttgtcattaagacacaggacaaatctgaaggccatcctctttgtataattttaattattttacaggatttagactttaatcactaagttttagtctcacacttagcatataaaataattctcctaaaacaccaagaggaaacaattatacaatctacgttgccaaaacaactgacataccaaagagaataaatgaaatccgaaagaagagaaacataccgtgtgcatgctgagtgcaccagggcaatggcccttattatgaatgtgggaaataaattggctaaatctttaaatatcataaattgttcgaagctggtgatatgtgagtagatgtacacttgaggggaggggaactgggtgggcatggcccagatcgctctctgagttagtgacagtttttacagtacataatttggtaaaaaagtattggtttagtaatgaaaggtaggtcccaatggacttctccttgtaaacttaaaaagagcaacagacttatctagatagagctacaaagcaacatgaaaactctcattacctgagtgatctagaagaaaatctaacttgataaatatcctggaagcattgttttcatctcaactagatttactgtatagcaattagcatctctatagatagatatggggaagcccaggagagctgggggtaagcagtatgggccaaaaggaggaaatacagccaatttcctacttagcaccacggacagagctgtcagcagaaagaaacatccttggagttatccttggtgttaaagaaacacaaagaaatcagtgttgcattttaaagatgcttcttatccccattgcgactggcagtctgggttggaattatgttccagtgcttccctgtagggcacccattggagctgaacgaataaaaaggtgtcttgcccgcctgtgcacatacaggaaggaaaggttgatacaggagaatgatgtctccttgacttttgtctgactcttctctggtttttgaaaaatcatagcactctgaagaatactatccagtctttcccatgtcaagacaagtccctgtgcatttcagccttagggtctctagggcacagggattgctctggggcacaactagggaaagggaataagtaaagacaactctaaaaggaagtaaaatgccttctattccatctcatgttatagaagattacaaataagaccctcttcttcctctcagttctggcctttatgaggtggaagtcactattagactctataactgaataacagattctggaaaattagaactatctctcttgcacttgagaagtcagtgggtctccttttctgtcctgctgaagccagatacagacaaatctagagaaccagttttatgaaagaaagtagcctagcacaaattatttggcattaaaccataccatcatttgctaaagacttggagtcaaagcttttctcatttgattgttaataagaagcttatatttctaaaatatcttgattaccagggaacttgtgggttttggctttaatcaattcttagggcttttcctatcttttgtttcttagacctttatgtccacaggatagtctagagagttgaaatttactttttgccagctcactatgcatgttcaccaaatggtaaagttctcactttaaagcccagcaagacaagatgagctctgtctgcccagcagcctttcagaggcattaagggtaagagagaaggtaagtaattcactatgcgtccccatttctataatggggaaggacgtcttgatacatttacaatactcctctggggatatttcatcagttatacctaaactctaatggacaataattgatttgaactttccacttagcacagagctgtaaacagcttcactgcagacggcagcaatgagccgacgttttgtaaagtggagagagattcagaaaacttttgtactgggtcatgccgtagcctaacagcttttgaatccagggaagaaacagtttgtcctcctggttttaatagctgggctaatcgagtttcaagcctgcagtaggtataggttatcttttgaaggcattccattttaacccctcactattatgatgggtttataacctagccataaaaatgtactcctgatttagacatacatcaggacacattcaaaaacataactttctgaatgttaatttcctggtgaaggaaaaaataagacattaaagtcattttaagactacagattttttttttttttaactctgcgtgggtggtgagcctttcagggaaaatattccctctcctccagtgtccctcatctggttgacaccaccctgtctctccctctcactcaacatcactttgtttcgggctgtatcttagtgcaatctcccatggaatggccccaaagactaatctgctacaaggcatgaaacaagcacaagtatagctctgttccatgactttcttttatagcctccctccagccccgttgaacacacaagtagatgaagtttagaagaattctttcactatttaaatcagctcttctgtctcactacggcatgatagagggtaaaatgaagagaaatgaaagactaactacattttacttagaccactacatcgtctgctcagtctatagctttcctattttgttccacactcctggaattctcacaatgggattcaaagctcacctagaagccactcttagacaacaaaggacacagtcccctttggagttgttgctgccacttctcttgtgtcaaagatctacaaaccttgtggctgtgaagtaggactttatgaacacacagcaagaaagtatattttgtgaatatactgcaaccggacgttacccgccttacatgaatttgacatggaatatgaattttccctcaattcagctgataagattgtaagagcaaaggcataccactgtcagaaaatagatttaccctgcacccccaattgtaattccctttctagaaatctacagaaaaaataggatataatcagacattttgtaagatgttgtccagattctgaaatgcattaaaatcaaactgaacataacttgttccacttggtcctgaaaattacattctgtagcttctagacatcaaacttagttctggttttgatgtaaccgctgattatttaggtaacactaagcaaggtactgaaccttacagagcctcaatttttccatttctcatttggggagaatgacacctgtgtgttcttatttattgatggatgagatgaaattatatcataagctactgaaaaaaatggtgttatatatattttgggtcagtcacctttacctttacagcagcatgaccaatgattggcaaagtagtcaaagtctacttcacccctcctgggtagaaggcaacatggaaagggtattttccatcatttggcagtaagggcctagctctacccatgttcttccccaggcaagcccttttctcccataatcaaagggcaacattttaatatttaatctttaaatcaaatatggcattctcaaatttgatttaaccaatgtctaaacttcactgagctttcagttgagccactaactccctctttcactgtcaagcttccatggaacactctttaaccacaaaattttgtacaatggtacctagtgagctcaaatgactttctcactgatcaacaattattagtctgtaaggagtttatactacagaacatcactctggtgtgtcaggctcagctctcatagacttaactaagcataaaatgtgctttacaaataaaatgcttataaaagttaacaaagaagttaacaaaagttaacaaagaagtggatgacttacattcaccctgtgttttataccttggaattcaaagttccatacttaatggaaatggggaaagcttagcaagggttcagagcaaaggccaaagaaccttccttccttgtttgcccaaaatattaaagagataatttgataatggtcattagtaagatgatgtgttaatagatgttccttacctataactcagattaaacatttaaaaagggggtttatgaagtatgagggattgagttgagttataaaattattacatacttcaggagatgttaaatcctcatatgaaatactctgatgttccagtgtaagttttatgaaatacatttgatccctatttatctgtgacaatttagttaacatgctactagagggcaggacaggtgaaccagaagagttctaggctttggcatctcataaaagttaaaaatgatctgtagagcttatcttgaaatactctttcataaaatgtatgtgtatgattcaatgactgagccatcccacatgctaagttgactacggtcatagggaaccaacctcatgtgaactgtttgatcccattattgaccagtctttatcaatgcttggcagaggtcaaggaagtaaatctaacacctataaaacaaataagcgatttccttgtttgcttttgaaaatgccacttactgattttatttttctttacagttgttagcagctgtacacggtcatattataattgtcacataacaaccttaattcagggacacatcttttgaaacaatgtattattcagcaactttgggtaaacatgcaatttaggagtggaaaagatgcacacagacacaagtaatcatagatacaaagcatggtgaatttctgtgccatgcacttcacaccccaactcatctcgcagggaaactagagaaggggcagaaccatttctattatgataattcacaaagggaggccatatagatatgcatgcaaagtctctccccacctctccatttacatgccaggatttcaactctgcgacactgagtcccttcatttagccaattagtccttccagcttcatgtaatgcacgccaaaaagaaggagaaatagaagtgctgacgttcactgctttgaaagttgctattctaatgccaaagctgcctcttgagcaatttccagaatgtattaacatgggagcaaagcgctattcctaaagacagggatcacattatgcaggggagccccgtttaacgtgtcacaattgcacagaacctccatcccctgcacgatcttacagttgtagtttgcatgggctcaagtttacggtctttacttaggtgaaacttaggaggtcttcctaaagaaaagaagcaatttaaaaatatctagtaagcaaggcatggcacatcttttgtaccatggcattgaccaagtccttttactgtcattctgaagaaagctggtcaaggtgtaaagcaaaccggcctctcagtttaggacagagtgaaggattcttcagtttctttctttctttctttttttaaatcaattaagtctaggttcaattttaattattttaatttggcagacatccctagaattttccctccatattaaggaccaagttgaaaaccattacataattgtgtagctgtgtatctgaatgccctcttatgcacgtgattctgatacttagtaggcaacaaggtgtcgctctgaaatttgaaaaaccattaattcttcagctgaccaccctgtttacagctgaagcagtgatagagattttaatatcgccttctcccttactcttggcaatggatttacaaaagccagtttgtgtcagcctggccctctacaaatttagctgttctttgcttaaatcatgacatttgcaagagatgactggacaagtcccccactgaggcagcatagcagaggtgaaggggcacttgaagtcctatttcttctacacgttgtctctgcttacttcgaccacatctgtcttctaggtctccttttcccaatacacaaaatttgaatactgactgagacgatcctgcagggttccttctagcccttttttgcttttttaccctaaaacgctcaaaatgatttctttctatgtctttggcttctataatttataatcttggctcaatcttctcccttcatttatttcctcaatattaccttttgtaactcttaaatatgctgtccctcaaagaactatcttaaggccatagttttttcttcttatactcatgcatctgaagggctgatgcactcatccatcttttctcataatctacctcttttagttagggttaactaagttagttaacttagataacactttctcttcagaatatctctacttagatggctgctagcccctcaaaacccaaataataaaaagcattctctctttccttttaaatcattctgctatacaaattctgtgtaaccacagtctaatatatccaatgcctcaatcttctgctaaacgttcacattttaatatattgcttctcatatagagccacttatcaaatttagaaattttcttatgatgatgttaactcaaatatacctttttaaactaatattcttggccagctcctaatcacattgtacctaggatatgaaaattgcctcctcagccgggtgcggtggctcacgcctgtaatcccagcactttgggaggccgaggtgggcggatcatgaggtcaggagattgagaccatcctggctaacacggtgaaaccccatctctattaaaaatacaaaaacaaaattagctgggcgtggtggcgggcgcctgtagtcccagctacttgggaggctgaggcaggagaatggcgtgaacctggaggcggagcttgtagtgagccgagatcgcgccactgcactcctgcctgggtgacagagcaagactccatctcaaaaaaaaaaaaaaaaaaaaaaaaaaaaaaaaaattgcctcctcactccaaacatattctcaatggtttgactgtcacagttccctctttagtcctccagtggctttctaccctacttcagatcaattgtgaattatagactcccagcactgaaagccccctccctgtaggtctgcttgtctaacctgtcagcatccggtgccactaaggcccaccttaatccacacagcaagtcgcttttgtcttctggcttccttccgctgagaatacaccctctccatctctgaactttttccacataagcctgcatctacggaataatccctcatgcactgaagaacatctttccttcattcagatgataacttaaacctcacttatgccagagagatttccaagatgattaccagccaactgttaaccctctaaaacaaggtaagaaccactccacccacctttccacacatttcagaaaaaaattatatttttaattgtgtattgtagttgtttataaattattttgatggcagcaaaatatggtatttaatacagtttatttattgccttgcaacttttaagtcttgatttcaaattggtataaaaaacaaaaatgaaaaaagtcccattttgttactttaatatatataaagccatttaagtctcatgctttttgagatctgtcaaccgctatgcacatgataggtatcactaaacacacacttgttgaattgaattgaggaggaaccatcttaaacagtttactcacagaggaggaaggaatcagaagactatgaacataaatattccatagcagcatctgagtgtaacaagaaataataccaaaatgagagtttcccaaatttctctcaccctcttgattgtttaatattatattcataaaactatatttttaaaaacagctttgattttaaaacgttaaatttacacaccaagaagtagacactagcaaagtctcatagtctgatttatttctctgtaatatatctgtcttgagaacatcagcaggaatacaccaaagaaatatgtccctcacgggatcaactatataaaaagacagaacacatcatcagcacaaaaatcattatccatctaatttctcccattctagatggctccagtgagcccctcgatcattactgactagggttaagatagagcttaatggattaattaagccaaagcaggactgcaatgcagaccgaagaggagaaggtcctgacacagatgagacaacaactctgttcctcttttattcaaatgtgcaagacttgcccacccccaagtactacacatttatactgtaaatagtctccaaaaataagatttggtgtctgctgtctgggtcttcccctcagcactcaccaacatctaatacttgggtgttaatcaaaatgtatcgtgtaataagaaattaaatgttaagactttctttttcttcagaaacgtggagaatgattgttaacagaggtaaagcagtagaggcagagcactcgttttggcaatcaaggagcaccaactaagggagaggttattgtttgaatgtcaatgtgactctgagagagggccagggacacagaatattcacaaagagctgaaaggaagaagtgcccacagccataaagtcacggggactggggggcatgcccaaaggcatctgtcgtaatagaaaccttgagatttgttcatttaaaggggattttgaaattcaaatgtaaaaagagaacaagataatccaaagggcacaatttggggcctttttcttcttgtaaaaagaagagaaaatagagagaatcccccataccccccaacaaagtactgtaccatagtggcagtttactctcacttttacgaaccaaatcaacatattaatgacttaaaaaccacgttcacaatggggacaatcagactctatcagacacaacattaaatacgcaggtattaaaagaaaaaaatgcaaactaccaagaaatacctcactccggaaatggtaaggctgacgaaagcagactatgtcattaataccaagcacaccagaaaggcatctatggagctagactgggagggacaggcctcatttgcaccaaagaggaagtgccctgaaggggcccagaagtggggaactgggtagattttagtctttttctttttttggtaggtggggggaatgacagaaacctggcaggctcctgtggaggtctggctgcccccaccatgttgagtcccagtgtctaagtaagtaaagaaatgaaaagacacctatctcaatggttgtcctgaaacagttttaaaagcaagtacaagtccccagcccctagtagaatacaaataatttcatttgtgattcttgcatcaaggaaaaaacttgtgctaagttcaaacaataggatacctctcaaaaagatatgacttctcactagagagaaagaatcaaattctggagtgggaagtgttttttaccttagtgatcttttagtcattttgtaaatgaggaaactgaggacttgccaatggtcacagaagttaattctgtagttggcaattctagcagtaatgaatttacagatagatttggggctatgaggaatccagtggaattgggtccttcaaggccttttatttaaacaattatacatatatatacaaaaaaagatacagggggagagatctatagatatagataagtctgtataaaatatattgctgggtagtaaaaagaggaccggtgttgtagcattttcactaccatggtcaagaagccacggactagattcatttgttcagtgaacaaacagttactgaactctgtgtgcaagtattataaaagtaaaaaagtacgattagacatagtttgtgctgtttcaaaaagagttaacagtatagttgttttatatctacaatacaacctcttaaataatcaagtagtcaaactaattcctattggattaatacaaatcataatcattaattttgaatcttgagagaaggcataaactctgcattatattttagttagacactggaaataatctggaatgtttctggtaccccacatctaaagattggatttcagctattcggtgcatttggatgtttttttccctttagaatccatcctaaattcaatgccctaactcggtagctcagaaacagagctctctaggcattgctgctctccttctgcccagtctctgagagggtattgaggttgaggatggggatgaaactaagaataaggcagagaacgttgctaagtcatgcttctttcagatctaacacatttgtagtcagacctctggccctccgtatccatgggttctatatccgcaaatggaaaatatttggaaaaaaaaaacctccaataaaaaataatgataccacaatgaaaaataacacaaacaaagaaacagtgcagtataacagctatttacatagaccttacattgcattaggtattataagtaatttagagatgatttaaagtacacggaaggatgtgcatgggttatatgcaaatactatcccattttatattagggacttgagcatttgttgatttcggtatctgtgtggtgggctggggtgggatggggtgtcctggaaccagtgccctgctgattggatatcaagggatgactgtacttaatctccaagtcatttcccttacagttatattttagtatatggcaaagcacaatgatttcctttgagatgaacaaaaattgagtagctaaaacctaatgaatacaattagtttaagtaatctggttatggagaaaaatcactagtagtaaagaagtgatcatattacccaagcatttctcttaaaaagaagaaaggagaaagataacatgtgagtgcctactacatttcagtactatgctaggttctttacacaaattagctcatttaattctcataaacatctcccagagcagagattgtttccatttcttctggtaaagaaactgaggcacagcaagattgtgttttgagcagacatacaaagctagaaagtaatttatggcactcatatttggatccaagtttgtccatctacaaagcctataagcctgctaagggagaaacccaaaaatgaaacaacaatgaatgccactggcagtctttttattggatatctactatatgatgctaagttatgtgcccaattaattcgaatataaacacacattttctgccaccttgatgtttaaatatatgagcatgagcaaactaacatttggatccaccatagaatattgatgtagaaaattcaaatcactcatgtatttttttaattttagaagacaatttacctgatgttgcaaagttatcatgcaaaaattaatgctaaaaacataaaaaataccctataaactctttcagtgccagggaacatcatgcactgctcctacaaaaacctggcacagtgaattccctgttaactgccagtagatagggttttatccttaaaaatatttaaaggtgagcacatagtctgcttcatttttactccagggttggcattctcactgcctctacttaccttgttttctgtaaagtgtggaaaggaaaacaagtgaatttttctctcatatatgaaggcctagatgtggggaaaggttgtttaaatgaaaacatggagtttctcctcgtgctaagctggggcatttggagagtcccctcctccctgtgcccctccatccacacaaacatacaccccagttcacgttctagtttcacgcgggataggaaaagaaaacgaaaaacagaaaaagcaggaaaaagtacagaagaagaaggaggaaggataggaagagggtctaaggaagtagtgtagtcttccagagtgctccagaaagtgaaacgatgaaaagggtgagcctcaagagcaaggcacctcccagctctccatggatgaagagtctctatcagctccagaactaaaaccctcagtaggcaggatggtgctaaaagaagaaaaactctggaagggggtcagagacggatattgcagagctttctagccccttctacattacgtataaaaacgattattcaagaaataatgtaattttccagagcatgttcaaatgcaagaaaaaggtgcattctaagattaaatgtactacgacagctaatgattcattatgttaaagttatttattatttacaattattttctatttatgacattgtagtctttcattgacacttgataatcaagagttgacaaaataccatttgaactgctttgctaaagaacaaaaaaagagggattaaggtagacaggaagtgcgtccaccaacaataaaaaggacacatgactcataccccaatattaatgacaaaaatatctacagtgagatcctaaagttctgggtatttgtctaatttttccacaatcagaaccaaaggtaaaaacagcattgacagctactgcagtttggtctgtttaacagaccaaatgctgggatttcaaagattcatggctgggattccaaagatttgtccatgttggaaacagcattcacagtagcttttcggtcaagtggcacaaaggagtgaaaaggtagaaaaggaaacattagcaccaaaaatctctagtcatcttttaccaccttaacatgggttagctgaaggccatggagaataacggatgtgcagttgtctctttcttatacagacagcagagagaggggggaaaaccacacacttatattttgctaatgtaaaagtcccagtggaaacattagcactcaaagacattaatgtggatttgggacactccctgaaggattttgattccattagaaaaaaaaaaaaagacagtgacagatataatcctgctttgatatgtttaatgccatttaaagagaaactgtacccatttacctcaggccaggacaccaagagttcaaaaagtgaaataccatttctcagtgcaaagaaaaagcttggaaaatattatgtgaaaattaatttggcatgcttctttgaaattttagatttctgggatgagcaaatgggtacagttttcttttaactgtttttgaacaccatgtgttgagaagaaaacaacagaatggcaattgctcatccaaaatgctaacttgtggcatggcacagtcaagatggcctgccacagccaaaaagcaggtgtgtgctatgcctctcacttcagtagcatgcacgccacatgtccctgcattcggcaacctcttgcatttgcttttggaacctttctgagggggacagtaaacatgactcaacagaatgtctagctgaggagggactggctctctgagcctgctgtgagacagactttttgaggaagaaccaaaggaaaactggaataatgtatttattttggaattctttggtatcacttcctgtgacctaacaccaagacgactggttccagatcattttgtgtggatgaaatttagcatctaatcaggtcggagagtaatggtgaagcttttgtgtgactggagaggacacattaaatcagctacctcatttggactgaggtcaaggttaatgtagctggtacagatcatacgaacctaacctaaaagcttagagtaataaactcctcacccctcaggtccatggataagcttgaaacagggtgtacaaaaccatttggtgtgctgggatgccaaagcttcttcaatctgacattatgaatctgttattatgttactctaggaattaaaatagttttacgtagatataggtccttttcaactatacaacagtcctatgagggagacgaggaaacagaaaaaaaagattttccttctgccctgtaagaagcctgataaagaggccaagttaaaagtcatgaccacgtctaagctcaagtcaggaaccacttggaatgaaatcccaggatatctgtgctgtaggaatagacaaggtctgaagataaagaagtagatgaaaatcaaaattactattttagaagacaggagtgggacacctctactttattctatacttttaataaatacatcaataataatttattaaaaacctactatgtgcaaatgtcaagagtggggaagaatgaaacctataagtaataaactggaaagaaaaaacatccttaagcttttctgatgtaactgagtgatgttctctgcttctgagtagaaatttatggattcagaaaaggtaatttctttccaaacactcacatgccattgttaatttcactcattcaaatcacaacatttactactataccttttatttctgatggcacattctaggtgttgagggggatacaactgtgtgtaagtacagtctctgtatttattaagcttactgtgcagtggcaggaggaatgagacatataaacatgctctagtataagacagtatgtaatcagtgccacaggagacatacaaataagtgctttagcagttcggaagaagcaagtcctcctggctatagaaccacccctccatagacatactgaaatgactcaatgcacagaaaggaaggatctgtacaactttaagtcaacttacaattgatgtgcattaggggattggagggttagctaggctgtgaggggagggatgtgctcactgtgtccacagctcctctcacactgggtcaccccataattaatgtttatcaaaaacatgcatggataaaagtggaagtcaattgaatgatagaccaggtcaatgggtctgtgttagttctagatattttagatgattattaacaccctgctagaagttggcattataagaacatcattttcttcccacactagtgtaaaaagttcagttttttacccattccagagtgatgggaagtaaaattcagggcttcagtcttccaaatgagggaaatacttggcctgtgcaaaatgctctcggtaggggtatcaaaatgtctttcaaaacagcaaaaaatacatttcctgatagcccctaaggagtatgagttggaatccatgttctctagatgtgacgatggagttcgggagaggcaggtatgctaggatccatataagatcgtatttcccatggtagtgggaaatagaatttgaatgtcctggcttctaggtctgggttcttcctacagaaacatctttttcattttgtattcctcttggacactctagtcctttacctcatgaagagtagccttctgcaattggggtgtgtgtgtgtgtgtttgtgtgtgtgtgtgtgtgtatctttctaagagagaggatagccttactgatgtgcttttgtaaaggattcaaggttgtctggatcctcaaataatgcaattgaaaaaatacggtttctttgattcaatggtgcttacatttgagcagcgttttctttttccattctcaaacacagtatttgagactatctgccaacaataaaaaggtttagagcatcaaaagtgtaggcgaaccaaatcagaattaatctctgtgaaaaccgagattcaggcgcatggaaaaagtttaggaaaaaatccaggtgggaggcaatcccatagaaaggtgtctggcatctttcctgattcaaagtgaggtgtagtaggacacatgtggaagagagatgagcggttctagctattcatatgatccattgtctcaccaatgctcacacaacttgggactgtgttatcagggggccatttgatttatcatgtagtccatgtatcctattgtatgtatgatccggagagaggttaataaagggaagtctaagcttaactgggactaaaatgaggtggcaaacagccattcactcaaacaagactcaccagattaatctgtggagtatccagcagcatttccttttattatcatatgaaaagctgtgcattttattggaaaataattaactctttaaaaaaaaaaacttgcacaccatagcagcaaaagggaggaagataacagtgatcacttctgaacacctggtacacgtttggcactgtttttctttatgcatggatttctttacatatgttatctcatttgatcttcataccaactacgaatgattgatattttgcccattttttttgtataagaatcctaaggttcagagaagttacgtaaatatcctttggtcacacagctagtagggactaagctggaattcaaattggagcagtaggacacaaagcctgtgctcctcaccatgccttgccaggccagacttcatgtgcttttcatggcatgaaatcagtgttgggggaattctgcccagcatctctggttagcagagtgaattgcttttatcatttgccaacatgtcacagaaaaaaacaaaacaacaaaaaaattaaaactcctggctctagatttcctatcaacctgaagtttggcttggttacatattatttgaatatctgacaatcttataaaaagtctaacgagaataaaaaaattcttcatttatgctagctcctatgttagctaaaaatctcctattcctacataacaatgtgcctggggaactctctcactgccagaaactcatctgaaaatgctgaaaagtcagaatttggggcctatatactgactaatgttaccagctgtgagtcagcttgaacatcagtaatatgatatttcccgctacaatttgatttggttaaaatgtgtttgaagttcacccttttattaactggaattaccacctcctgtaactggagggcctctgagaacaggctgctggtgcaatccaccttcccacccgccaacggtgcatttcctggcaacaaatactattaaattgataactacagaaataggtcaaaatgtcttttcaatagttgctaatatttctctaatgctccatagcctccctttgattcttgtgctgacatttttttttgatgagtgcaggagcaacaactgttaaagagaaatgaccagaagaaaggaaagctggctggggtggatggaggtgctcttaggagttcccgtatcagacagaaaagctagatctccctagaggcccaagggccccaaactcagctctgctgttgagtttggtgacccagaagaaaacctgtgtcccatctgagcctcaatactctcatctgtaaaaagaggagactcgagatgactgattattcaaatttgcaaaatgcccagagttcacaggaggtagaagccctgacttatcacaaaacatttgggttttaaatttgtttatagtactcttataatgttacctgttaaggccttggctatccaagatagaaacttattttcatacaaaaaaagtaatattgtgttatattttcgtaagagagaccctttgctatcatactgggttttattcactatgtaaacctatattccctccctctctttcctccaggaacaaagtttgcttttctgagttcacatcacatgtgtgattacagcaaagacagaagtttgaggctgcagtgagccatgattgtggcactatactccagcctgggtgattgagccagacttcaacccttaaaaaacaaaaaagaaaggggtggggtgggtatagtcacattgggaacatagctgattgtgagcctgcaagaagaaaagtccccttgctaaaaaaggttttccagcacttcttctgagatgcaaacataccacggaggggtcaagccattcatgccttcatgctataaccacttcaactccaagagagttatctcagtgtaaagcagttttgaactggagctggagggagggatagggataattctggaacaggggaaggtgaaggaagcaatcagattaactaacacaaggaccctaggctctgctggcagaggagaagatgaagtgggtgacaaggactgaaaagaacccagtctctattgcagtttttgcccagggccttgtctggagctggtgaaccactaaaaaaatcccttgagagatgtcatggtttatcaaaaatgcctttggctcttctgttgctccatggttgtgctgttgctcaacaggcggtcagcaaactacagcctacttggttgaggtgagagtagcttaatctcatataatttaaactcacaaagactatctctccatcagatcccttctgttttccttcctttcctagagcagggaggaaaaaatgtgtgaaagtaagggcaaagaaggaggaggaagaggtagaagaaattaacctttcctcagcttccaagtgagttaggctttgtgttaggtaagcatctctctagatccttccaacagccctgaagatattattagtaataggaagtattttatagggttgaagcagctaactagagctcaaggtggccagtcaggctccttgttacacagcactcttttctcagctcctacaaaatatttatttatatgtatatatttctttttcttctcctcctcctttcactcatgggtgcttgaaaacaggtttaggagccagtcatgtggaatttatctttcaggaatgtcgaacaccccttgagttatccaaagcatacctgactaggagtcaggaggcctacattttctggattaaggcttggtcctaacaaactgtcagtgtggacaggcccatccatctctggggtctgctccaggccttacaattctgtaattcacactcatcaatgtggtggcaggcattagtgtgtttgtacaaaactcagcaagaagtagtctccttagatgctacatgtagactgaagcgaggaactgcctcctgctaatgccagttgtgttttgagtaagaagaataaaaggattgatctgagctgaaagcagaagggaagatgaggggaaggccacagaacacatagctagcagtggcattggtgggggtctgagagaggcagaagcccagggccagagctgagagatcagcttgtttttagcatacacggatgtgtttgatcacatgatggttgggaggtacctaggctaagataatcttaatgttaggtgctcattttaaaacatcaatttaatgactgaagcctattttaatgatccaataaaggccaaagccctcactactatgatacaactatttctccctagtattcactccttgccaaaaaaaaacaaaaaaaaccaaaaaaaaacaaaacaaaacttggctgagacagctatagagtttctgattacaaaacaagatcaccttgatcataatcatctcaaggtgcttggaggaaagaaggagagatgagttcttctgaaccacattatgtggacagaaatcttcaaagagtttaatggaggaattaacttttgaggaattgaaaaaggtatcattttcagtaagagaaaaaatgactgatactttcaattggtatgctagggaaagataaattctaggcaagaccagctctataatttgtggggctcaaggaaaaataaaaaaagtagggctccttattaaaaaattattaagaatttcaggacagcaacagaagcacatcaagccaggcatagggcccgtccaaacatgggaccttgtgcaactgcacaggttgtatacccatgaagctggccctagttttagttattgtttttaccaaggtattccagtcccagagctacccagacccaaatggaaaagcacataccacaactctcaaaactctcagttaaccctgtcttcctacggtaaggacacaactgaattctgcaacaaggatcagaaaatcctggggtctgccaacatatttgatagattgcaactgcactggcttctgcgacatttgtcacagtcactaatccgtgtttctgtcacaacctaaggatgcccaggatatcaatgtctgggaattcaaacatattttctaaaaacacaaatttatttaaaaacaacaacaaaacaagcagaagtcactaaaaagaagctgagtcccctggatgaaagtctgctcttaatctctttctggctttaccttgagtaggtcttgggtgtatgcacacaggttcagaagtgcaggtgaattaccacaataactcttttcagttagagaaaaaatagcagaaacagaagaatctggtcatagcctagcagaaactccctcatttcaccaacagtatgctttctccctttcttattatgctaagttgaagcgatgacttcactctccatggaagctaagtttctctttcctggatgcttggaatgggcctggtgaaaagctattggagggtaacatcatgtctaaaaaatgtatgtatgtatgaagaaagtagagatttaaagagctcagaccaacatcaaaagaataacagcagtccaaagtgaaatgaatgtggcctcttttccaatgaccttagggactttatatatacttagcctacttcttgagtggatagaccagtagcttggcagatgcctaggatgtctgtacaggttgaaacttaattccgtcctttctatacatctttgtcccattaaagaaaaatatctaatatagagaaccagttcactcctacagccagaattatactttgacactagaccaattgctacatccttgatttaggattttttaaaagatatctattggcaaagctaatcttttatttggcttaataggtttgtactgctgctctgcataaggccattagggtccataagtagatggaaatgtgtttgaatctctataatcatgcttagatttcaaaagtcttccatttcacagaggtgatgtaggctcagccatcattttcaagtgttttaacaaatggtaatcagcagagaaggtcttacttttttttttttaaaaagtgactgaccttcacaatggatgcacacataaaactctgattcatttattttaaaaccattctcccctgctgtaaatagatagctacgatatatacattaatatatgtgtgcacaatcagccttagcaatactgctgtgaagtagatgaggatagatggttttctatttatttgacaaatacactattacacagataggttaagcgatttgtcctgtaaggaagggtggagctgggggaaaaaaaaatcctcccacatctgctcttacatgataccactatggaattgggtatcctttattgtttttgagtgacttgatctaaataatgggtaatgtaattttcctgaaaaaaatttcactatttctctcattccctcttactttcttcttctctctgcttctcctctgagattattataaactattgataaatgtggttgctctaaatttacacttgctcttcatgggctttgatgggtttcagcttctaaagagagcataggggagaaaaaagcttatttctaaaaggttttaaaaggatagataacgctgggacagtttatttgaattaatgtcactataaagtggatactggtacgagtactgtcttggacccttctctcgcaagagctagtccaaaggctctgaagtgataccatgggaaggaagagctttttggaggcagaacctgctcatcaacactctgctattctcctgggatatcagacaaaagccagagctttctgtgcaccttcctgttgaactgctttaacttggaactattctctacattagggctgtcctctctgagtccctgaccttagatggtctttctctattttggcacatatttgcatatcagttacggtgacatatttgataaataatgggcctcactgttttttggccagtgaaaaactattttgctattattttaactctttattatctcttttgtcgattatttgtgtgactaaaaagatttcttgtctcttatcatgcttctggttactgtttctcaatgtcatctggtaaatgcttagaaaatacaattttattttgataaattctaaacaaaacataattatgaagaaaaaccaacagagacaagtatataatgaattttgaagctaaatataataaatagttctgaattttctgccactccggctcatttagaatgtaacattgctgacaaattagttattcatgctgttttttaaaaatcaggggcaaaattataagtttcaattctcctaataggagttataacccctgcagcatgaaagcacttgagtaatgtttgctatgtgaaactggcttcggtgatttctcctgaaggaaactgcactatcaaaaccttcatcaaggctgcttctgtttaagacccactgcactacgaatgtccctgtacccgtcagaaccttggctggctgtcatcccatcaagcacctcatctgcagttgccactcagacatgtaaagcgtgtgtttggggacgacgcgcggtggaatgagaagggatacagagctctgttgtaccactacatttattgtaagcaaccacttacacggcaactgctttgctcttttatattctaggcaacacaccggtgaatataattcataatgaacatattcaacattttttccatcagttcaatacattattcataaatattagagatggaaagacctggaagattacagagtccaaacctcctttttgtaactccctttcccctaactgttgatggtagctcaaaaaatccaaaccaaaaccaaaacaaaaaaaaccaccaacaaaacaaaataaaccaaacaaacaaataaaatacaaacacacaaggaaagcaacaaatttacaaattttataagtaaagtgaaaagctccaaagctcgtgtttggtgggggttgttgggggcaggatttacactgatggagctcgctgaagactaggagtatggatgactctttgctttgaagacaggccaagggagggaaatgtcagtttcccccttttagataacaattcaaggtaaagcccaagaggcaataccaagttcttggccaagtgttaactatccatctctacagcctgttgtggactcaggactcaggcactcttctcttcatttagaacttgagatattaatgctaatgataaaaagaaaatgtataaatgaatagagagtgaaaactactagagaatgctccctgggattatctgtactatcaagataggaaaactttgcagatgctactgtctctctagaggaataaatgcttgcattttaatattctcagcagctggttcctgttgaatgccatcaggatgattcagccacccaccaggaacaccagtaacagcaagtgcacacacagaaatctgcaaaactttcttctcttgatgccaacaccattactctggcaaagtcaaaatcctttattgaattatcagttctactaaatgtgaccttgttcccctcacaaataccagcttattctcaaataaatggaacttctggctgattaaaatgtaacattccttctgacttgagcacaccctgctgtcagtctctcttctgccatgttcatgtgatctacctctttttcgttttcttgctatccactgaaaccttgaaggactggcaagatccatacatactcagagtccactttgtatgttgctctgcttgctaaacccatacatttaatgttatatctctacccttacatgtctcaagttatttcatcatttccattttttagacattttctatttccacagaatgtgtttgtatgtctggaaaaacagaaatgtgtagctgaactgcatttaccattgacctcattaatacagaattaccatgccatattcaagctagataaaaatgctatacttgccctcttcttcaaatttagaccagattacacactaaagggaagaaaatgccaaagatgacagctagctatcaaaaagatctcactgtctcattttcaggtctccaaagtaaaatctaaggacattcaacacagattcaggtgctctcaacagccatgaaaatatatggctgaagagggaatctataaatgtaatgaatacacaattggcttataacagatgcaaccaaaattaaattcgatatcttgacctgctctccaaagtgaaagtttctagtttaggctacagacagaggtgtaacaagctcattaatcacatgaaccagaaatataagctgacacttctggggatgctgcaaagagcagtcttaagctgttgggggtctgtggggaacctgaaaaatcatgtggctctgacagtccacagcaagcaacaccactgcattttacaatgtatgtgggtcaggcactggccataaccaccactattttaaacttccaggacaggatttaaggatctttgtagggaaataataggtccaatatggacttttataaaaagattcaatatatttttattaggttcctgttacacaaaaatcattgtgttcattgcatgagaagacaatgaattaggtcaatctatgacctcgagaagtatataaatgggaaagaatcagaggcaggggaatattaataagtaatagtagcaataacaataacaacaatgatgagtgataaccttgagctagtcattctgctaagcactttatatactacatttcatggaattcttatagtatcctaggaaggcagatatcgtttttctctttacagacgtggaacgtgaggcccagtaaaattaagtacattgcctaaaattatgtagacctgttctttacattacaaataaatacataaatagcttgcatataaaatgaaatatggcaaggctcattaaaagatacaaagtgttgtagaaataaaggaggcagaatgtgtttctatttgggaatactaggagaaaaggaacatggatgggaaaatgtggtgtgtgcttaggaaacaaggattgttccagtttgtaatgttataaacctgttgaatcatcaatgtctcattagaactcatactttgataagatagtaaaatataccaatctgtacaggaatatttctacaaagaaatacttctttccaaaagatcttctgactacaatttctcaaaacttttcttgttatttattttttggtggcgatagagggagaaaaaatgtgagatacaaggctatggaggtctgggcagcagtgttaactccagagtctctagggagtacaatgcatttgggtgcattttccttcattcctcagaatgccttatcctcatcacacatatttgtccctgccacatccgaggtgaggttactggcatagaaatagaaaccctgagggtctggtttcttccacttcttcaaagtgggatatcacttactttttatttttataaattagttttagtggtcagccttttggcataggagtacatcaagaaaacgtgagttagaaaacttgagttctggtcccagttttgccttgctcatcttgaaagcattttatctcttctctgtgtttaagttttcttattggcaaaatgagtagtttaagcctgaatatcatttcttaatctgttggacaaccccctcatcaaattttttttgataaaaataaaaccttgttttaatgtagatccttctattcttctctatttaaaattcctggttcacagaatgcaatatatagtaccattagtccagataattttgtagagctttactttctctattttgttaagtttttctcgtaaattttgttttccaaatataaaacattgtaatatatatgtattttcaaattctacatggtcctcgaccagatattccaatattccattctgaagagttggttaacccactcacccatattgagatatctaaagccccttcaagctccaagatacagtgattatgatgctctgatgctgacatttgctttgtcaacgcttaaagcagagcttttaaacttcaaacaatagcataacaagttgctataacaattacacttacataaatctttaagcagatgtgcataacagctctttacatctactatcacactggacaaccaaagcttatgatgttgttataaatccttgcaatagtaaattctacagttaattataacctataggaaaaagtactgtccatatttagaattgattgactcttattttccacatctgttaattttgcacccagctatagggctttaaatagctcccataactttaatcattagcccccactcagtcatgacttctatgtctcacccttctgaccttgcccactgagttcactcttactgatgtaatcaaacatgtttcattgtagttgcattcgtcacagtgctcattagaattatcatcattcctacagcacctcagtgcaatgaaattgtgtgcctatgcaatttgttgttattttaagttcttcagctggaattttaaaaatctagatggacaattttattttatctgatcgataaatatatatccagttaagtgcctctgaaaaattggtaagaaaattatttattagagcaaaatcttaagtctagagagatttttgtaaacttggacagcagcattcactgaccttgaatccacaggttcaaaatttattagtgtcaagttagtcttttaaagcaatccattaaagcaataagtataaaatatatatggtttacatttatgtatgtgttgaatttaataaattagtcaggagtcaaggtatttttaaagaaatattaaatctgttctatattgatcaattaactgactttctaacttaaaatattcttttgctgtagttaaaacctttttttctttttaaaacaaacagagtacataaactgtaaggtggcaatgtagttcactgcgacaatctatatattccttaacgtttgttctttttatggtcatggtatgtagaaacaaataaatgtataatagtttaagtccaggagtttttgcctgactaaattctaaacacatagcttaaataaagggttgaaagcctggcatctcatcattactgtttatatgttataaggtttgcagggccaccttataaaatatatagttgtttattttcatgttcaataaataagtagtgtggggtttcagactgagaatggattacagattgttctctcctggttatttttggctttaagtatattgatcattttatcattttcttgttttaaactactttaaacacagcacaaatgttattctcatcatgccagaaatgggtttggaattgattctgagtttccatcaattttactctttgctctttgtgagaagttttgcactgcttaaattcgaaaggatagttttgtttaaaagatgtcacagtacaacatttagagaaccttagctgcccagaaaaactcagattttctgctttacaaaagaataaaaatcatcgaatttattaccctggactttattgaaatcagtgaagaatattcatacaaatacagtttcacgaacttcctctctctctttcttcatgtaagtgtttgacaaaagcatgtatcttctgagaagccggcctgattggtccaggttggcactgtttcagtgtttggcctacggcggctgcttaggaataatttcatctcatcctctctattttcctggactgtatcaaactcagacacgtggtatgcaaaggaaatccaagtcttttaaaaatgctatttcttttggtactaaagccaagaccagttctactttggccaaatgatcttatcaagatttaacaagagatattcagtaatatctccaatctgtgagaagacattccactaaggaagataatttattacatacagtgtacatatatttctccacttggtaccaggaagagacatgatcaaacttattctattggtactgaaaacaatgtaacactgacaaaaattctgtggcaattattcatttcaattaatttaaaaagaaataaacaagtagctcttcccccattaaaacagatactggaaatctattttcagttattgctgaaaatattttggcttccacaaaggcaccttactaacacactactttgccctccactgtgctgtcacaattcagaacttgtaacattttattcaggtactctagactaattagatgaaacaactgcattacagtattaagatgcttttgtagaattaaatgaaaggagatctgcacagttcagatagcttggaagatttgcaatgaatatcaccaaaatcctgcatgtgcaatatatttttctacatttacaaattagctaatgaataagtgtattccacaataactgctaggatttaatttcacacttaagaatatcaacaaacacagagagaaatttagataggtaaactccatttcccttcccaccccaccctagtgctcccctgcactgtttgcatttcagaacaaatgcttcatgtctcttgaaaagcgccaggaaatctcttctctagctatgcaggcctcaattttatgtgtgtagtatgacacaccttaaaagagagagccccacaaactagagtgggacgttaatttaaatacagacttaaggagaagagctccatctactgaatcagttagatcatagtgtgtaccctatagttatcccattcactactttcaaccacttagaggctctggagggaacaggaaagttatagacctgagcaaccatgaaaaacagctttgagcctaatgccatttgggatatttctcggataccctgagcccctttcctttgcccctccaatttcaaagctttccatgttgcaatataaaataaaaatggatgttttgctatatgaaccatcccttggaagtagaaagtcattggttgttgaaggaaatgtctcagacagttgaagagaaagctacagaaagaaaatctctagctggcaggttgggcagcctaggtaagaagggaaaagaagagtagcctacttactcctcctgccttgcaccattgctggggaagcctgcagccacccaggatcagctcttctggcctctccccggctgcacagtattgttgtggcattgggaatttgctgtggcttcgtaagattatggggatgtgcttcagcaagccaaaaaagtcacaaacaaaattcaagaggaaaaaaaaaaagtataaaaacagctgatcttactggagaagctcttggcattttcctacatatgccacaattttctctggtatttcctggttctgtgatcagaaaaattatcgtatcatatttattactgttgtttttttcagggttgctggtggtgacgggtggtacagtgagggcaaacagatggatcaaggagaagcaaagtaaagattacttctcccacttgtttgaaagctttccaagagattgcaggttaaaaaatctcttcttcagaatactgaagatgtatagatatcacatataggaaaagatggccatactctttctagattgggaaagaaaaaaacttctaacacagtaacagattcggaacaaagcaaattgtatcagaaaaaacttaaacgttcatatagctgcataaaattcagcagcatataagacttataaaaatacttcataaattaagataaaatatttgaatataaatgggtgttaagtatatatataattggatgaaagcaatagttcagtgaattttttattacagaaaaataaaatataatgaattaacaaaagttttacagtaatgctaaccttttctcttgtaggttaaaatagaattaatgtaactgtaaagtggattcatgtttccctgtgggtgtgaatgtatatatatacctgcccaggtattactgactgacactgaaaggtgatatgttgcaaagaaattcaaactttgagcattattttaaattgggtatttaaaatatcagtattaacctggcaggtttctttctttttctttctttctttttaatacatttaattttcagggtctgttttaaagcacgaaaagaaaaacagattagaaaagcattgcacatcaataagtattttgtaaaataatccatttgcatttattagaatattcagttctcaaaaaacggctaattggattttcttcaagccttttcaagacaagttcagttctgtgtcaaggataactatgagaaatttcacctcaaaaggtaatttgtttggttagttataaaagcctgaaaaacaagattatctccaccataactataacaaaacagctaatgagtaagtacattctggtaagaatcgataagaatggcaaagcctgagagggtcatcgcagacttgagaaaggtaaccaagtgaggaaacatcaaacagagttaaagcattctgaaaaacggaaagtgttaataatcactgacaggaaagaatattcttcgatagcgatgacaacaacaaaacaaaacaaaacaaaacaactaaaacaactggaaatacatatctccagaggcaaactatgactacttattaagcaagaggagaacctgcttctttgtcattccctttggaagcctagctttaaaaaaaaaaaaaaaaaaaggttgcacaaaagatacatgtgttccttttctggtattattacaggcccacctagatttagctttcgattccagatgagatcaggcatgttcagactagcacatctttgctctgtaagcacagagctgctatcatttcactggcaaattctcgtatccccaaatttatgcacaatagataccctttaaaatctgcaaattttctatttcagtgaaataactgattgagttaattttttttcttaatttacgctgctcgtattaagctgaaaagttaaggcaggcaactcctataaaaaaggaaagttgaacagtacttaccctaagtgtaatgtgcaagccttaatggggcaatttacttttgctctatgatatttagaaaggtgtccaggtctaaactcagctctcgcctttttcccttctggaaaactgagtagactcacagaaggtgcctctgcgaaagatcatacaaatcaacagccttacctgtggccattcagaagactgcactttggtgtgtgtttaaaactatgaataaagtcagatacagcgcatgctcagcaggcaatttaaaaatatttataacattgttgtttcaaaaacaaatttcctcaaacaaagcaaaactcaaatttttttatccatgccaagtttaacgttctgagacaaagctgttttggagttttccgctgaaggaaaaaaggcttttaaaattttttgttgaacgaaaaatagttctctcttcccttttgggtacgcttaaaggggtggaataaatttttctccaagtttcaacaaaattcacctctggctatgataaggcattacaaatttaaggtctgtaaaaaataattttagagaaactaacaagaaactaaaaactatgggtttaaagaatgtaatggtcatctgaactttcaaggcagtcttgcatgtaactatacaaaaattatatcctgatacaaacaggatatattatatgtagataagaataatgtgtatacaaccatatgcatacctagagaagttttatttttcttttgctaactaaaatcagaactctctaaagccgaaaaagaaatacaacaaaaatttaggagaaacccagtaataacatcggcacaattcatctgtttttcatagcaagcgtggaaaagaaggcaatcataccaattgattaaattttgagatatataaaataaaaatttgataaaagaaggtttttaaagtatgaattgcagtagaaatgcctgtttcgttcctggttgaaaatttctttctcttccttgaatatccctaagcattccattttaccatctatcaccaaaccctgaacagctcacagatctcacagatcttatttaaatctcttacttaattcttaagtctctgaatgaatttcagctcctgctctactttccaagggtgctcagctggcctcacaaaagctccacagacacatcgttcactatctctgatgctttcaagcttaacagaggatgccaaaaaaaaaaaaaaaatcaacgattaaaaaaagtttattaaagtgaaactaggagtgcaaatttgaagaagttgcttctacttttatttctctctcaactcagcacaggtgtttcctaacttatactgctgtgcatgctgatgaaggggagggttaaattaaggtgagggagtgggccaagggcagaccaacaagcatataggatctccagcctcatgtgttaatggatgtgtttaaaaatggaccccccaaaaagcctagaatgaggtttctttttggcaaataattaaaccagtatactgaaataattaaagctttgtctttaaataaagcatcagatcaacagaacaaaaacaaagataaaaattgcacacacatatgcatgtgcgcacacacgctatgacacacacagatacgcaaaactagtgggtgaggggagaaggaaattaaataaaagaaaacaaacagagtcctaacaggccattctccgaaaaggaatctaaataaaaagtcatatgatatctgatagtgcaggacacgtcgccaagaactggagcggattgcctacaggaagaaagggccagtgtattccagctcaaagagcttttctttcctcctcctctattttttttcccttttctcctcgactgtgaatgtgtcactctcaggtcagatccacgaagaatcccagaatgacagctatcacctgtcactgtactcttggcggcacaactagctgataggagctgcctgagttgggatcaagaagagctagtgcagctttcagtaacagcctgttatcccagtccctctgcccctttcaaagatccccttggtcacatcaaaaacagaccaaaaagaaaaagaaaaaagaaaaaaaagggggggtaccaaatgaaaaattaaaaatgcagggacaacagcccacagcaacaaaagaattcagggagaaaaaatagaacacaagcaaaaaggaaaaaagcaaaaccaaaacaactcttgtcttcaatataaaactttttaaagactgagtttctcttatttggatgacattctttttaaaagtatttttctccttaagcactattaaaagcattaaaaaattctacaaaaatacagaaaagtctgaaagcaattcaagaatattcctaaagaaaacatgtaagtgtaagaagtgagttaccctggaaaattctggatttgccaaaagttcccctacttctaatatctttcagtgagttcaagtgctaacactggccacctagtacttgttttttatctgaggatcattactgaggcaacacatacatagtaaggtttcccgaaaagactccttgttatcaagttacttcaaacataaggcactcacacctcccagccaggagggttttttgatgagcatcacactctgccctgatatgtattacacccttaagaagcagttacataaatgcattctataattatggaaaatgtatatatctatattttcccctacattttccctccccagggatatgaatagattttattttcagttaatagaaaaaaaaagaaaagagtttctgattcttgaaacaactgttgtagctgttttctacttagcaaaacagttatctgtagttaggaatggtacataatatatatttaaggatttttgtagagcttgagaattgttccccttgtttagtttcgtgtctataatgtaccttaaaaagatttctaagtgacaatcaacatataaatgcattaagaggagaactttaagaaagaaaacattatcttgggtttacaaatccaggatattagcataaagatataaatgtacagcatatataaaagataaaattgtttactacattttacacatacagctcacatctgatttctttttgcttttgttggagcattaatttgaaaatgataagcattctgaaatgtttgctacaacacaaattcatggtaaaaatatacatgcataggcaaaaattgaaatggagaacacaaagctacgtggcaatcagaatcgttgacaaaatctccatctagactatattttgcatgaactagtgtatcatagaaggggcaagaaatctctctgggggttttgtcatttacataattagaaacaaaaataaaatacaaatatctgctcccttactaccttttcttaataactgacaagtgacacaagtggtaccttttaaacagatggatgcaaaaacttgtgagatcgaatgaactgatgtaccccattggtattttgggaacccaaattccataattaactttttacccaagtggcaaaagtagaagatgttctagtcaccaaattgattatttgatggacttttgttctttcttccacaagattttggcgacccagaaagggtaaagacatgataagagaagatgcatcctgaacaacttttattgtgagtagaaaaaaaatagcataaagtgagcataagaacagttggatttggaaagattaaaagaggagaaaagagcaacatatgcaacttaactagtctttttctttttaattttttcatgtacatatatgtatatattgggatgatggggagaaaagataactggatttcttttgaatgtctttgtgtctttatagagtgaatgttctgttcctgtctctttctttttaggcgaaaaactaataaaaatagaaaaacatatatcagacattaagctcactccccccccccccacccttccctttgtaaagaactctttgttctctagtgaaaatgctgaaaaatccccgggcagctactccctgaaacaagtgcaaaacacttagaggcttttgggctggctgggagccagaaaccctcccgctgtctggttagaagaggaaaaaaagaagagagagggagagggagagaggggaagagggatggggggcagagagagaggaagagagagaggaagagagaggaaaagagaagggagagagagagagagagagagagagagagagagagaaattggagcttcctttaatagacataggaagcagcgtttttttctttcttttttttcaaaactggcggtcaagcgttaagtaactcccgtctaaatccacctgctagaaatgaacttgggtaaccccccaggggtgcacaaagacagggaagacagtaacatactccatactctttcccaccccccgttgtactgcttccattctttctgctctcatacacaaatgcccacagcttctcacgccgcccctcttaccccccaacaacaaacacagcaaaatacatgctccctcggtctcctaaaaaaaaaaaaaggcttttccatctcggttgcgacacagtgataaggggtagcgaacatctcatacctggtgtgaatgctaatcagtcaggagttctccttttcccaagacagggaactgtttccttccaaatttattagaacctcctccactgcctctttgaaaaaccttctttgtcaccctctcccaagtcccgatacttctttaaaaaaaaaatggcttcggagctccttctattcttgatattgattctctctctctccccccacccctcctcctctctcctgtctgtgtctcttctgagtggtctattgataagtccctggaggcactgggtcagcctgcccgtaggaaaccagacacaatgcacaaatctccgagtgccattctgccatcagcaagcagaccacgtttaggagagagagagaggaaaaaaaaacagtagagcaagagacagagagagagagagagagagagagacaccaaccgagggagggagagagagactgagagagaggaagagagagggggaagagagagaggggggggagagagagagagagagggagagagaggagagacggagagagagagtgtgtgagaaaaagactgattggaacaggagggagagagagagaaaaggagaaggagagagagcgcgagagggagagcggcactgccagtcaggttaatcatccctactttaattagctgttcggcttagacataaaacaattgaatttgaatgatctgtcagcaggctcggctgaaccaaaggggaaaagcgaatattacaaaaagactgttggtgtgttctgataagcaatactgctcgtactgacaaatcctcaaagggggaactattaaaacttacaactaaacaaaaagtgcaaatacaaatggcactagatagaggtctttaaaaaatggagttttctcctctagttttatgaaccatagatatttatgtgcaggtgccaacatattaggggttttcgtgtaatgtgtgaaagtttattaacgatggtctaggagtgtagcagacagatgctgcagagaacaagacaggtacagtcagatgccgaatctagatcttggagggagaaggatgctggaagaagaggcaccgtggcaagagatcagcacagacaaagtcagtgggcagataggcagacagattttaggcacggcacgatctcatctaaaaaggcaaaagttctgatgcaatattaggtacaaaacaatccatccatcctcctctcccgggtgcactccaaggtacagttaaaatggattaatctttgtgacaaacagagctggcaaggcagacactgaaggcgatttgcagacccagagaatacagagctagaaaaagccccagagatcaatctctccccctcccaatttagtagagaggaaactgaggcccagagtcgacactagacactaggactccaggagcccaccaggccagtgctctttccaccacaccagctaacctagagtattctttgaagatctggcccaacaggtatgaaaatcacccttacctcccaaataagaagattactccacctatatagttagtgcacaaacctccaatttctcaaaatgtttaaatagccaaatggaaatataattacatatataaatacatttccactttatatatatgtgtgtttatgtatatatatatatatggagagagagagagagagaccattttgaatgctaggaacaagggatttaagtctttaattcattctaggagaaaagcagaaaaatataatattgtagaggcctcgtctcagcaagatataacttgtgtcacattttcaagctaatgaaggctagtggtttgatctacaaagacctcaccctgaatttacaattcgctctatgaacatcatctgctatatatcaccaagtgagaagatgtggtttttctcatacacctcgtttctaaaatataggcacattgtgggtgaaagagattgagtctttcagcatactatgtagttttaaagcactgatgagattttccacctggagaattaggtatgtacaacctttccaatatatttcaattgaaaatgagctactaaaaaggggaaactatattttccgcccatgaaagtgatggtatctttttcgggacacatatgatcatgttcactaaggattcccttttgacaatgggtaattgaaggtccagtttttaaatggtgaaagaggtgcttatgaagagaacagtgccatcagatgttactggagagattaagtttcttgccctaaaacaagactcaggatgtgtatgaaaccgaaaactatctctcagtcatgcttcagcaacaacattgctacttagggagaaagaagaaaaccgaaagaaatgtcaggcacgtgggagcccactcaaagacaagtaatctgagagaagtcatagccagagtaatttagtttatttgcacaccaacctctttaacaatggctgctatgccatgcctaaaacacacggcctacagttgactgatttggaaagggggaaggaatcagtgattttgataatggcagatcctttggcaagccccaaaatacctgataggccagagcccagaagaaagcagtggagtgcttagtaaatgtctgttggtgaactgagaaaaaagaacaagagctttggagcaaacacatatttatatataacactgcaaaagtcacagctactctgaaagcctcagttttcctttctgtaaaaggtgatgatattggtcccatagagttgtcttaaggatgacatgaggaaacatataaagtacacagctagtcattacacggtagttattatggaggaaggtgtgtaaacaaaagtgtatattatggatgtgctgagtgtgttatattcaaagcatgtaggttcaagacatgaaagcatatagcaaagcaaggatctaatatacagatctctactagaaaggattggcagtagagattataaagtttagaactaaattcctaaaatctaaacttcaaggatgttaggtcatctggggttgtattatttctttgttcccagattttactatatttcctggctcataataataatgatggccaacatattactaattggcttgccctaagcagtctgctaaggactttacattttaaaatcatactttagcatcacaagaatcctatgaatgaggtactaccaatatccgcatttcatagaaaagaaaactgaggtatagaaagattgtgtaacttgctcaagatcacacgcctagcaagtgaggagctgggaattaaatccagccaatctgattttaaagcccgcattctcagccatggtactaaactggcacacagtaggtattcagtcaatgtgtgttgaatgaataagcaaataaaaaaaacactagaatttttatttcattggagatcagtaataatctgtgcaaaaccacttgagagaatcttgttttcgaattatagaatctgtccttcttctgtagctcacttcaggtgtagtcctttgtcagaaaccagggtgagccatgtccctgcatggtgctgaaaatggatgaagggaagagtgctgaccatgaccacccagggcatttaaatatctgacggcattttcagcactttgaggacagtgttagcacaagggttattaattggcttaattccagttcggataattacatcgtgtctctttaattttcccccgactatgccattcttcacttcctgtcacaaatgtgctctttaaaaaagcatacgaatacacacaaacatatagttatatttaaggtttgcataatcatttagggtgcttttttttctaaatgatcagtgtatagtagctatgtaataaatgaatgggcaaaagaattaaagtcattgtaaaataaagataactagttgaagctttttgtttggcaatgaaacagatttttaaaacatttccttggtgacagaattccaatcacatttttttctcatgggcagatatttccagagctgatgacctgctcatgataagctgattttcttacactatgtagtttccagtataaaaaaataccaatgaaaacttcgatattttagagtagaaaatgagactaagtcctgagtggtagagcatactgaacgtacgggttttcagtgaattattaacccatttattagctctgacttacttgacaggttttttttttttatctccaaacatatcactagaataatcttcaaattatgaaagaaaaggacaacatatcctaatttaataagcttaggaaagtttgacagtcataaacagacacaactccttttcctttttccaaagaattcttggcctttgaaatactgtgcctgcattatactaaagaaacactcccagaaaaatatgcttaaaacatgtacacaaataggtaaatgcacccatggtagaccatagtttattaggcctttttagtgtacatttgtatgaataagtcatcaaatatagggagtgtggaaaataagagaataaagggttaatttatttattatgcaggaaggtttctagatctttgctccttcagcttttagttcaaaattccatgcatattctgcacataataataaatgccataattcaacgtatctcataatttgatttactttcaagcacctttttttctggttcagctcttgaagccttccttcttataaacttcctccaagttattttttgtagcgctctgtaaaatatcatttaaagttggtgttcataagataaccctcatgctatagagagatttgtatcaaactagtccatatttccttttgagaaccagtggtcaagtcccatgctcttatctgagaacaagccacaataaatatataaaacagccctttcccacctgtttgacccctgtaataatgatagcagtctctcagtgactgccctctggttagttactcattccttaagactgagctcttccaggacaaggtctttccattctaccttgtatatttaatgtattgtccagcatcacacctgccatggtggtagatgatctcccagaaaagctggaagcaacaaattttaattccctttgttcttcatgagtaaatacaaatttttctctctgtgtgtcaagttttcaacatgtaaaaggggcatactttatcctaagattagtgatttgatgttcagaaaataatattggagggtatagtatttaagaattagctagtgaaaagcacttgttttggttattttcatagtatcgccactatttttatagcaagaagtacttagaaaacatgttttaaattcaaaatttaggtgaattttgaattcaaaagaaaagtggacaagatttatcctgaatattagagatagtaagcacttggtttttaaatgccatttaggaacagcctgacagattttatacaagcagaaggtatttaggaaattctctggttctctcagtttacagagaagagctgagtggcagagatattttatctgacaagcttaaggtaaaaaaacttggtagaagtgaactagtgctggaacccagtctgtctgtccctggttccacactcttctcactcatactttgaaagatggcttttatactcttgactccagatcccctcttttttggacatattttactgacggaactcttaaattctggtgctgataaaggggtacaatattcctaatgtagtctgataaacacactacaaaggaactatagtaggctgaggaatggccccccccaaaagatatccatgtcctaatccccagaacctttgaatgttaccttacgtggcaaaggggtcttgcaaatatgattaaattaaggctattaaaatgaggagattatcctggattttctaggtggactctaactgtaatcacaaaggttcttataagagagaggcaggaggatcagagttagcagatgtgatgacagaaacaagaggttggggttatttgaagaaggggtcatgcaccaaggagtgcagggtcctccaaaagatagaaaaggcaaataaatggatcctcctttatagccgctaaaaggaaccagccctcccaacacctttactttagtacagtgaaactgatttgagacttctggtttcagaactgtaagagaatacatttgcattgttttaaaccaccaagcttgtggtaatttgttataacagccataggaaattaacacagggaccatcagctaccttgatctggacataatctttcaacacagttgaaatatttcttagctctttaaaaaattattttagcagatatattaccttactggttcaaactgagcttgtgatacaagaacccttaccagtcttcagaaaaatattgactaggataagtcaaggagggtcttttctcctgacactaagagcttccttctaagttgacataaagcaatcaatctaatgattattggttaattgatcagttggctgcagatccatctaatcacatttgcccacctcctgtcttatagtaactcttcactggtggtttggcaattgtatctccaagttaatctacaacagtagttctagttagaagcaaagagaagggtttcagtgtccatttcttgagtgccagagacctgaactcattcagaagtgagtgctctcttgctagacccccaccccacatttttttctgagctttcttaacagaggtcagaaaaaagaagcatgaggcagcttaggcaaaaaacaaacaaaacaatctcctcccccccccctctttttttttgagacagggtcttgctctgtcaccgaggctggagtgcactggtggtgtgatcacagctcactgcaacctcaaccacctgagctcaaggaatcctccagcctcagcatccagagtagctgggtgtgaccacaggtgtgtgccaccatgccaggctaatttttaaatttttgtagtgatgaggttttgctatgttgctcaggctggtctcaaactcctggcctcaaatggtcctcccacttgggcctcctaaagtgctggattacaggtgtgagccactgcgcccagcccctatccaaactttaataagactcttttgccatagtgtatcattgccattcagttaccgcttacattctataggatagtgctcctaaaagagtagtccttgggccagcagcatcagcattgcctagaaacttgttagacacgtaacttattgtgtcttattctagacctactgaatcagatgctcagaggtggatgtctgagtgtgtatattttaacaagccctttaggtaattctaaagcctagctgagaacaattgtcataggacaaatctgtgaggctcatcaaggctaatgaaaaaacacgttggactcagagtgagatcacctgctaatctaggtgtcatggtgactctgtcatttgccagctatgtgactttagattatgttcttagtctatttgtctcatctgtaagatggaaataataataattaataataataataaattgctttatgtgaaaagttaatgtagaagttaacaagatcatgcatatgaaaacactttacaacctcagggttattattgtagaagaaacatcaatttggattgcaagtatcctaggaccacattgttggtgatattgccttgatatttcatattaactagggctcccaggtagtaatactgaaaaaaagttcaagaagctccagatgtccaattctccaggccaaaataaaggctggaagtctgtagatgtttaaagggtgtgatgctgaatggaggatctgctggcattattagtctctagaaccaagtgctaaatttcttgatttgaaagtctacctttctatttatcaggtagcagaatttagtgacagctttgaattctgtatgccagtgaaagtctatggcttgtgggattcagaaccacaattttttatcaatttccaatgacactcagttttagtaaagtggcccatgatctcttgcatttccataccatattctcaaataagtaagaagctccagggagctcgctcaacaattgattatggtcacatattttttcaatagaaaatatgtatatcctggtaggtgggaaggatggtcctgatcaggactgagatctttttagaggttcaagtccaaactcttagtaggttgaagggaactcagatgcaaccagattagacacaactatgattttcatggaaaatcatcagaattttatccaatctctgagtaatgaaaatttgcagtatttctcaacagctctatatatgtggagaaaaccacctcataagaaagctaaccatgtcttttccttctttcatgaaataatagtgacgtatgcctcttggcctgaggactcgtccttcctctgaagactaatgtctgcacgtcaccttttggcaacccctctgtgccttgcaggacagttgtgtagcaaagattctgtttgggttgctgtttcctctgagccagtcacactggtgcatcaggagatgcagctgcaccttttaagagctctgtgtccttaagcaagtcatctgtccttttacatttcatagatttttcatttgtaaaatatgaataatatgtgccttaccaatcttacaaattgttctgaagatcaaaatggatgatgtatccaaaatgctttgtaaactaagaatctcattcggttggtgttactgatgttgttattatttactctttagcaggagagtaaagatatatacagacatattgggtacggtagcttgaatatttttagacatctacgttgtatatgcctccaaggtttccccctgaacttacattaatccctttttcaggttacagctaaggtggtaactaaggatgttaatttcctttaggtccctataggatctctattttgatcatgattagtttatacatgaaatagacactgctgcagaatttacaatgtttccattctggccaactcaactttgaacatattccctaagtaagaacaaattcagtactataacactgaagaaaacatagcatccgaagctggtattgagggagtgaaaatatcttcaaaggctttttcttgattgcttaatataaaaaatctgcttagaaatgtccactagttcaacaagcattcctgaaggaaatctgtaacaaagctactgtgcattaacatttaaaagaacaggaacatgtagtctacctcaaaacaaattattattgcttgaattgcccaaactttgttaaccaaaattgaatttcgcctaagttgaattcatgtgaagagctcataatgcattgttgctatttagatagttgtcatagtatgtggtactcagtaagtcctctaaaatggaagggaaattaactacatggtataatttcaacataagtcattaatataattgtgcgaagaatatctctgaatatattgaactgctatttgaatctttaattgtgcatacaattctaccttttctgctatgcatccttaactagactatatgctccctgaggacaattcctgatttacacatctccaaatttcccgctgccttcagtacagtggtttacaagtagcatttgctttcaaactatctgctgtttaattatattcactttttattggcttttcttggggggcaatttatgcacataaagtgtccatagataaatgcatcattatcactgaggtgaaagttgtgattcttaatttttttaaaaaaacatatacattgggccacttatttttcctgtgtgacactcaatctaattatagaagtgaatagaaaaacatgatctcttttaaaaggcgcactttacgtgaaacaattttaggaattcagcttatgtgtcaagtacagtcattctgcacagtgatggtgatggggaggctctatgtactatggttttgacagaaaatattttaacttaaagccagctacccataaaattacgtaaacataaatatgcactctcccacaaacacatttgcacatctttaaacttagattaatgcaaagaaaagatatattcttttgttctagtggaatacaaatgataaagactaataaatgaataaataaagctctaggtaaccaaatcaatgtctgctcaattctggtcaaggaggtgaagggaggtttccctttgagtcagagaatgtagtggataaaaaggacatgaatagctggggggatttcctgaggccattgtagaccagctcacacactgttaagaggctcattttcatgagacttttggttgcatttgtaacacttgctctaggtcccctagagcattgagtgccacatcacagcactacaataacaggactaaatgcaagaaggtacattacaaggttctttttctttcagctctgaatatccaggagtttgtagatgttctcaagactttttttccccttcgtttttccttctcccccaacccccacacactcccttcaaatagaactaagtggaaaggactgttttgtttttaggtaaaaacctaaattcttgtacttaaaaaaaaaaaagccagttgtaaaatctgtaatataattaattatttccataggtaagagatattttattttttataaaacctggtctgactggtaagtttgttctagattaaggatttagctacagtttggtgagtgtttgttctctgttaggcttggtgcatattaattcgtacatattttaacatttcactactgtattaaattattaataatttgaaatcattagcttgtactgacaccatttttctgaaacagtaccacctgtttcttctaagtttggtccagaacaaaagtctgaaatctaatttgtcaagaaaacaaatgtgtagttcagaaaaaggataggggccaggtgcggtggctcatgcctgtaatcccagcactttgggaggccgaggcgggtggatcacctgaggtcaggaattcaagaccagcctggccaatatgatgaaaccccgtttctactaaaaatacaaaaattagccaggcatggtggcacacgcctgtaatcccagctactcaggagtctgaggcaggagaatcgcttgaacccaggagccggaggttgcagtgagccgagatcgcaccattgcactccagcctgagtgacagagtgagattctgtcttaaaaaaaaaaaagaaagaaagaaaagaaagggataggaatcaccaaaagaaggaggtccaaagtccaatgttaggatgattatgctcatgacacggccatttaatctttaaaacaaatataaaagacaggtattccctgtggcagagctgagctttacctcaggtctgtgtgacagagtctcatctcttctcttatacatcctcaatcttcagacatttaaggtctctgagtatccaggatttcctttgcgacaataattaacaaatacatgtatgtacatttgtgtgtgtgcattatgttttaagcatatatatatatatgcaggaaactcacatctggagtaccagagtctacaggccaggactagatacttagatctctagggaagtgatccaaatatctagttgcagctatgtagatttcaagaatgcagtgaggggagaaagagtatacttaatatatgagtacatatacactatatatatcccatatatgtatgacatatgtaactaataatagtcaaccctcactaacacaatgtgcctaatattattgtaagcacttcacaccccgttactttgttctcataacatctaaggtaggcatcattattattatcatctagttttacagatgagacaagcaaggcacacaactaataagtggcacagtccaagttcctatctgtgatcctgtctttttcatggaccttttcctatctgttgcctccatgagaacatatctgaactttggcctattcttttttaagactttgctccctcttaggagataacaagtagcagaactcacatgttacccagccaatagtgtacttagcttgggaacaaaagactaaatttgtggaaattcctcacatttgtacaagagaacgtcccaaagcaagatactatggcctggaaaatggaagagatagtttgggcaggtggatgttttgggtctcccaaatcacaacacatgtgcaatgcgcaaccatcaatacataaatccaatttaattcagtatatatttaataagcacctgctgtgagcaagggactctgctaggacctaagctctagaaagtagctacaaagattagaagcaataatcctaatatttagaacatgggagaaaagaaataccacataactaaaacacgatgcaaataagttaataccgtaaagcgttgctaaaaaaaatctgtaggtttcagtgacttgaggaatatcatttgctattcagcggtggacactgacaaagttacctgaagcaggcagtgtttgagatggactttggaatgtgggaaaattccaacaattagaaattggagagataggttttaggcaagggaaacagaaagagtcaaagcaagggataggaaagcacaaactgtgtctggggtcaatttgactagcttctagactactcaaaggatagcagtaggagtttgagatgttgtgggtgaaacatgtggaaatgtccattgagcagcaggaaacccacatgtgcagtaccagagtctacaggccaggactagatacttagatctctagggaagtgctccaaacatctagttgaagctatgtggatttcatgaaactgtccacagatttcaagaatgcagtgaggagagaaagacagacaaacttacattttgtgggcagataaagggaggatggatgaaagatcattcagatgaacaggagaaccataaaaacagacgctatagagtgtaaaggtgaagaatgcttcaaatgcttcaagaattagagatagatagtcaaaacaatcaaatcataaacaggatacctaggattgctgtgaggaagaggtatatttaagagctagagtcttcatcactgtactcatctttgaaaggaccacctcttattgctttctaccctttccctaaactcaagcatgcatacaatcacacacataaacaaacattattttttcctaggaaaaatgttggcattattaactctgaagcaaaactatatctggaagtttttagagtagttagcaagatccaaactttatggtttgattttaattcaaaagataactgaatttttatatgcaggttaattattccttggtgggaatgtgaatttatttgtattttattcaggaagtatttttgagcatttcctaactccaaggtattgtgctaaacgctgggatcagaaaaatttccataaatgcttggatggcttttacctgggagcactccttcctatggttggcaaaaagctgacgcctttgtgatgatgagtttcagtcctagcctctaagagtttttgtggtcatgttattaagtgcaatgtttatgtgtattttttctgttccaagattttttttaaagttttgaatatttttttatgtcaccaaaaggtgctttagaagaacaaactaactcaaagccaacacagaaactggttctcttgctttgccaaagtggcagtgtagcatgtgggcaagtaagaatacttttctcaagtatttaaaacaactacagaaatcttattcttcattgtattctctaaagaataaaggtaagaaggaaaatcaggttttgatagagaattaaaaaatagctttagcatatgttcaaaccattaggtcaaaagggactaacaaagccctgtagaaggggacccacaaaagctgcccttgggacttacttattcacttatttgtttatattttttgtatatgtacatatttttctgatactgctttgacacatcactttagctctttttctatatgtatgaatattcttctcctacaacataggaatcttgatgtatacatagtttagtaatctgcattcattctttcaagataaacatttttaatcctacatggtattctattctaaggatataccagcataaaatacaatttaaacaatcacctatttttggacattttggttgcattctgacttttattcttttcaataattctttgtccagtatcattgggcatagtctttgcaatgctattatttaatgaaaagaaaattttggaaactttaacaggtaataccacaagcgaggaaacttaatacaacgaccacaagcaatgaaagaaaagtcaaatgcctcaaggagccagggtggaagagcaaatgagtgaagtaggtgtggcataaaatatggggtgatagggactttgtcaaactggagagaacatggtttgtctgaagtgagcagctgctactcagttccagatattggtgccacatgtggatgcagatctaatgttgtcagatctccaatttttcaagagaagcaaaaaaaaaaaaaaaaaaaaaaaaatctagtttttttttggtgtgaaatctctttaaccttaaaggttggctcaaattattttaaatattctgtggaccaaacatacattttaaaaaattctatctgctagctagatgcagctcataggccactgatttgtaactttctaattaaagaaagggcaagacggtgtttggaaatatatttctaggtagagagttaagcaaataaagttttacttcaagttttcctagtcacaaggaatgtaatgtggagagactgaacctcaatgtgcaaatcttgaaagatgggtaaatactgctccccacttaacacccatgaagaatttaatagaagaggggtctaaaatgcttttaatttcacaaagaaacatgctttaatgatataaaactctaacccagtgcactgtatgatgatatctaatgataatttcccttcatttcccatctgaacaaacatttcccattaacatccacctgcactacttcctttcataaagaggaggtggtatttggctatgttctggttctgattcatgagaaatcagcccaagcccaacatttctgttcttaacagattttggtttttaaatctgtagaacacaatgtttccctgggctgagttctagcatgccaagttttggctggccacagactttgacatctgagtgaaaaatctttcaacaatggcatttaaactgaagaatcaacagacctttaattataacactgcttgtaattccctccctctcttatcatgatgttcaaattgcctcaaatcactaactgcatggacagcatgttatttcatttgccattggaaatatcataattttaaaacttgggggcttgagattgtgcattaatttttgaaaaatcagtattacttattcaccataaattaaagaggcatatggaacgaaggtcaaaattactgattcattagaaataaaaaacaaaaaccactcaccacacaatttctcaacttatctaaaatgctcaagatttagattaaaaacaatatttccacttggaaattaagcattaaagatatagaaaaagggagtctctttttagtgagatttcactaaatacctctggtatctctccataaaatgttaggtgatcatttcttaacagctttttaaaaatgacacagtctcagattaccctatgtttcccttatataataacaaaagacacttttatactactaaagtacattaggaatcctttgaaagtttctgttttagaaactgatgttgaaaaagtacttaatttatatttaacctgcctatctgaatatacttagtggaaaaattagggttaaaaatgtaaatgtggaaaatgtttatttccatgttttatagtagttagttttttatttgcttttaaatatagatcttggttatatgtggaagacaggcataatttcagctcctttttcatcttgaagagaaacctggctctcaatttccaggaaatatatttatttagacctaacaatataccagaattttatgcattatttctaatcttcataataagtctacaagttgggtgtcattaatctgttactgataaggaaattgaaactcaaataaatttaatgcttttaccaaggtgatttagttagtgtctttttgtccatggattttaagtggtagaatttgcatgcaaacccagatatgactccaacggctctgctttctcctttagaagaaaaaaactccttcctgaaatactaacatcttttctttgtgtaattgaccatcctttcttaatacaattggttatcagagctatcatattcttaattatcagtattaccttacgactctaaaattcatctttgtccagtgtatagaattcacatcctaaggttagatataggagattaagtctctgatctcctggagcagacctggtttcaaatcttgtcttttattatccccataaatatgcatgtatttataaaattatgtcctaagtctttgttcagaaaatatgtagtgtctgacattattttgtgtataaaatgctgaaaaggtcacatccaggaaactagtcctgaccagcatacaacactcaagaaaggttctccaaggtagaatcaggggagaatcccaattgaagttgttgaggggagtaaagataataaataatattaacaataataactccatgcattgaactcttaatattcttcatcctatctatatatcatatttaatttttacactactcccattttgcgtgtgagaaaacagaggcttagagatggtaaataactagttcaaggtcacatgactagtggcattttactccagagctttgctttttgtactttgctaaactctctcccagaatatgggaacaaaatctaaagaggtaaattcaaagatcaatattaagatgataaatacaagatgcagccaggaatcaggaattggagtgggaacagatgaggaaacaaggtggtgggtccagcagggttgcatggttgaagtcagcaaatgtctgatatatgggggtgtcatgtcacattgaaagtacagctacatcagggaggtggagcgactgagagaatatgtagagggtgacagatataggactgcttggctgatttcatgtttttcctttacaaatgtaaataaaacattgtgtgttggaggtcagagggcaaaggagatataactgaggactctactcaaaaaaacatctcgcttcatgtgtcattaactgaacaggggaaagaaactcagttgtctaacaagatatttttaaaatatttatttctccaagagggttaaacctcatttacaccttggagtaaattactttaataaggttaccagatcacctaactgaatgtaactaaagtcaagaagctgcagtttgaatggggaaaggaaatggataactgtggaactgaagggtgggagaaggggatgatagtgacacaagcaaggataaaaaggatttccttaggcgaataggagggcaccaaagataattttatgaaaagacagttcagggctaaataaatgtaaagtactaacatcatcattatcactagttctactctgcacttatgtctagaatttttgtagtagccagtgtacagacaaaatcactaaaattggttgctaatttctgatttacaagctgagcagaattccctacttagagtaactcctcaaaacatacttgttgagcaaaatgggacgtcaaaattttgcctggaagttggaaactttcagattttccaaattccaacctgtttttacagtctaggttaatccagtctaacctatcaagttcatctaactgggtcctccctgggaaaaaggaagaaagaggacataggaagtgaataaagaattgatacctcagctgggcgcgcagtggctcatgcctttaatctcagcactttgggaggccaaggcgggcacatcacctgaggtcaggtgttcaagatcagcctgaccaacttggtgaaaccccgtctttactaaatataaaacttagccgggcgtggtggtgcaggcctgtaatcctagctgcttcggaggctgaggcaggagaattgcttgaacctgggaggtggaggttgcagtgagccgagattgtgccattgcactccagcctggacaacaagagcgaaactccatctcagaagaaaaaaaaaaaagatacctcactgctctccttcccttctgtgtggcccaatacagcatgctgttgaccctggggaagcttcagaatgtatgatctaggaaagctgaggcaatgctgtaataacaagagctatgtgaaaggtaaagtatgaaatgtatgatggaaaccaaaccaaagagggtatgttaaagataagcccattaaggaaatagctcacctgttggactggaatctcaactggctcttttatttcacgctaaacctgtgctgagtctgcacagaaggacttctgaaatgcttatatatacaacctgacaggtacaatcagaaacagtacaaggactgcgtgcctcaacaagaatagccagagcactgaaatcaattgcagagcacagacatacttcaactgtggctatgcagacagtccccaggtatggctggtgaacagcacgctttatgtgtgctatgtcccagacttcctggctttcttcccttccgtcctaccccttcggcacacactacatatctttcacattttataaaatcacaggagatttccaaattattgtgtctttcaaatactttaaaaatatattgtcctcctaatataaaggagagaggtggagtatttagctgatgaactgaatttgaaagtaagtttgcatttttgatatatttccttccttatgagtgagtcatgaaaaatgcatattttgtctaaatattgataaagctttagaatataagagctggagtgaacctaagaggttttgtagcccggcaatttccaacccaggatgtgtctcagaatcacatagagaggtttcagattcccagccaggcacagtggaatgtggctgtagtcctggtgactgggaaggctgaggcaggaggatcactggacccccagagtttgaggccagcctggggcaacatggtgagacccctgtctctaaaaaataaaaagtaagtagaaaatacaaatcacagattcctgggccttttccttcccctgccttccccaagtgattctaattctatgtcagttttggctgcttgcaaccagttatggagaccagggatcttgatcaatctcttcatctatctgatgaggaatctgagacccagagaagtaagaggtacagtgatttctctaaggttacacagtgtatgagtccatttgcacactgctgataaatacatacccaagattgggaagaaaaagaggtttaatggactcacagttccatgtggctggagaggcctcacaatcatggcagaaggcaaggaggagcaagtcacatcttacatggtggcagagaagagagagcttatgcagggaaactccccttttcaaaaccatcagatctcttgagacttattcactatcatgagaatagcacaggaaagacaagccccctgattcaattacctccctctgggtctctcccacatgtgggaattgtgggagatacaattcaagaggaggtttgggtgggggtacagccaaaccatatcccacaggaatatgttacaagtgaagatagtctatggacactgtaaaattgaccccattagctatatcccaaactagttcattattttagaatctattttgtgtgtttgcatgcatacagcaatgcttcacatatctgcacaccacttatgtggcattccaaatatggttaagaacaaacaaagtgaaaaagacctgcaagcagccaaaattggtactaaataaaccacacataatcctccaagtctttttaaaagcctcttctcttgcttctctatctagtgaggcataggtgactcaaaatctttatctccaagcccggcccttctgctgcactatagtgtcgtgtctccaaaagcctagtggaccactcacagatacccagtcggcaccttcactcagtgtgttcaaaattaaacgtgtgctttcccctcccaacccttctcctgctttgctgctctgtttatgactctactaaggttcaaaatcatagagatgtgtttggtgtcttcctctcccttgctccccaaatataatggattaattctcccgccacatttcataaatcagtttgccatctctgttcattccctctgcccctgccctagttagtgccttcattgcctttcacctggactattgtaatagtctcctgcctgatcttgtgtcctctggtctctccctactccaatccattttactcactgttgccagattaatcttcctgaggcacagctctgattatgttactctcctactaaaaactttcaatagctccccactgtctcctgaataaagtccaaattccttgccctaataatcaagtcctttcactttctggtcccaatatacttttaccgctttatttcccactacttatcttcacacattccatgctcaagttaaactcaattacttctttgcagaatctttaccctttgattcttccatgcttttctcatgatagagtaatgttctttccttctatctctgtatgctcaaatcctgcttgtttttcaaagcccaaatccagtgtcatcttttctgatgaagccctcagttagccctcctctgagctccaagaataccttatctgtactacttttatagagcatttcacttttcactattaattctagcaaagtagacacatgtctcagctccgttgctagattaaaacttctagggcaagacatgtcttatctgtgtatcctctccagtgccaagtatacaagtgcacgactcacaatatttgtcaagtgaatgagttcatgtatgtactttacacacaatcaaaacatgtttttttgttttattgtctaaagaagattagaaataatgcatcagagaaggaatgaggatcttagagacttgcacaacagaaagtaacttaatagctaaagaagaaaaataaaaactacgaaaagaaggcatgagaactaaagatatagcagtcagagggtaaagaaacacagaagcaaataatcttatagaataaggaccaaatggttaattgagaagcttggaaaccataaaataacattcaaatatgtagcattatttttatacttccacaccctcatcaatagaaacaaatttgaattgtagttcaagataacaaccctgaatcatttagaaaagtttgaattatggtaagtatattcttttttttgagatggagtcttactctgtgaggctaggtaaataagctgcctttattaatgaagaaattcatatttttctgaatattagagaaatattaatttttcccaattaagatatgttcatgatatacaatttagaaaatataggagagtaataaaaaatcttaaaaatcctaaaaaaggtgggattataccatatgtattactatgtatgctgccttttaacttaatatatagtataaatagttcatactattataggttcttcataaacatttactggctcaaaattctatctaatagatatgtcgtactatacttaacacagcactctagagttgaacatctagcttatttccagttttataatacaaatatgtctaacaagatttaccatgggctgacaactgttgaagcagagtgaggaactcatgagagttcactatgatattcttcctacttttgtatatgtttgaaatatctagaacaaaaaggtaaaaaagcatatttatgtcttaattcatttgtgttgctgtaacagaatattataaactggctaatttaaaaagaaaaaatatatttctcacagttctggaggttgggatgtctagtatgaaggtactggcatctggtgagggccttcttgctagatcatcccatggtggaaggcagagggcaagagagcacaaaagccagagagcaagaaggagccaaactcacttctataatgaacccactctcatgataactaatgcacacactcctgcagtggtggcattcattcattcatgaaggcagagccctcatgactgaatcacctcttattaggccccaccttccaacactgttgcatcagagattaagtgtccaacacaagaacttttggagacacagtcaagccacagccatatgataaatatcttgtgcataatggcttttgtttacttgtaattattttcttaggttgcagtttagggctagactgcctggatcaaagtcttaccccatcattacctagttatctaaccttgggcaagctgctgatgctttctcagcttcagttttctcatttgaaaaatgggtataatggtaacttataggggctgttctaaggatcataagagaagatgtgcttctaatcccttccacagtacctagaacactgttagtgtgcaataaatgtcacctttgaaaaagcaaaatactggttgcataattatgcgttgtgcttataaagaaacatcacatataaactgaaaaacatacctgaaataacatgcttaagtgtgcaccatttctatctccaggctaaatgcttatttcaaagatacgaccactgctaaaataatttagatccataattaccattacgaagcattttctatgtggttgatattggccttactgggctacatgtttgatgtgtactatctcatttaatcatcataagagttttctgattactttatagataaagaaactgatgcttaaaggtgaattaatgtgcccaaaaggacacagggtctgttttcaaacacaggattgaacctctggaattcatctctaagctactgaaaatgacctttgttccctgcactttttttttttttttttttttttgagatggagtttcgctcttgttgcccaggctggagttcaatggcacgatctcagctcaccgcaacctctgcctcctcggttcaagcgattctcctgcctcagcctcccgagtatctgggattacaggcgcccaacaccacgcctggctaattttgtatttttagtagagacggggtttttccatgttggtcatgctgggcttgaactcctgacctcaggtgatccgcctgcctcagccttccaaagtgctggcattacaggcatgagccaccgcgcccggtccgtaccctgcactcttttgcatagacttcagtctttctttctttcttttcttttttcttttctctctctcttcttccttccttccttttttctttctttctttctttcttctttccttctttctttctttctctgtctctctctctctctctctccctcccaccctccctctctctctctctctctctttctttcttttttttgaggcagagtttcattcttgttgcccaggctgcagtgcaatggcgcgatcttggctcaccgcaacccctgcctcctgggttcatgagttctcctgagtagctgggattacaggcatgcgccaccacggctggctaattttgtattcttagtagagacagagtttctccatgttggtcaggctggtctcgaactcctgacctcaggtgatccgcctgcctcggcctcccaaagtgctgggattacaggcgtgagccaccacacccagcctagacttcagtgtttctaatctttattcctcagaggcagatatgaattttggacaaagttttggtccaattttggatgtttaactggacctttgggtaaagtacctttctccttcccattcactttaatcagaattatttatttaacaaattttattctagcaaacaattttagagaagaaaaagtagtactccataacaagctgctcttaaaaatgcatatctcattctggaaaaactaatagctatcatggttttaaacaataattttccattggtttgattatcttatgtccactgtgaaacaacagttcattattaaacaattcattatcaaacacacaaacacatatacacatttaataactttaaaacagtccatatttacatattttactttaaatatgtaatctgaaatgtgtatgcatatgtgtatgtgtgagagtaagacatagaccccggaagtctgaatttggaaaaaccctgtgaaagtctgaaaaaggtggttttctacaaaccttatgaaaaattaagtcatagaaggtcacaattttaaaaaatagataccaaattaagtattttattctgggtttagggaggcttctcctgtgcaacatactttagaccaaggcagtcaagaaatactaaaggggatgctgcaattcctctgcctcagacagtacatttatgcatctgtattataaaaaatgtgccagctctagcaagctcacagtactgagcaaagtgctatagttacagctggctctgtttactctttttttttctggtctgttcctctattgggggggggccacagtagggtgttttttcaggatggggggaagaaggaaggagtttttgtgagttctattttggattttggtgaataagaaagcagagaatttgctagcctgttactcagttacactgaaacatgatgcaaactgactcaatttggagcacagaaggtgctgaaaaatttttctaaggaggtcttgaaatatctaagtctgccttcaaggaaggacttataaaaaaaaatcaccatgtaaataatagaagtatgttgctacttctcttaaacctgacctcttaagtcactactcacactaatatactctaaaagtagccagcatgatatttcaaaaattactttgtgtcctttatcctcagtagagtattaagaggaagatgcttgagtgtagacacacatgtgggtcttctttacaaagtcacgtctacatatgtacaccgttagaagtatgggctctaaatgattgaacaagctgtatttccatatttgtattgtccaacctattttcttttttcttattttcctgaatatgtctgaatatatgtgttcagtataaacatacaattgtgtggacgtgtctatgtgtgtttctaattctatactatcttgaaaatggctcagcgttctagaaatacagccacataatttgttttgttttgaaaaactgctcagcaaatgcatacaggtcataatggcaggtaacagaccatttattgaagtgctgaaacaaatagaaaacaaagtccaggacaccatcacagagcagtacttcccttgtgagatactctcagctaagtaagaattgagtgagacaacaataaaacaaatacccataggcttttcaaacagtaacaacccgctcagggttagcagcatttctagaccttgatggtacaatgatgttctcaacctttgctttcagacactggatcactgcttaagtagcctttatcttttccccctaatttttgttgaagatgcccttgaaattagattatatttgttcctaacaaagcatatgtatattgtggcatcactcttaaaaccaacaattgggcttagttttatgaagaaaaaaaatccaccaacctttcatgctgagatttctcatgctagttctcagcacagaagtgattttttttttttaagttgcataaagcctagcaaggtttaagttttcccagcaaggagaaagtgtttttcagctgttaaatttttcagatgctttttttgaatttggataaaactcaaaaacatgtttgttttaaaatgtaaaccttttcatgtacagaggtttgcatatagagaaatgctattactatgtttaaagatacttgcttttgaaataaggaggtcacatgcatttaaaaataacaaactgcatgttgctttatgaatgtcctattaagccctaacgtaaatatgatgttctggaggagcactgatgcacacgtttgctgataggatcacttacaacactgcttgtggatgtatttccatgtgagagcaaagggtggtcaggtttgaactgaagaacatccatatagtcagctaatatgctttttaaagaccttttacctcagttgcaacacacttctttgtcctaaacctgctggattactcaacttgttggctggactaaagctgacacaatacatatttcaagcacaaaaatgatgaggaacacatagggatgtcagcaaagaggcaaagaggatggtaagtcatcggaaggctggtcatttttttttttttaaacagttcaatgtctttactgttttctgtaatattatcattttccatttttcaaacaatggaaagaacaacaattagtttcatttttaaaattattagatcataaaggacaagtttaggaatattgtttctagcatactaatagatgaagttagttgtaaatcaatagtcttatttctctgttttaaaaaaatagcaaaatacagtattctgaggaaagttctgacagattggagtgttacaggatagtctgaaatctgtttcattatagaagtttggccaatatagagataatatattttaaatggcttaagtatatattttttgtggattgcacattctgtaagacggtttgagtgccttgagatccaagtctttaggtcaagactgaactctagaaatggccccatcgaatctacaaaaggatacattaaaaaaaaaaaaaacctcatttcctgtaagctgctgatgctactcaacagagttgaaactcaggtcacacgcatcctactactctagtgctgccccatttactaatccaaacgaggataaaccctgagagatccgttatgtttctacataaggagtgtacaagcttctcttgaaaatcattgcattgggagagacacagagaaataacagaggtgagaatccctccccgatttgcttgctaaatccgtattcattcctgaagatccagatcaaataccacctgactgttaggccttctctgagaaactctattttgcaggcaagtattggaacgactctatgcgcatctccagtcccaatgcatcctttaaataatctgtttcctctctgtttcttgctgcattacagacatctgtgttacacatccatccttccctaatagtcagtggactcttttaggtgaaggactgtgtctctatgtccctatgctgaaaggacaatgggaagagatggtgctattgatgcccagaggcctgggtcaccagggaagctggagtcacagcaggtttgttcagagggagtaaaccacaaaggaaatgtggctggtgatgatgatgatgcaaagaacggtgggggaaatctctggcctatgccttctactgaccctcttgccactcacaagtgtctcacaagcaccaaatccaacttggaatctagctgacatgggtcagccactgttgtagagcaagggtagggtgagggttgggtctgagggtaaacacatccacaatgtgggagcaggaagatgtctttgcaggggggtgtctaggactatggacttaagataacctcacagggtcaccatgccccagcatgacccagaagggcccagagcaaggaagacatgacaaaggagcctgaagacttgaggaggccttggagctgggacaaggaagacacatcagggatctacatggacaggaaactaaagatgaggtgggctctcagacatctcagggaatttgagctcagaagacaacactgagaagaccagacaccatagtgagtagactgtatctaactgctctccaccctcactttcatattgcatttggatggcactccaaggaaggggagaggagaccacctagcagaatggaggccaaatctgagttacctcatagataaggaaagaaggcctgtgatttttaatgggtcagtcactcttaaattttaagcaaactgtagattttctgaataggagaagatattatcttaatctacacaaattttttgttgtttttttggcagggtttaaaatatttttattcatgacttatagtagaaactacattttatattgtgacccagtaactgtttacacacatacatggatgtatgtgtgtgttctggaggtagaaagtaaccaatctgctcaaattttaaatattaagattattcataattctttaagtagtttattgtttggaaagttatagaccaaggtctagaaattcagcagacctctaacctctaatcaaggacttttaaaaattaagaacagtacctgattttctgatttagtctttgaaatgccagtgctattcattctttgccttattcactcataattatttattcattctccaaacatttattgagagcttactgtatgctttatactatagacctgcagcacaaatataggcctattacttcacagctgctttaggatttatagcagtactggtcagatagttcttaaaaaggaaaagttttcagagtgcaacaacctgttcacaataattcctatgtagcagtgaagagccttgacagcatctcttttactttctcattgtggttctagtttaataacataagtctatttttacttttcatatttaactttaattaaacatgctatgagtgcaatcatgagattttaataaattagactatttgaaaataattttcccataatgatgtcttcctcatatctttcatgatacacaaaaagaatatttgtacaaatattttgttgcttcaaatatgcagaaaactgaccattatttacagtgattttgaaaataaatgagtgaaagcatgcgaacttataaggagagtaaataagcagcacaccattaccatctgagacagcatggctgctcccctcttggtgagggcagtataggtacagcaagcagaagacagatcataagtatttactatcagaccttctttaagtgaatatgtcctattccagtagaaagtatcatataagcatacggcctgaatccaattcaattatttacatggctctaccagtaaatggttaacactgtagaccagaaatttagaaaatgcagaagactgaacgatatgtaagtgactgagaacatgagtctctctcctcatcatgtaggacatgggtcgaggtcatagacttaattggtaggagttgctactttcgaagagtgaaatgctttgaggcttttaagagaattttaagttgattaactttttatttgggggaattatgatgtgagctttattaaaatatcacaattcggcattgtttcataaacataattataggccaccttttcaaaaattgcaagagtagtactaagaaggtcctttgaactaaggttcaaaggaccttcttagtaactcttgtaatttttatgggtacagttagttgtctgcataaagtcattccattttccaaagctgcttactctttgcacaaatgacaaattggcacatgcacaatggcacaggaaaagaagtaactgctaaggtcacatatgtgaggacgttgcagcctttaagtactggaggccaaagttaccagaaacatgggcagacagattaaaattttcccttcttatgtttgtgcattgtttctatatggaaaattacatttttctgagagtatatgtgtaaatatgcatctgctagtgttttggcaactctaagttacctaaattagttttgatcaacactgtcggatttttaaacccaccaacgtaataaaagcaagtttaaaaaaacacaaacaaaccctacagtacattgtgtgctctgctgttccaagcctcagcttcaagacaaaaggagagcgagactttgtcattcgctagctgttaataatcaagagaagatctgccagacaagctcttcgagggctctgtctgtctggaccaggtatatactgcaatacacaaagggctttgcagggggagaaaaatgagtgttcatggacaatgatgcagctttcttaattaagattttcattactgatacatacattaagttctgcaactgcaagagccaaagcactgtcatgtgcaggtagatgtccctgattccatcttcaggcagtaaagctaaaacatattaaatgtgcacccagcaaatgttgtgggagccaggagagctccagaaatatttttgttggaatgcagagaggccccattataggcagatttgtaatgcatctaataggcaggagaaaagctcatatcaatagagtgtgtgtgtgtgtgtgtgtgcgcgtgcatgtgtgtgtgtgcgtgagtgcacgcacgcacgtgtatggaagtgctttgaggccctggaccacagacaaaggtaacagtagctgatctagaagtaatccccatataataatataatagctcaggtcttaaaaggaactttgatcttttaaatttgccaatgccgattgttgagacaggaaataaaggattgatttggtagcttttggaagatggtaaggactcctgcatacagccagtcctgactctgcccctcctgggtcactcagtctattttccctggatccgcatgctggtctgaaagtcaatgcagtctgccaaagtggtatactgttcccatgaaataatccaactgtggtatggagaaatctttttttcttagaccaagttatttttacaaaaatacttttgcgaagaaatgagaggaaactaaaaccctacacaatcctagaagtggattactgtctagagtgcatgttttttattccatcttataaagcctaactcattttagggtggctagtgcagttaaggtgcagacatctcttggttgtttttctggtgcttttacttgcatgctttcctgtttccaaatctgcatccatattgggggttacccacagagagctgttgtctcctctctgaagaacatctccatcttttggtcactacttgagtagagatgagtgatgcttaatgaaatatcattttattacaacggtcaaaaattatggattcatttcttattagattatatgctctgaatgttcaccaccccccaattcacatgttgaaacttaattgcccatgtgatagtattaagaggtggagtctttaggaagtgattaaatcatgaaggcagagccctcatgaatggatttgtgcccttatataaaaggtgtgaaggagctgtctctctcccttttcctcttccaccctttgccatatgaagatacagcaagaggtgcgatcttggaagcagagaggacttcaccagataccaaatttgcaggtgcctcaatcttgaatttcctagtctctgtaactatgaaaaataagtttctgttgtttataaattacccagtctcaggtattttgttatagcagcaaaaatggactaacacattaggtacaagcatttatttgacatttaaatgtaatccctcattttctaagaaggaataagccagaatccaacatcaaaatgtttcaaaaggaatacttcaaagtgttttagctgtagttctttgtcgattaaataaaaaaaaattccaaataatggtggtcagtaagagtgtgtgtgtgtgtgtgtggggggggggggcggtgtatgaattcctgtgctaagattcagatctttgaaactgttttctagaatgttatcctacatgtctaaaactttttttctaagtgtatcagagatttgggatggagtggtaaacacataggttactaggaggtggcttgcctctgtacccattctagatgagtaatgttaatgactgatgataatgtaatgatgaaaaaattggttctttttaagtaaatagatagtctacagacaccctgtcaacagatagtgcatgcttactgaggaagttaacagtgttaggattcttcctaacctttactgaaaggtactgttataaaactggtagaggagtatgtgaaagctactggtgaagaaccaatgcagtgaagattattcaagcatggtggtgatggataaaagcatagaaaaaaaactcagaaaattattttgactgaagacttttcattacttttcttatgtgtccttgagtagcttataaggactaggctgaaggctactattaaaagatttaggtgtacctttcactcatgttctttcatgagacacacggttctctcattcaaagtacaaggttaattttaaattagaggtgagaattattcttcatgtatcaaaaagcctagaaatttaccagggattaaaggtagaacccattttagcctatcgaagtgtgagaggtaaggtgacctgtttagatgaatatcttgaaatgattctctggagcatgcctgatctgttctcaatacccacacattagaagaaatgaagaataatatagagactacacaaagagaccatgtaaaagaagaaccctgataaaagaaaaaaaactcttaattttatcactgcaaagacttcttgtacaagatgcctctgcaagtgtcctagtagcatgactccttaaacaagtaggatgcgtgtatgtggaagatatatatatgtatatataacatttaaaatctccctcgaaccccagcttctgagtataaactatgttacagaagcatgtggataatatgtgaagctttctaggagcatcattaagaaaatgagacatttgacactctgagccctaggtacactgagtcagtggcatggtctccaagggcactgctggcagcactaaagcctggctcataaccatatgtgcacacctcaagaggtgtttgactgttcaggtagaggataagccatttcctaggcctggttccttccattctccttagcttgtagttggcctgaagggacttcctagactctaacatgtttgcctctcttttgcttcctttctggacactgtctaaggatttaaaacacacatgactttcatgtccacaattttctgccaaagagggggaaaaatgccccagagcatgtcatcccttaccatctgcaaatgaacttctgtggtcaaggaatgctccaattaccacccagaacagctttgtacaactcctgaccctcgggaagactcgaggaactcactcccagaacccagatgctccctgtcccagaacacagggaagacgccctgtcatcacagtttgcacggcagaggcggaggtgatgctgttagtgtggtatttccaattctctagcgtctttcactttccctgaagttgctgaagaatattccatttcattaagtatgtagtaatacacatgggaatcagagagcggggaaagatggaggacgttgatgacatggcctctagcactttatttatgagaacatccagaaatctctatctacatctgggagaagaataatgtcaatcctgccctggagacatggatcaggcaatgttgccagtgtgtatttttcccttcccaataatttactgattctggagtctaaggcagagcgctgatgataatttttacattcatgtgagtgagcctggccctttgagggctggtgatgccaaataaacataaatgtatgtaaccaggtgaatacttaccacctcccaacccagaaatgtcataggtctctggtggtgctttgcttcccacaacactcccctgaagggcggtgagggtaggtgttgccatcagagcataagaagcagagcttgaggtggccttggaggacttcagggagcactgcctttgcagtaaagaatgagactaagcaaacaaacctgttagacggctcatttgtcttttccaatttttttattgtgttattcatcctttcatcattgatttatagctattcttaaaatattagggatatatcacaaatatttttcctagtttaaaaaatgattttctaccatagtaatttttattttcatgtaataaaatttaaaatacatgtattttttaaaaagttttcaggctttggttttatgcctggaaaatgcatctcatacctccagtatgaaaatattcatgtatatggcaaaaattatcactgaaaattacagaattagtgaggatgcagagaaatgggcagtctctttttttgttggtgaagatattaaccaatgctagaggacagtttagtaatgcattttacttttgcagttccactataattaattgatcctaaggaaataatcatgtaagtgtacaaacatgtgtacatatgcatgtgcatataaagacagttattgtggcattgtttagtaagaagaaagttccaaattcccaactgtccatcaataagtgattgagtcaataaattatgcatatactgaagtgcaacgttgttgtcaaaagataatgtagatctatatttattaacatggtaaatgactattacaatgttaagtgaaaagaatagaatacaaaacagcaagtaacttctcctttcagtctggaaagagaaagacaaagagaaagaaaaagagaaagataaacaggactgtatggaaatataatatttcctaagttattaatagtgattatctctgggctgtgagatttcaaaggaatttaaccttgctctttataaatactatcaatgaaacaaattcaagcaaaactaaatgtatacttttttagaattaaaaattagaacttttattttgggggaaaaagaacttacctaaaacctgcaataaatacttaaaaattccaatatgatcttcagtcattagcaattactaactagctctcttagtagggtgacatcaatgtctgcctcaagtttcccccaagtttgacactttgagatgtacatcatagttcttcccttaaagaattttaaaatataaaatttcaagtagtgaatataacccaaatatttttatctagggcatggttaggtaaattctgggggctttatgtgatattattcagatgttatagtgctatttataaagagtttttaattataccaggaagtatttattatataatattgaattaaaatgggatacaactgtatacatgcaatgtatgctcaggcatgttaaaatctagagaagacactagaaggtgatctaaaaaattattaataatagttggttctgtgtagtggaattatggatgtttcccctttactctatactttctaaatatttcacaataagtgtgaattatagaatcataaaaaaagtaaatattaaaaaaaagctgttttgctcgacagctgccaaattttaccccagatgtatcagcaatttagcttttagtcaaatgaccctaacatcatttcctaaagggaatatcacagaatggaatgtgcccaaataaagataagccatcacggccaccacctctttctaagctatcattttataatgcttaaaataaatctgagtaagggatctttcttctgttggaagttataaacttccacctccttcagaccctctccatatcttctcttgcattaccagcacctggaatttataattaacctatagtaccctggtacgtttctaggtctggaagctgtttttggaggctgatggtgtagatcaccattagggatggaggattatttattcattttaaatgggagttcccttgaataacaaacagggatgagctgctatataagatcttgtgtagttaatatgctttcttacccttcttatatatatatttattgattgattgattttttgagatggagtctcacactgtcgcctgagctggtgtgcagtggtgcgatctcggcttgctgcaatccctgcctcctgggttcaagagattctcctgcctcatcctcccgagtagctaggattacaagcacccgccactatgcccggctaattttttgtatttttagtagagatggagtttcactgtgttggccaggctggtctcgaactcttgacctcgtgatctgcctgcctcggcctcccaaagtgttgggattacaggcgtgagatcccgtgcccggcccgcttccttcctcttctttccatccctcccttctttcttcccttgttccctctctcacctgtctacactcctgtctccagccctcttaaataaatagcttttctgtagtgttagatgccagctcttaacatttagagacaattcacactataccaataccatacttcaagtagatgatctaattgtttctaaatcatcatattttagcaaaaagataatgggagaaatcaaagttgtctctcacatatgtatgatgcatactagaggcttggcaataaggcagagagtagatattttttgagaaagtaaataacaaaacaaaacaaaaagccaaaacacaaaaacaaactgggtattgtgaggacagggcagagggaaggagcaggcataagaaagaaaaggaatgacatcggtctcctggtccttgcaaaggttattcaagtccctgttcctggtgttttggaccagatatcagcctacaaaccaccctggactgtgagctatttgaaggcatagatggtgtcttactcacctctgtattttctgtaccaaacacagtgcctgatacaatatactcaacagatgcctggagaatttaactaagccctttcactgccctttcttactggcctcagctagaaccaaaacaagaagctaaaactcctaatgccacaaatgctaggtgaaaccctatcctaattcaaactcatttcttctgattttgcaccttggtccccaaactgctggagaaaatcccatgacagagcagataggtatcaacatcaacccaccagactcacctgcaccttccacactgccaaggagagtcctactgtatttctctggtcaacttgctgtcccatttgtctcaagaacgatttcaaatctctactttccttaaatctcttccccgcttattcttagcaggaccttgcccctcagtgcccatcacttgggaaacctcttaacctttcagtaccaaatctacacgtgggcttgcatctgctcctttcctttactcctcctttcttacaaaaatagaagatgtgtccctccttccatctctccacttgtactcaggattccatctctctggccttatcagtaatcttatactgccagtcatcctatgctcttctctcttctgcacattggatctctcctctctacggtattcttcccatgaaaatacaaaaaatactagtgtttccatgcttttccaaccttcttttgacctcacttcccccctcaagatattgcagtagctcattttcctttccttcatagcaaaacttctgagtggcccacatttgctgtttcttcacttctcattctctcctcatcccattacaaacacgttattgttttgaccacttcaacaaaacagcttttgctgaggtcaacaataagctcaaaattaatataagcaatatatatttgttagtctttaacctacttgattgctcagtaacatgtcacatcactgaccactacctttgaggcactctcttggcttctgtgcctatgttttctgattttcctgccaccttcttggtggctccttctgagggtattttatggcctcatttttttctaccagcggattaaatattaagagctcttcaagtctcagtttaggtcttcttctcaatctaaccctgtccctaggcaatgttattcatgccaacagattcatttaccactatatgtcgattaccctgaattcatgtctccagccttcatgttacttctgaattccagttttatgtatataaatacctgtgcaatatgctcactatgtatctatccaaagtacctcacactcaacatctcaaaaacagaacttacaaacttctctccactccagtcctcctttggtgtttcatgtaactgtgaatggtattatccttcatatagtttgataagccccaaaccaggagtcattgttgccacttctctcttttatttcacataaccaaccatgaaaaagtccaggaatattttacttctgaattatctctcagttccatcaatttcctcccatttccactgtcaatactctagtctgcctcttatgtggtctactggaatagctccctcactggtttcctcatatccatttttgatccttccaaattatttaccaaagttaagctaccttgatatatatttttaaatttttaatttcaagataattttagattaacgtgcagttgtaagagataatacagagagatttgttattctttttacccagttttgcccaaatggtaacattttatataactgtagtacaatatcacaatcaggaaattaacattggtgcaatccatctgccttactcaggtttcatcagttttatatgcacatgagtatgtgagtgtatatttagttctgagcaattttattacatccatacactcatgaatactaccacagtcaagctacaggacagttccatcacaaaagatcccttgcgttatcctttatagcaacactcacctccatttctatcccaactccctaactttgtcatccacaagtatgttctcaatccttacatatttttttcatttcaagagtgctatatagataagaatcgtaacagtacatcatcttgagattagctttttcacccaatgtaatacccttgtgattaaaaccagttattgtatgcatcaataatttattctgcttagtgctgagaggtattccatggtatagatataacagtttgcttaaccactgacccactgaagaaaatgtgggttgtttccagttttgggctattacaaataaagctgctatgtacattggtgtaacataatgtacaggtgttgtacagttatgtttccatctctctgggataaatgccccaaagtttacccttttaaaaaacaacaatgatcatgccacagtccttcttaagtttgctcctctactgtccttaggataaacacaaaaatccttaacatggcctaccaaggacctgttatcatcaggccttacgtatctcttcaacctcaacctgggctgctagtcacctttttctctctgtgcagctctcttcagggacttcatgctgttccctctgcctggaatcctcttccaccatccatccttactttttgtttttaaccttcaggtgtcatctcaaatgttactatttcagagaagcttctcctgaatttccagactcagttaaatcttcttcttttatttgcccttagagcacatggtacttttattatatagtggtaagcacaatttgtaattacaagttatattgtgagaccatttgcttagtatctgtcttacattccccagattataagctccagaaggagagagactatgttaatattcctttattatatatacctttagtatttagtagacactcaactttgtgtccagtaaaatttggctgaggcttttaagacatagtcctggaatcaagttctatctctaccatttattagatgttcttataaaataaatcaaacatgttaaatctcagttttctgatctgcacaattaggattatagtagcatctacttaatagggtagttttgaaggttaaatcagatagccatgaaaagtatttagtccagtatctaaagcaaggcaagcactcaataggtatttcttattgttattattagttgaacaagaaactagagtttttgtattttttttcctaactaggcttttgtccattatcttcatttcttgcctgttcccccaggttctgattcttgtaacttttgagactctgaaaaggggcccttagtttagatcttggataaccagtaggactactggttcttaccccaggtatatgctctcagaccagatgtggctctggttcccattttcatctcactcagtacttcctcctcttgttttccagtctatggatgtcagtgtgggtaagaatgcctcttccctactcctagtttccagatgttttctaaacactgctttcctcttgtctcattccttataattccccatggaggcaaagtatcccattggtgggaaagcccttggtctatatttctcaggtaggtagaactgatctatccaaatttgtaagcacaggagtttaacctctttgtccttccttttctactgagactatcgggaggtgatgacctggaaagtgttgctcatatgcagatccacattttcctgtaagagagcttttgaaaggtttgactgaagggaagagagtcagcaaacccatttcctctttacactaagctatgctcttcaaccaacctttataaaaattttggttccctagctatcagttcttttgtcttatttttcaataggtttagaattcaagtggggaaaagtgatgctatttatgggccccctcgaagattccaacactttggtatatgattttgcttggaatatgattctgtttctcttcatcttttttacattttagccagttttcaagactcagctgaatcagttttacatgaaactttctagcctgcaaggctctttcatgaatgaaaccctatggtacttcctggactgtatcattccttttggaacttagtcatttattatcttatgtgcatacacaacgctcaacaatataactgtttttcctaactcaattttaaattccttaagagcaagaaagggtcatgtacttatggtatatttatgctttaactatccaataaaaattattctttgtacatagcatgtttttaataatatcttaaagcgtgaatgtgggggagagtggcctactgaccaggctttgatttgaaggcccaaggtacaacggaaatggcttagtagctggatggttcctgaagaggttgtcgcagtgcagtggtgaaagaaagaaaaggttactatgggcatgtccctgaggtgtgtatcagtgcaagtctgtgtatacacacacacacacacacacacacagtctctctctctcttacatatatatgtaaatagaacttaaatctgtcttgtgctgtgttttcgccttagtaatactttatttctcttattaaaaatacatggaactcaccatctgataggtagaaaggctaagagaaatgcaaccagagggaggtaatattcctggctatagtcgattggtgttcagagtgttttgattctctgaatgagtcaaaagattgaaaaaaaaatagccactcttatcactaggaaaagaaatgaggaggaagggtcctgaaaatggtgtctgagcaatgaaagacagtgaatattttaaagatcacaaaatttaatttattcaacctaaatgcataaaagtacaggtggggacattatttatgcaggtatatgcaaatcactttataaaataggcaaagcccttctgctttttataagttgccaaggtggttcctgatattttaaaagctatgcacctttaatgtaatttcctaagagttggaatccctctgtcgaaatcatagtcattgtcagagcaagttgatttttttttttcctatcctctgggacatttacaaggatcttataaccatcacaaaaagagtggtttccacagagatgtgactggaaaaatcccttggaaattgctgaggagcaagtcacagtgttcaaagcaaagaacataggctttgaaaacatgaacccatctgacctcttgaatttagtacagtgaattcctgagctctgaaacatggggcccggctgtgcatgccatattggtgctataagactggcagtaggttggctgtggcatggtctatttcaaactccttcacagtgcccagtgttgcatgttcccagatgacatttggttggcagaagctgggcttccaaagctggcagcctggaatgcagcccactgtgttttgacaaacacataattgaccatctgatcaccagcctacgttctgcactcaggtcactgggggacctgggctttcaataggtccctactcctcgtcttgttcatcttcccaaacctttctccagaaagcaatatagagaaggcttaaacacacccacgcatatcctcccatttgcaaaagagaacatagtacatgaaacataagctgttgaaaatttcctttaaattgtcctggcagcccaaagtgaacaagagaaaagcacacttatggtgaactctaattcagagagaaggaatgaatacactgaattgtttcaacacccggctgtgcataagttgcaattcagttcaatggtttggaaattttgcttagaaaaagggagcaatgagaaaatgataggaaattggggcattgattgactttaggggggcattatttagaaactgtttcattttcaggtgaaagaagagacaagcaggacactgggaatgtcttctccttatctgcctgctcctccctcacacccactatgggcagtaggaggcacgcgagcctggtgaccagggggcagtagctcaaagtgaggtcatattcaaattgaggtctttgctgaagatcccataaggatgtattttggtctgaaatttgactccacacaatgtttcagcctttctcctagaaggcaaagattatgcaataggccaagatatgctggaattacacaaaggttaatgtctatttcaacactaccaaatagcctctccctccatcctacccctactgcacagttcaggcctttggcttttacctttgacctggtctccctattctgagtcagcctctccactttcaccaagtgctctttctaaaacatacatctgcttacaattcttcaaagcctccttgagcctgcaggatcaagtccaaactcctctgcacggcatacaaggtcctccgtatggcaggcaaggtcccctgcctgctttccagcccaatctcatactactctttcaaccaccatgtttcaatcacactgaactattcactcctctgaatctcgctgctacttaacgcctcctgattttgtaaatgctcttacatttttcttgattatgatccccttttctttctgctctttcatatctacctggtaaactgcaatttactcttctgactttaagacccagcctggtcaccttaccacatccaagtgggcactcctccttcattcctcttactacgtcttgtatatacctgcatttcagtgcctatcatatgctatagtctttattcacttatgtatctcccctatcagactgagatttctaacaaaagaaagcatttcttatttatcccggagtttccagaaccaagcacagtgactagctttccataaatgtttgttgaatgaaaactaaataaagagctgtacatgataattaatcaaaacgaagccaagtagtagtgttagcttttataagcatagtaggagcccattagcaatctaatgaaggcagaagatcccagcagtaaggcactttctgatgggtatggcaggggctggtgactggctggggtgacagtaagagtgagggataaattctgtgatggaggaaggtctttttaacagagactgccactaaggctgtaaattaacacccttttcaagacttaatattcaatactgaaagatattgtcctgagaataaatctgaatctgaattgtatagagacctaacttataagaaccaagtttcccaaataaggtaagtctgtgctacctgcttcaaggtagcatggcagattatggagggttcctctttgtttctgctaaacagtaatggaatgggaaattcttgggggaacatctgagagctcttcagttcctattgaaatccaggtcaaatacagattgtgatactggactaaatgcactgctaagagaagatcgaacaagcagaattctgtacctgtttagaggaggccattgaagaggcacttggagtcaaagcactggggagataatgttctgatctgttctcaagggacattggacatttcttttccttttgtcgagcctctggggcaccactctggagccatcaaccatcaactgtgtctatgggatacttgaggacagtaggactgtcataagcccggtcaccctgctgatatgagggcagcttcaagatttggaacaagccaagcaaacatgaagcctggcccagggatggcacaaggtcatgggtatatgaacggattatctgctcattataggtcactcccccagccttatgtgtggttaaaaaataggatatctctagaagctatgcaactgatggctgatgtagcatagaatcagatttgcattttcctatgagccagagacagcctttcaactacactttttatctcaaaagtctcccccttgattcctaattggtgacacaggtcccctgtactgcttgtgtctgaggctcgccctatagcactgacgtcacaatagctgagccgtgcgggcaggagtgcactgtgctgactcatcccggtgatgtgaggattaatgccttgtctaacacagagctattatgtgaactgtttttacacaaaagaactgtaacaaaaatgatttgccagtcagaggactagaaatatgcagtgctaggtaactgaggggagggctgtgcagatataaagtggtaaccataagcatgcatattgacatcctccaaagcatttacagacccactctatcaacactgaaatagagaataacaagacttgtcagggacaggtaggacccacccctgttgtataaatgcattacacacagctccagtctttggggagtttaatcaatctcctttctctgtcaaataaactgtcacgttacactttagccttagcatcctttggaggattctgcctccctaaatatatttgccactatcttctaggaatgttagtggaaggcacgcataaacaaaatagccatgggaacctccattctgtgcaaatgattataatacaagaaataccttggagtgaagagtcagtgaagcaagatataatgttgtgaataaggaacagagctcaccagagagtgagaagcagccagaggataccgataattatttatcacattaggtgactatcactacctgtaggatcttttgggtggtgtctcttataagtgactttgattatttgggttcattggcctagaatctttttcaagcagttcaaaataaaatttatttaaacccattcagtgcagcctggtttgaattttaaataatgaacgttctcttttttttcatataaaatcgtgtttttttttccccccgaatacctttccatcttttctaaaaaagagtggtacctttataaaccttctggcacacgtgaatctgggatttctttttttcccctgtagacttcataattttgcacaaaagtttagtctatttattttacagtcttgtacttcttagtaaagggatattagaaattttgtcaataaatgaaagctctgatctagaagttaaaattaaaaactattggacctagggatgggtacataactgaagaatacataattgcccaatgattgacaggggagcaaaagcccaactgttgctggtatttggctgaataatgtaagctatactttaaaagagcagtgacttttgcaaacagcagctgcagccaagtaaagggcagcctttatagaagtacagtatctgggccactggtattttctgcaccctcatggatagcaacttagtattaccaccaacagcatacactccaaacgcaaaagaaactaatacacactacagaagcactagaaaccacaacaaagtcaactaggaaatatgccagtgaaaaccacaatttcctaaatctgacacttttttttttaaaggtaaagaaatcacttttacttacgtaaagagaaggggcaggtcacagactgatggtcaaagatctgaaaatcaaagaaaaaataaggaattaaaagcaaaccgatatatgatgcaaaaccaatatataaaagcaaaatgatacagtgggaagaaagaaagcaaatctaggcatagatgggactggttgttcctaaaggagcctattttgtcacttctagcctcaaaataaaggagacccagcttcataaaaactttctaaaggtatgaccccctgctatgatgaccaagacagtacttcccagcacaaggagtgcaaagacctttctttgttcatttcattctaatctgtatcatataggatttggtagagctatgttaccatttaacaaaatagccactagccacatttgtctatttaaatttaaattatttaacatttaataaaaagctaaacatttagttcctcagtcttgccagcttcatttcaagtgctcaatacccacatgtggctggtgactgccttactggatagcacagatagaaaatgtttctattattgtagaaacttctattgggcagcactgactagaataggtaaaagctttactatacagtacatgaccaattttagctaattttgacaaagatgagtcaaaccctgataaactttgtctcttttaaggtatatttagtatgtttaatgtccagaagttcctctgaacaaattcaatacattcgtgtgtagctaagaactcagtcctaagtttgccccggacttgccttctaaaactgcctctaccccttctcaccagcctagaatgtcccctctatggtggaaaataatctgataaagtgattttaaacaaagcttctctcccaccaaacacaactctgtttggtgatgaaaatttcagatgaaatgatgaaaattttagattttggagaagctgaccctaacagtgttcttgttctatgtttaaaatctgatatttcactctttaaattacaagccaggctaggcgcggtggctcacgcctgtaaatcccagcactttgggaggccaaggtgggtggatcacttgaggtcaggagttcgagaccagcctggccaaaatggtggaaccctgtttctactaaaactacaaaaattagccaggcatggtggcgggcgcctgtaatcccagctacttgggaggccgaggcaggagaattgcttgaacctgggaggcggaggttgcagtgagcccacatcacgccactgcactccagcctgggtgacaagagcaaaactccgtcaaaaaaaaaaaaatcacaggccaaaaaaaaaaaaaactattataggactggtctgcccatcattgtgctttgtttttttttctttcttttttttttttttttgagatgaactctccctctgtcacccaggctggagtgcagtggcacgatcttggctcactgcaacctctgcctcctgagtttaagcgattctcctgcttcagcctcctgagtagctgggactacaggcacgcaccaccacacccagctaatttttgtagttttagtagaaatggggtttgccatattggccaggctggtctcaaactcctgaactcaggtgatccacccaccttggcctcccaaagtgctggaattacaagtgtgagccaccgtgcccagacccatcagtgttttgatagcttctcttagaaggataaaactgaagtaggaggagagccatgacaaattaataaaccaaaaaaagatactgagaaaacaaagcaggtccccctacctctagcccacttaaatatatcaagaatttaatacagggtgattcaatcttgcctctctgacaccatgattttaacaacttcacataaggcctccagaaatatgcaaaacaaacttcactaaaggagatcaagtagaaggacctgattaagtatctttgcattgaaaaggctaaagcagaaaaccagcaattaaagacatcacccttcctggaaagtttctgggacaactgcactattgtagagatttcttcaaagaaatgatttccctttgtggtcaatgtgaaaccttgctcaagtacatgcaggtgtacttgatgcaggatggtgacaagacgagttaagatgaaaatctccagcctggattattataatgctaatacaagagaggctggagatctccaatgctttcaaattgtttcacaaaattcatgagtttaatgaaaattttaggcaagagaattagattatgtatgattcattgaaagcacatacaaatttgaaatatatatataacactgactagtcttcaaagattttaaagctctaagttttgctatattctagtcttctctgcaagccaggatattagactatggcacaggggcatattttcttaccattttcctccctccctctctcctttcttccttccctccctccctccctcctttcttacattcctctctctctatttctctttctttctttccctctccttttttgaacttgctgtcttctctaaccttggggagaagaagaaaatattattagcaattttctatgaaatatgttcaatgatcatttttctgttgcatgttataaacccaataactctcaacaatattatgctcttctaaaattatacctagtgtttatgttcttatatctaaacacataactttcttttctaaatttcaaggtgcatttattcataaaattagttaaaattaaatttttgatgtgatcaaaagagatcaatgtaagttgtacccaaattgactaacacatccaatgtctggaatgaaaaactatctttcctggatgtcaaatgacacacaggatggctgtcaatgataggaatccaaaatggagagaaaaattacagtgtgtatgtcacagtctaaaacaaattaaagccaagttagatggaagttttattggatataattgttgtacttatatgttaatataaaatgataatatgatcccaaacttaatagtatggctaaaaatttaatctcagagttcttacacaattcataaatgttcataggcatcaaaagacacctacttcttgactgaattataatctgctatgtaattctgagaatatgtattaatctacatagatttatatttgctcaattcaaattgttatttcattgatacatgctctttccacctaagtgatattcaccttatatgtctataagttgtttttatctgaaatgcaaagaattatctataaaagtttcacagaggattaaaaacatttgcattaagcacactttgttcaaagcataaatatatctagcaaagagtataaaactgtaaagcccaagtaattcaggacgttaaaatatcagggtggaaggtgggggatgagcagagagagggggatgacgaggggtgaagtttaatcttcgtattataatgtctgagtggaaattattatatagtgtcaatctccaagaatcaaaaatattattaattataactttaaagtcaattctagtgtagtttatgtaaagttctacagcagtggttttcaacattttgaagtgataccgatccctatgagaatctctttctccagaaaactcctcaaaaacaccaagtttcaaggaactcctagactccatgaaggccattcatgaatcccaggttaggaacccctggcctaggcagacaggggagaaaaaccctctttcaatcccatagctactcacctctacagagttttcatgaaatgctataaactaaagccagcagcaaagaaaatgtataaaaaagagttctaagtgggtaagggtatgtggttagagccacacaggcttctttgaaggcctgccagactcctaccttcctagtcctttataatttcttttttaaaaaaatctacaaagccttagcaacaatggagtagaggagtaccgagcagagagatgataatgatataagaatcactatctactgagtccttcaggtaccttgagaaataaatccttcccaaatttggatatgagtatacccaggaatgtgagcagtgtaacgggagtagaaaaagccacaaaataaatagtaaatacatggctgtcttcctggagggtcagtattccttgtgggcaagtaatttaaagtcttatttgcacacgtgttcatttatccaataactacttcttcaatgttataccaaaaagaaaacagatactgttcttgtcctcatggaacttccggttgagtgaaacaaacaagaatatattgaggagctgaaaggaaaatctgtgtatatattttttgggtgaaacctgagacttcactgaaaagtcttgtttgtggcagactacttcaagcaatgtcctggcaggcacccttagtattggatcactcactctaacttgaggatcacccaagtggaagagtttgagaagcatggttagcagtgtatcatttaatccccactacaagagaaaatactgttacttccaatttactagagaaaaaagagaaatttgagaaattaggaaacagctcagatcataccgctgctggcgtctgaataagtgtgtgccattccaaaatctacatatttttaaccactaaattacactacctttaggagtttcccactttatgtttccccttgaatctgggctcattcaggattacgcaggctagtttaagcttctctttggaagcagacaggtttggcttgatttgcattctaaatatttcacagtggtaagcgaaagctattattatacccattttatggtgaggaagctgaaccacttgccagctgaggtatctggctgggttaaaaacagaatctgggtcgtcagactctcattcctcttgactaactccaagcctaggcactattactgtccatgggcttttctgaacatgagattcacactgggtgataaagagtgagacaaattctgctaagagaaaacaataatagtgcaattgaaaaaaagggaaaataagtaatcataactcacaccaaaattggttactttcagcattgtgaatagaaaagggagagattattcatcacaaatgagtcagaaaattagaatgtgtcactgcactgatgacagagctgaggaatttggatgaactgaagtttgacacttatccttctagctgaagagggtaaatggtgtgacaacaggacagaaatgacctcttatttccaatcttaattaatatttccaatcttttttccttaactactctgtctaaaagttagatgggtttatatgtttgttttctatcggtagagataatgttttaacatccctttaacgttctagaagtattgcgttaattaattcttatgtgggagtcattccaaatagtaggatgatgatttttaccttattgattttcctaatacctttctggtttccagtgttttcaaaggatgaggcactattagatttttagatttatatgtctctcaaaattaagtgcctgtcaactgatattccatctttactctggatacatgatttcctttatctgacagattcaaaaaaatttgtactagatttaatgacatttcatgcatcttgaatttgggagtttttaattctctattttctatttggcaaaaggtttacaggagaaagccagatgcaagggtatttatatgtgcatacagaacctgtgccatcactctctaggtactttggggtttcctgcaggacagattcttgatgtattttcattccttttggtcaggaagaagaagactataaatgccacaaatggtcatacatatcttggggtctgctttccaaaacgcatattattttggatccgtctcaagaagaacaataagagaatgatactgagatctttttttcttaagatgctatgataacaatcctaaaaaatggcctgccttcaaaattttgatgatgaaataaggttataatcaataaagagagaagattttaaagttcagcaattaggtctgggactgcttctgcgcctgagacattgccaagatacaatgtaacactccatcccaccccatatgaatctccctgttccttcttgattcttacggggatagggtctgacagactagaatgaaatgaaagcagtagtgctgggaggggtggcaaggaccgaatttgtttaatacatttaggatggttttttattgctgctaaactagacacaattccttagcatgatgacattcaggaatcctttacaatctgattccaaagaactttctcttctatatcttaaactactgaaattgtagctctataaattccaaagggattgatgtaccaggacctttgacttatagtaaactgatcttaagggatgctgaaaaggtttggcactgctatcatgtggtctaatcatttagacttgtcactaccaactatttgcttaagagcctccaagacctttcacaatctggccccggcccacctctctacttttaataaaaaattttcccactgctgcttctttatatacggtgacagcctatttgctcttccctgaacatggcctgggacatctatgtctctgagtcagctaacggttcacacttgaatctcccaagcctagcatagtgtgtgaaacacagcacgacactccaatgtttgttgaataaatgctgtccgtctattttaggagacagagatgacagaagaaagttgttaaatcagtaaataaatagcaccagagagaggtcaaggaaaagttaattttagtgcattttaggagtgggggcaagatgagcttgaagattaggaaaactgatgctctttattcttgggtctagccaatgctatgagtcagttactttttcgggaacaagtttaaacctcaaggttaaatgaacacaaatgccctgtccatcagcatataatgaaaaagttgtggctatttccacatcagcacagtgaaattaaaatatgcagtgcctctctaagaggcatcacatatgacagagcttttaaaaatagtcccctttgccactcaggtatagaaagagctatagaaacaaaagcaaatgtttgaaaaactgagataatttagcttagggaagaaagagctgaggtgtgtctttatggttttttgactataagaaaagttgttacaaagaggataatgatcagcatttttgtcctagggcaaaatgacattaaaccgtccagtgcagaatttaagacttaaagatgaacattctaaatatgcaagtggtaaataatcaaatagattgctaagagcagttctgaaatttctttcttcctgactctcttaaaataggaaaaatcttcatctattttggataaaataaatgcagctctgcctccagtcaggagaatgaattcaataacttttctagtcttgtttaactctgtatgattctataaaattctataaaatgttcaccctaaaaattatacagaatcacaatacagttgagtaaaatacattctacagtttaaaaagaaataagcaatacagatagttgataagttattacattcaaaatagtaatatatggtgctcacgttttttattcaatttgccaagtgcatataacacaaataaaattgggaaaaatgtacttgaatctactaaggctttaacatagcgattatctagagtaaaacagtctaacaattaattctttcatgtctaagaaatttgctgaatatttcataaacctcatattgaatatgtatataaactcaatttccaattaaagaaaaagttttttgaaggtccagaaagtaatatatgaactcactattattatttcctggaccatcttcaaagacaacaggagaaccactaaacaattcctttaaatgaccaaaatgtgccccatatgattaagaatgtaaatctaataacagactcacagataaggtctaacaggggtggcaagttactggctttctttgtctatttaccttttagctttggagctcagcagaagtgtccattacatacagcacagggttagatgaacagctccaatgaccttgtctgaaccaaattcatttaaagcagtttgccacttttcttaaatagaagatgagtccattctatctatggcccagatttggactggatcactgaactattgcccaactcttataagcaaagcactaacatgtaccaatcaacaggcgaaggcatcaggaaggtaaaaatacacatacataagaaactggcagtagattaaagaagaaagctatatctaaagatggactttggcttttaaagcctttgagtgttattcgaatcttgttaacaaaaacaaaaacaaaatctgcattccaatgtaacttgtagagaagatccagtaaaaaaatgaattcaagagagagagagaaagaaatgtagttttattttgcaacccattatttccataagaacatgaatcaaagagtcagctatgccaatttcttcatagctgactagttataggatattgttctagtcttcactaatgacttcttgaggttggttattactgtgatcaggagttgggaggatagaggtctaagacctttcaaaagaaacgttttgtttagtatcactacagaaaataaagtcagcattaagctaactttgacaacctaactaggataatggttggtgcatgtagccattgcttatgctgcttcataatgaatggaacagtaaaggtgtcaagttaaccagcaacttgaattttgaaaagctgtggcacaataagctgataacataggttgttagaattagcaaaacttactttctgcttcccccaccttctagtcctacttatttccacatccacattcctatcaccaggcagttaaagaaacagaaacaaatgcggctgagactgcttctttggggatactcttagtgagctctccatctccccaaccacaacttgctctcagtttgctaaaaatatattcatttaattgttttaatgcctctacttaggggaatttgcattttcttaactgttgatacaagatctacattcagtttttttcacaggtaataagcaaagtatttggggagtgtgtgtgtgtgtggtggtggtggtggtggtggtggtggtggcaaattccgtcctagatgcttcgagttttccaagtatactgctaaaaggggtcatttgcttccccacctcaagaagccaattgtgcttatagttttacttcaaataaagatatatacctataaatgcacacatcatacgtgcacacacacatattcttcttctcaaaagtcataaacatttggtgactctctgtatactccatgaagtgctgttactactaaagtcagagtaatttaggcagaaacataagaaaccccaaatggtttgcactgaaattttattaacatatttgtcagtgttttcctcatggataatctccattggttcctggctccttgtcagcatatgctccaggagcctctcacaatatctttctgccctagaaatcctggcctgtgagatttccttgtaaatatctgaattcttgtattcacctattaatgatccagggatcgaggatgttttctatctgctccttaacctcccacttcaaggattagattgtaaacaacctagtgggaacccttcaggccaaaccacagctgaacgaatctcagcaggcagggaacccgcagcagtctgtgaaataccgtgaaacacaattacgaaaatataaagtattcacccatactttggggaagaaattatgttgtttccaagatgagacctcaaaaataaggctagtatcctaattgagaaagacatgattttaaaaagtgtcagcagaggtaaatttttaaaagtaccagatttgccaggtccttctcaaaccatagattcattttcagtatatgacagtggcctgagccgacacttcaagggaagtccattcatctctgaccaatgaagcccaaagtactcactgcatgaaagggttcctttcttgtttccaaaggcaatcaatttttgtcctagagtctgaaggttcatgggctttcttttaattttgtcagtctgcacatgcatggttcctcctgcatgatttggtctggaggaagtgacccacccacaacgccacagagctaattaaccccacactgagcttttttttttttctcatttcacacatccactcaatgctttaaatgacccagcagcagcatgatcatatgatttcttccccctcagtgaggaaagcatggtgatgggaggagcagggatatatctgccctaatcaaaacagcagtgtgatcctaaaatattatctaattgcattgcatccgagggtgcaaaatactaagaaatccctgaacgaatctctttcatgtcattcatttaacttcttgcagtgtccatttgaagtagcaaataatacataagaaacactgaggtagagaagtttgatctatactcagaatgtttaaaaaacatccgatcttacagggggtaaaagaccgagagctccttccctatcccgaatagcttcaagagaagggccttttttccatttgaaggaacagactcatgtttttccagatttattttttccaaagggaatgccttgaaaactctaagatgatcactgttttctaacttttcaaaaaagaaaaaaaaaagtgaacatgatggtggtgggtgatttaatggaatcagcttgtcaacatgatgaaactgaaaaaagcttttatagactctgtccacatgctaaaaaaaaaaaaaaaaggcaacctttaaagttatgtgtatagtatagagtggtttttgtcatggcaaagaaaagaaatataattatcttatgcagtaaatgtaaggctctgctaagaatctcattggataaatcatagaaatacatcctggccagataaatggagccagacaagttctaggtcttgtaagaagctttcaaaagaatcatcatattgtaagtctgtcatctctgtaagtgacaagaaaaattctaggctatttccctcggttctactagtaacatggcttcagagttttaaagatttagacttaaatggacaagaaaatgacttctgaatatcccatcttaggcaaactatcggatttctctcattcttacaagtaagtgtagcaaattggttcaccttggaaggacttggttagagatcatatatgtcttatgtgaacttttaacctctctttcctttgcaaagtgatttatgcatacactattaaatacacaggaattctataattcttagttcagtgaacagttagtacaagggaaaatctatctaatattttaaatttttgtttagtgtcttaaatcctacactttagaactggagaccttatagataagttctataaggtcttcagtgtgctgaaaaacacatttgctactgctccctaagcttctcttaggtaaggctgccaactggggtaaattgatggataaaactagctcaataggcaaaaaacaaaggtccagtgaagcacagtttatttttatttatactggtcagaaatatcacagttaacaaatagcctaaatcaagctcttatatctagggctccagcctttggctgaagtgtctcatctggtaattctgaaaaaaatagggttgttgtgatttcaaagactctcctgcccagtagactttttcaggctcactgatgcttaggattctaaagcctttactatggtctgttagaccaatacagtatgtcccttactatttctctgacttcatctcctaacattttcatgcaaaattggtccaacagacaataaaatagacagggataggaatatgaatggggactaaaaggaactaattaataaaaattagttgctttatgtccttgttaaatatcaactctttcatgacagcctaataaagtttctgaacttatcttgagagttggttaagataggggagaatatacaaagtatttccaacaccatgcattcattcattaattcaacaaatagttttcccgagtctattattgattactctgccaactggattctacttctgccctcaaggaccttccactctaatgtatgttttggagagtttctgtctctattatcactgacaggttattagcccactttagacaagttataaatataaccacctgccatgatgattcctcttcttgttctttatttgtttttattcatttgccctgtaacatccattaacctttcatgaatgacctgatcctttgtgagctatactatcaacacagctaatttttatataaatgagaaaccccttctccactcccaactaacttttctttctcaaacagccatgaaaatataaaagtctacccagaattatttaagtttttgaaatgagtccttacaatctgatctgaagcaccatttttttcctttcttttttgaaagagggaatggagcctcagcccctaagatacatatctcaagttacaggcaaattacacacaagttactggtctcccagacgtagtactcactactctctggggtagaacaatttctgcattgaacagaggaccataatctagctcaagtaatctcaatctcagagaacagttaaccaagtgcatatttctggtccctatattctcttataaggagttaccctctccactatattttggtattttctgaacctggctaccttaggtaaatgacagtggacatggtaaaaagaacactaactcttcctcaatttgttaaacttgtttttcctcctcatatgctttataaacaaaaatgggagaatttaatgtatgtatagagcagcaaatgttctctctgttgctttcagacatttttatcttatataaacagtggtgatgaaattataaataccattattccacctctatgttaatactcttattatcttgcatcaacagacgtgaacaaatacgtacatgacaccaatcaatcccttttctaaaaatgcagtttttgtatttctaaacagtggaggaagaattttatgaattcaacatgtagtttacctatttatattttgaattttaataaagtaaaaccaaattatcgcttatgttctttcacacttacatcagccattaacactctccatgctggcatggggtagggggtgtgtagaactaatggcaatgggtccaagtcccctgggtcaggtggttaggggcttggcaggctggagaggatgtttagatgctggggcaggatatttcaacctgcttgacaggtaagagatattttctggcagtaagaggaatattttttatggaacaaattgctagggagaggtcattttggggcactaggtgagagaaatatcaaaaccaaacctaaaagcagtctaagggaactcgggaaaagaaaatcactactttttcaatctcctcactggtttcccttattccatagtgtgccttctccttccatcttctagcacttcatactcttttctcctccatttcttcaggttttctttctcctacctctttattataacaaaaaaaagcatttaggaagaattctaggagacagggagacaaaaaaaaaaaagaatttagagaagacataataacatactgcataaatatgtatgtatgtatgtatgtgtttatgtatgtgtatatgtatgtatatataacagatattcgatttaccaagaaggataaactgggacttttgagatttaaaaaattcatggtatgtctggtcatattaatctccaaaccagcttgtttttagcattgctagagctataacagaatcaggagtagaaaacaaaaggaaaaaaataaaatttaacaaaggatttatatttgcaaaggaaagaggacttatttagagttgtttattgaaattcccccaaagctattttttgaacttatatattgacaacatcaagagaaggagcttaggaattctcatagggtttaggaactactaaaccttgtatattatgttcatctcagtccactcaagcaagtaaaggataactagaggatggtatctcacagtgcataacatggttggttactttgctaggctgacatatggagacagggcccataggagcagagcttttcttacgaataccagagagagacacccaggttcatctaaatgtatagggcatgagggattagtggtacagtgttatctgcaaagtacctaaaagtgttttctaaacaagcactaacttcttagcccagtcttcttggggattaaacaaaatccaatagtaagtaatggggaatactttatttggtcactgggttggggagggttgctgagacatatgacaacattcaatccattaagataggaggaaatgaggagaaagagaaaacaaagaaagggagagcgagggccagaaaagaagagtgtcacctctgtagactctctaacagaataaatcgataatcttaagaaaagtaaaagagcatgcctagagggaaacctcagcacacttttggaatccaaggcaaaaaataaaacaatttgcttcttgtcaagtttattgccattgacccatgggaggttcctatttattctgctcttacatgcacaggtatttcttctactcttacattcttttcctaaggattagcattctgtgataatggtggtaatgacagctgccttaaattagtggcaagttaggaatgaaacactgaccaccaggctatgttcttgaatccagtctatgccctgtaatgtgttcattctactttctgcattttctctgagacctgtcgcataagacttgttttgtaaggccgggctccttacggggacacatatggctccagaaaacaagtactctactttctcaccctgactttttggttttcttgttttttcctcttttctcccagactattattttccagtttcttctctaccagtctggacgcccatggttgttaactttagagatacccaccagctccatcaattccctcatctacagttctcaactgtatttacctagttctggagctcagatgaacccacatgtatgttctcctcagcttccaggctgctgatccttgctggagaaaaagcacaaaactgtacagcttgatgctcctgcagaattacggtttccagcataagttcgaatttcagaattagtttgcaattttaaaatttgctcctagtcagtttcctttttcactccacagtttcattcattactctatttaactggttataacccatcccctacccttcactctcagctagtaaccttgcctccttttgcatagagaaaacagaggccatcaaatggcacttcctatcactccacctttgccaccaatgaatccgcctgtaacatttcagagatctttctgcctagcactgataacctcatccaggatcttattatatcagttacttttcctttcttttgtattttcaattttcctactgcctgccaacatgctttagctgtcttcatttaaggtaacaacaataacaatgataataaactaacaaacaacaaaccatcttttgcagactttatctttccctcttttgtgccaccttcaagcttcctaagctcccgtttattcctcaaaccattacaatctggtttctctagctgtgtttctaattaaacaatttttttttttttttttgccaaagtcaccaaacacttctgaattgttagcttccaaaatccattcttcaacctcattgttttctttcttttaaaggtcaggttcactgaggtataatttacatacaataaaattcatccttgctatactcatttaccattcaataagttttgccttatatgttggaggcctgtaaaatgaagcccaacccccaagccgctttgcttcatatacaaatccctttggcacctctcagcagtcttccccacataacccattgtctggtgacaccacactactcagcattcaaggatatatgccatgtacattcatgccccttgtactttctttatgtttcctctctataaacatatatgtcttggtataacacagtaaatgctatttaatattaccacatcaatttccatatagaatcataaatctatacgttattttgagaagctgaggttttccaaatagaagtcatccatcaaaatgctactacctgaagatctctattattttagtattatgggttgattatgttcccttaaaattcatatgttgacattctggcccccaattctttagaatatgaatagatgtgtgaatagggtcattgaagatgtgattaagatgaggtcatgctgtagagtgggcctgcaatccaatatgactagtgtacttataaaaaagagaaacttaaacacagacatgcacacagggagaacatcatgtgacgatgacggcagagattggggctgatgcttctataagccaaggaacaccaaagattgccaggaaaccaccagaagctgggtgggagtcacggaactcacagccttagaaggagccgaccctgttgatactttaatcttgaacatctagcttctataactgtgagacaaaaaatttctgttgtttaagccactcagtttgtggtagttcgttacaaagccccagaaaactgatatactcagtaaaagaaaaaatcttcagtatattggaatcagttctttcactcatcaggtacttactgagtgcctactatgtgctaggaactgctctaggatattgaatgaatgactaagaacttcatcacgttactgcattttttgttcactaataagtaatcaatctatcaatcaatatattaatagatgaaatgcctatcatttattttatcagcaaacatttgttgagtatctcctatgtgtcagacatcgttctaggcacagaggataacattattggcagatcaagttctccaccttgtatagtttaaattccagtagagggaacatatattaaacaagaaaataagtaaataagatatgtaattttactctgtttctgacactgagagtcataggcatttatcctctaaatcactgaacaaagcttggaactagatagcgaacatgttacttcacagtttacaaagtaataaggaagacaatgaggtctcatactagaggcacgttaaaccacaggcagtgtgcaggcttaaagtgtttgggaaggacatcccaaaagctaggtttcttagtcagttcgtcagtcaatcaacacatatttcttttttttttttttgaccaaatttctctctgttgcccaggctgaagtgctgtgacacgatctcggctcactgcaccctctgcctcccgggttcaagcaattctctgcctcagcctccctagtagctgggattacaggcacctgctaccatgcccggctaatttttgtatttttagtagagatgggatttcaccatcttggccaggttggtcttgaattcctgacctcatgatccacccgcctcggcctcccaaagtgctaggattacaggtgtgagccactgcacccagccatttgacatgtattttttaagcgcttactgtataccaggccctatgctgaagatagtagaactgtggacagagccaacatggtactattacccactgagctcacattctaaggggaaaaatttgaacaacaaatctcacagtccgttctttatcatatatcctcataagaatacataaagggggttaggagatcacctgggtcagaggactggcccatgaggggtttccaaggggccttccttgaagatgtggtgcccggacactgctttagggctggggtatgggtattggtttgagcagggtcatgaagttttcggtttcttcttcctcatcccctttcaaccatgtacacacatttcaaatacttaaaagcattcttcaaatatactaagaacaccaagaactaaacacaagagaaggactctccagaggaaaggggccaaaaatagaagagaaaaaaaacccctaatctcaccatttgttttgaaaacacccaaaatgattaaaacatattataaactaaaacatatgaactaatcacttgccaagtttcatttttaaatcaaagccgttttgaggttcataaactgaaaaaagaatcttcaaatatgaacttgtgtttttcttttcttggccctcagttggcttgaagcatttgctgttatgctgtgtggagggaaggggaacctgctagttaggaacatgtggcatgcatgtactagaaggtaagctccacaagatcatgactcttcacagtggtatccctggtaagtagaagagtgcctgaaagataacaggggctcaataaatacctgctgaatgatcaactagtgaatattctgggccctttaagggattctccaactctcttttcttacccaagctgcatcttgctttaggccagtggttctcaacctggggctaatttttgcccccagtcaggggatatctgtattttttgttgtcacagttagagaagttcctactggcatttagagggtagatgccagggacgctgctaaacatcttacagtgcacaggacagccctgttccacagagatttatctggccccaaaggttaatagggccaaagttatgaaactctgatttatgccctttgtttctattgggctgtacctgggagtcagatcctctgcatatttggaatgaagttcagtcctaaaggaagcaccccagaaaagcctcattgcttcatcctcattcccttcaagacctaatagaactgcccccactctaaggcaggctcagagagagccaattttgccttttgtcctccctgggtcaacaatgcaattgctagggaaatcatctgaaaaagtctgtctctacaatgcaagtaaataatttttacagtacattggtaatttccctgagcttacctaagcatatatactaatttagtaaaattctcttgtttacaaactagtcatgtatctgcaggaaaaaaaaatctcctcaagttcaaccagtttatccatgtctgctcaggatcagtacatgactctagctttattcatgataaataagatcaacttcaagaattccatcaaaccccagtaatgtgcctttagagagactgggcttatagcatttcctctgccaccctccttgccctgcatattaaaatacaggtatctgattccagtttcaatggggaaacttctgtcgtgccagaggagggcatgcgctgatttccccactctgatggttgctctagtaatcttggtgttgtggcatgtttcccagttaccatagagactgcatacactaagactgcagcattgtgattggtgggaaagatacattttgcagaagcttttctggagagataaaggtaagacacgagaaagaaagtgagactgccaataaaggggcagagcacagagaagtcccaaacaaccatacattctagaaaactgggacagcagagattacaactactgctataaaactacataaactgttcactcaatggctgcctgtcaggaaaatttcaagtattgtcagacagaacagacacaagatattctagaataaaaaggtaaacaagtaaacctactgaggttataggggtgacaaaagggaaatggcaagaaaacatttaaaaatgattcaatgctagaaaaaaaaaagaatctcagagagcaataaaatttaaagttacatttaactttaaatgtaggctgacctttggggaattatttaaattctgagtacctctgcttccttccctatgaaaaagaaaaagaaaaaaagaataaagatggaaatagaaagaataaagatgacttctctctcactgtttaacaggagtctctttaaatatctcaataatttgacattatatcagttgaatatgatgtaccccccacacaaaaatcagacaaaaacacttaaagggggtgataaatagggggacgtcattaacaatgcaaattgactcattccatagtttcttagagtaatgagtcaactgactacgtgatctcatgtacataattttgttcggcatgagattttgaggtatacaattactacagaaatcaaggtatacctgcaatgtaaagggtaaatcgtaggcattttaaatgaaagctggggataggatgtgtgttggtttgagggatgagtgggagtggatttaagagaaaatcagtctaggaaaatatcacataagtgtttgtaagttccttgatattcaggtctgtatcttgtaatgctttattaaacatatttcagactaatatgtccattgcctactggacattcatatctccctgtttttaaatacctttcaaatctgtatcttgagccattacttatctcttgacctctaaccctttatatcaaatgaattactagacaattacaattagatattccaaaagcatcctaaattcaacatgtcaaagctgaactcatcttttccttcaaactttctcttcctcctatgttccctatgtgagtaaatattaatagtattaccattcacccatctgccaaagttccatacctaggaagaatcatggttgcttttatctcaccttcaaataatcacccgtgcatatagatgtgcaatcctaataaccaaaggaggccttttttgaatagaaagcaatatttacagttaattgggttttgaactaatattaatttattaaacttacaaattttaaaagcctagttttctttacacctttacctgttaaaaacacacatatatttttctatgtcttaatatagcaatttttgcataaaataagaaaaattactttcaggaagggtgagattactagacaaaaaaatttgggacctcaaactatttcaactgtcagtcagaatgttaaaagaatgagagttagggtctgatctgggaacacctttcaaatgattttgccaaggtcaccagtagacacactgaatgtttttatagtcactctgaaaatgagaaattttacgtctataccctacaaaggaaaatttacaatccaggtcctctatgtttaagtttcattcttatctaactcttttataatcactttccactttatagcctgataaaggtagacaatattttgtgtctccactaaccaggtttcttgaatctagtgccctttcacttcataacgtttttcacatttctacctctctcatccccattgcaccacattagctcagagcatcattatctgtcacttgtaatattgcgacagtacattgtactatattttcttaagtttctgagtctttgcacatgtcaccacctgtgtctagaacacccatattccctgataaacatttactgaatgaaaaaaaagttaataaatgctttggatgttgctgctttgggtgctgaacagaaatagtggcctatctaagattctggataagcctgcataaagcactcttactttcaaaattaattttgaagaataagaaaattttgccatggagaatcatggagcctatgccacaatattatgttttgcatttaataaaacacctccaaacccagggaaagaatcagttattacttccttcaattcatacaacgaatatttactgaacactctctatgtgccaggctctgtactaggcactgaggatttcttagagcatagaacaggcaaaaaacaaacaaacaaaaccgaaaaaaacctcacaatcatggggcttatattccatggcaagaggaaataaatgtgtaaataaaatatatattttgtctgaaggcagtaggtgctatgaaccaaaaggggtggaaagctaaatgttaaatacagtggttatgaaaggccttacttagaagtgaaaattgagcaaagacctgaagatgataagcaaacaagccttatctggggaaaacatttaaggcggtcagaaaagcaagtgcaaatgtgaaatcatgcatggtaggctggaggttaggaagggggtcaatgaaggttgaggggagtgagctagggtggagcgctaaatgaagacagagaggtaatggggaaattgaatatggagggtcttgtgaactactgcaaaggcttttcttccaagtgagatgttgagccattagagagttctgagcagagaagtgatgtggtctgactgaaattacattacatatattgcaaagcatcactctggctatcattttgagaatagactgtaagtggtaaggccagaagcagggaagacaattaggaggctactgcaataatccgggtaagaaatgatagttgcttggattagggtagtagtggtgatgaggatgaggagtggtaagattctggacttattctgaaggtagagctgcaggatttgttcaatggttgggtttgtgagagaaatacaggtctgggagagaaataaatttttgatttgagtaaccctaaaggtggagcgttatttaccaatattggggaggctatgtatttgcttggtaaaataaggaattccatttctggtatgtcaagtttgagatgctcattagacagacgtggagatgttgaataggcagctgaatatgtgagcctagaattctgtgtaaaggcctggactagagatacaagcttgcaccataagcttgggtgcaaatattaagagagtgaatggagctgaagagaagagcttcaaagattgagctctagggccctctaatgtttacctgcttgggaaatgagaatatgctagcaaaagagactgaggaggagtagactgtgaggcaggaaaaaaatcaggagagtgtggtggactgaacgccaagcgaagaaagtgttttaatggagaatgaataatgggccatgtaaaacaattctgagacatcaggaaagacaaagactgccgaatggttaatggatttagcaacatggaagtcattggtgaccttagcatcaacagttttactagactggtaggtgcaaaagctaactagaggggcaaaagagaaccagagcataggattggagagtgtttatagtgactatacgcatttcttgagaagttttgctgtaatggaaatcaaagaaatgggacaggagctgctagggagtatggtttataagggtatttttaggatgagataaattatgtgtttgtatactgataggaaagttttgatagaaagagaaaatttgataaaacagaagaaagatgtgagctttttcaggagcactgtttatgcatgtgcaagaggagagagattctaaggcacaatgagggatgggctgagccaagggtacacagagtttatccatagttgcaggagagaaggcaaaatacatgggtacagataaatatgggagggtaggtgtgctggacagcaagtatttgtgaagttgtcttttgatggtttctattttttcagtgaagtaaaaagaaaggttctaagttgagcgtaaggatgggggaggaggtgttagaaatttgagagagggaaaaatatgaaatattcttgtacagatatggaagagtaaatgacaaggaaacatattatatttgctgggcagcattaacggcctccttgagggatcatgaatttaaactgagagtcatacatttgcttgtgtgtttttctccagccacattcagctggcacacaggcatgaaatagatggcgagttgcatatgatcagtatagttgagatttgtcaagagagcacagttaagtcagagaaggtcaatggtgttaaaggcgcatacaaggaaatgattaaaatcattgtccatggaatctacgctatataatgaagtgagcatatgagaagctatgggtaaaatcaatgaattaggggtcctagtgggtttaaggaattggtgtattaggggtaacaaagggattgaactaccaagacattaggctgtggttggaaaatggaatgcttgaaattgagattgtggaatattgtaattattagtaattaaaacatcagaaatgtagccatgggaatgagtagctatggcagagtggagaatcaatcatgagaagttcaagaaattgagaggaggtattagagggagcgtgtatttacacagtgaataaccaataattgtaatggggtagaaatggaaagagtgttagtgagctaggggctaacgttttcaaggaattgggaaacttgcctggtagacaactgcatcaagggggagttatgggaacacttagcttttctactacctcctcaatgtttcctctctctcactttccatctttccagcttatatactggcattacaaactttaatttcctagactagatagctacatatcacctgtgtctaccctttctcctccctatccaaattatctccaagtcttgagaatttccaatttttttttctgagatggagtctcactctgttgcccaggctggagtgcacagtcatgccatctcagctcactacaacttccgcctctcaggttcaagcgattcccctgccgcggtctcttgagtagctgagattacaggcacgcaccaccacacccggctaatttttgtattttagtagagacgaggtttcactatgttggccaggctggtctcgaactcctgacctcaaacaatccacctgccttggcctcccaaaatgttgggattacaggcatgagccactgtgcctggcctccaattttgaatactctctactctccccctttgggaccatcactactctagcctgtcactctctattttatcactcagattaatgttcttcatggcactaatcgctctctaaacttaacttgttcatttatttgtttgctttttttgttggggggggtgtctattttccttcattaaatataaatttcataaggggaaaagttttgtttaatttgtgcctggaacataatatgccctcaataaatactttcaggatgaattaataaatgccccctataacatgctgatgaatccttatattcttgggttcacacaacagctttgctttactatcctaccagcttctccctcctttcctgctcaaaccatccatttcaccgagtaaagtcatttcactactcccccaaaacaccatgttcatttctattcagatgatttcatcatatttctcccttgtttatgtctattccccacataccaattctttgagtcccagcttaggtcttacttctcggatggtttttctatgattaccatgaggcctgctgatttctccctcctctaaaatcctgctatccctaacaacaccagctgctttatattttctaattgtttcatatgggttattcttaccttttcactttaaaataggtttatttttggcctaaggatcctgacttacaactacagtatactcagtaaaaactaacacagtgtagggcagataacgggtattcaaaaaatactatggcctccttagatagcttcatagacttccatcttcctcaacaaacattttctaccttttaccctgctgttagctaaatctaactattcttcctgctctatgatactgtctttgagaccagaaccaacccctatgtccactacacagaattctacactcttgcactgcaattcccacagctaaatcattgtcattgccattattgttcctggattctcttggcaattttagtatattcaaggcatagctgccaagatcatcatcctccttgattgtttggaatctttatttttttaaatccctgcattttttccatcaaactttaagtgttcctgtgggatttgtttttccttggctccatccttggcctggttcttctccactttcttatgttcagtcactcgatttgccctttgtctcatttgaaggaatcagctttcacaccttcttttaaactaccttgcatatttagaatattttctcaaataatataaaatttataatatttatgaataaatgacacaatgccaagatattctgtctcttctttcaaataacatctgaagatgcacctgcactagtgagttctatatttaagatattgaataagtatcattcacccatctgctttcattctgtcctgcattttttaggacctgcttcagagttgtattttgaggtcttttggacggggaactgtctggcatagttcacaaactggcctttgctctgtatattcatgttcctttgataaataataaataataataatagcccactgtgcatttttacattccactcataaatccctggaaaaagaaaaactaacaaccagggattataatagaaacacagaaacaaaactaaccttttaccaggttttgctacagtaatatatacttccatagacctatattctaacaaataattacctgcttaagtcatttgtaaattgttcctttgccaacattatgtataatagcaaatgtctacgtggtttataggacagggaaaacaactagaacattacagctatgtgggggatcagtgcaaaagcagcaaaataagaggtttactctgttgggtgcacagtttggaagaattagtctcacaagtagaactacttgacagaatatatgcctgctctccagctcccccttctcccctcctccagatcttttttcaataatggaagaagacttactttcttttttcaaatccaggtgggaagtgtatcattttgcgtgaaaaatctgtttttctttgaacataacaaatggtctgattgaagctgctctatgaaaacggcagcatatctaaccagggaggtgggaactatagtttaatgggtggagcacctccatatttagctgcagatgagccacatttaactttaaaaaaaataaaaatttaaaaaataaaagaaggccaaaatgtaatgattgtcttgttactgcagtggccactagatggcaggtccaaaaatctgatgggagtctcacaggagggcaaatcttagggagcagaatgtttctggcactcaatccagtgttggttcatcaataagccttggcagtttgctaaaatatcaggtgggtaagacaatatccatgttatttcacagggctgaagggggcaggaagccctttggtatctaggtttgtagagtattgtcatcacatactcacacatccagatactgctacccctttggacttctgtccacagacattcttggagctggtttttatatatgttcagctgtattccattatctaatggtctgtgcaatactgagccataatctcaggagtgtaaaaggtagttgtctaatctgcctccatggaaacaaatgaaggaggctgtcaggctagggtaagggaacatacagctgtactgtatttaacaacatatatttaccagtaattgcaacttcatgttaaatatgtgtatttcctatactggaggctgaccatatattcatgttaattgttttgaaaaagagaatgttgatatataagagacttattatttaataggataaaataactaaggcctatgattaaaaatgaaatgagtaaatttagaacaaattatttgttgtacacagtagagttttcattttcttttactaggatgggagacttctagatgtgggtcttatgagactataaaaaagtcattcttggaccaattattctgaagatagattgtgtctttcccttcataatttttttttttttttggttactagattatcctgataaaagtgatttcactacatggacaatgcctacttttctttatcttttaattaaagaactgaccttatgatttttaaaagtagagaatcacaagctctgagataatttatcattctcactaaagaaaatgtgctctagagtcaaatttatctttgtacaagagctgtgacatgcattttgatatacatttaagcatctatgtcaattaaaatattataaaaataaaagcaacaaaaactcaattatagccatgcaactcagtcatcactcaccttttgttccctttttctttgaaaatttagatagaataatggtaaacatgttgatttcatctattcttgctctgtatatttggactgtgaaatgtctacatgagacacaggaagagggcacgggtcttcaggataaaaaacaaaaaaaaatttttcctaaagaagaaatatgggctatattgaattatgatagatgttttaaatcagtaccgttttcctttagtttggagtaaaatttaaaatgagatgactgaaataatttacgataaaatatcatggttatttctacatatttaaggtttaaaaatgctcaaacttatactttcctcatagaaagagcactggaatgggaaactgagaggtctgggttctattctggctttgacagtgactcactgtgtgacatccagagagcatgacctccccaggctcctcacttctgaaatgggagggttttgaggacaaagtctctctctgctttaacattcaatatccaagtaagtaaattgctacgtattgcagatttttttttcctcagaaatagactaatttcctccgatgaaagaataatactgttaagaagctgatgttgaaagctaacatgtccctaccaacactgtgggctctacccatgcaggtgaagctagagcttgttcttccttcaatcccccctttccctattctgcaccactcttccacacactcccccatcatctttaagtctaaattctacctgagaggtcctctgtgacccctaggtagttacttgctaattattactaattattcaataactgttttacttttcctcttgagcacatagctaagttccatttcccagccttctctgcagatagctatggccctgtgaccaaattctggtgagtgggatgttggtggaagtgacatacgctgtcccaggcctggtccattaaaagttcctgtgtaatcattgctctctcttcaccagatttctggctggatgtcacacccacagcaatcttggaagctatgtactgaagagcctctgtcaacctgggtccctgaccagtctttacatgagcaagagagaaactcatgttgaaatactgagatttgggagtgtgcgtattatagaagctaatgttaccttaactaagaacactcctaaagcagaaatttgttctctctccgagacattatgtctcttttaccacattttccacctttaataatttatttactgatatgtaagctccttgaggatagtacatttgtttcactagtgtacccacagaactctagttagttgaatgaattcagaatagaacatagctggtttggaaagtacagaagttacagaaggtagtaaaagcagtttgatttttaaaaattctagctttgtgttttatcctataatatttaggtagaaggtagggatgatgggttggggttttgttggtgtggaaatgtattgtgacaaccacagccttttaatatattttgtgtactgcatccccaataaacatgttttccaaataaagtgtaaagtctttttctaaatgctgtatggcttgccttttttatatatttgtgtaaagaaattcgtagtagtaattctctgacactgagttaaaggaagtcctattttttttcacaattatgtgaaaacacaattatgtgctgtataatgacattttagtctacaatggaccacatatctgactgtggtcctgcaagattataagataactgaaaaattcctaatgcctagtgatgtcatagtgatcataacatcacagcacaattactttttaaaacataaatttagtgtagcctaaatgtacagtgcttataaagtctacaggagtatacagtaatgtcctaggtgttcacattcactcatcactcactcattcactcacccagagtaacttctagttctgcaagatccattcattgtaagtgccctataaaggcatacacttttgatcttttatgctgtgtttgtactgtaccttttcaatgtttagatatgtttagatacatgaaaacttaccattctgttataattacttacagtatccagtacagtaacatgctgtgcaggtttgaagcctaaaagcaataggctatatcatatagcctaggtgtgtagtaagctctatcatctaggtttgtgtaagtacactctatattgttcacacaacgatgaaattgcctaatgatgcatttctcagaatgtattccctttgttgagcaatgtgtgactacattttgaaaagttaaaataatactaaagggagggacaagtgaagagctaacttgagaaatctaagaactaggtaatttaaaagaagtgcttttagttacatagggtttttaacatcattaccacctatgaaattacaggtattaactactgtctcaaaatgatcatcgcccttttgatactttactctcagtgtcatggctgacctcttttgagtcaagtttattggacattttcagttttattttttaattctcatcactgcccctccctgaaatacttcatccctggtttccttaataatactggcctaatttccctattctctatctctagttttctctcctcttttgtttggctcctctttctcatctattctttaagtattagaatttcctagtgttctgctctgagtttttctttctctcataatttttccttgagtcatcttatctagtcttatggctttacctactacttcctcacaaataactcccgactcttgatctttagcccagacctttcttcggagcttcaaaacctgtattgcctatagtatcctgggcattttaagaaaatctaaatattttgtgccaccttaaattcaagtcccaaaccaaaagcactccttgccctttcaagtcaaaccttcttcctcctgtgttccagctcttggtagatgacatcaatttagaaacattaaactctccttttctttctttcttgtcccttatctaaattatctaattaagttctaaatcctgtagtgcttttatagtccatttgagattttagcctaagtttgaggactagataagtgaagacagattaaaaataagacttcttttaactcagtgtcagagaattactactatgaatttctttacacaaatatacaaaaaaggcaagacatacagcatttagaaaaagactttcatacccttccatcataccagagttccattatcagcctgaagagaaccaggagagctgtcctgagagggagctttctcacaatcaggactggattgaaacaaaatagaatcaatggaaagaaagatttttggggaggggagagaagttttgcttgctgctggtcctttggtaacctctgcaaaagaaaagtttaaaaaatgaccctggctggcaagatggccgaataggaacagctcccgtctgcagctcccagcaagatcaatccagaaggcaggtgatttctgcatttccaacagaggtacctggctcatctcattgggactggttagacagtgggtgcagcccacagagggcaagccaaagcagggtggggcatcgcttcacccaggaagcacacagggttggggaattccctccgttagccgagaaagccgcgagggactgtgccatgaggttcggtgtattccagcccagatactatgcttttctcaccgtcttcacaacctgcagaccaggagattcccttgggtgcctacaccacgagggccctgggtttcaagacaaaactgggcggccgtttgggcagacactgagctagctgcaggaattatttttcataccccagtggcacctgcaatgccagtgagacagaaccactcactaccctggaatgggggctgaagccagggagccaagtggtctagctcagtggatcccacccccatggagccaagcaagctaagatccactggcttgaaatccttgctgccagcacggcagtctgaagttgacctgggaccctcaagcttggtggggggaggggtgtccaccattactgaggcttaagtaggtggttttcccctcacagtgaaaacaaagccaccaggaagttcaaactgggtggagcccaccacagttcggcaaagccactgtagaaagactgcctctctagatttctcctctctgagcagggcatctctgaaagaaagttagcagccccagtcaggtgcttatagataaaactcccatctccctgggacagagcacctgggggaaggggcagctgtgggcgcagtttcagcagacttaaacgttcccacctgccagctctgaagagagcagcagatctcccatcacagagctcgagctctcctaagggacagattgcctcctcaagtgggtccctgacccccatgcctcctcactgggagacacctcccagcaggggtcaatagacagctcatacaggagagctctgggtggcatctggtgggtgcccctctgggatgaagcttccagaggaaggaaccggtagcattgtttgctgttctgtagcctctgctggtggtacccaggcaaacagggtctggagtggatgtccagcaaactccagcagacctgcagcagagatgccagactgttagaaggaaaactaacaaacagaaaggaatagcatcaacattaacaaaaaagatgtccacacaaaaaccccatccgaagatcaccagcgtcaaagaccaaaggtagataaatccacaaagatgaggaaaaaccagcttaaaaaggctgaaattccaaaaacccgaatgtcgtttctcctccaaaaaatcacaactcctcaccagcaagggaacaaaactggatggagaatgagtttgaggaattgacagaagtaggcttcagaaggtgggtaataacgaactcctctgagctaaaggagcatgttctaacccaatgcaagggagctaagaagcttgaaaaaaggttagaagaattgctaactagaataaccagtttagagaagaacataaattacctgctggaactgaaaaacatagcacgagaagttcatgaagcatacgcaagtaccaatagctgaatcaatcaagcagaagaaaggatatcagagatgaagatcaacttaatgaaataaagcatgaagacaaggttagagaaaaaagaatgaaaaggaatgaacaaacctccaagaaatatgggactatgtgaaaagaccaaacctacgtttcattggtgtacctgaaagtgatagggagaatggaaccaagttggaaaattcttcaggatattatccaggagagcttccccagcctagcaagacaggccaacattcaaattcaggaaatacagagaacaccacaaagatgttcctcaagaagagcaaccccaagacacataatcgtcagattcaccaagattgaaatgaaggaaaaaatgttaagggcagccagagagaaaggtcaggttacccacaaagggaagtccatcagactaacaacagatctctctgcagaaaccctacaggccagaagagagtgggggccaatattcaacattcttaaagaaaagaattttcaacccagaatttcatatccagccaaactaagcttcaaaagcaaaggagaattaaaatccttgatggacaagaaaatgctgagagattttgtcaccactaggcctgccttacaacagctcctgaagaaagcactaaatatggaaaggaaaaaccggtaccagccactgcaaaaacacaccaaactgtaaagaccatcgacactatgaagaaactgcatcaactaatgggcaacattaccagctagcatcataatgacaggatcagattcacacataacagtgttaatcttaaatgtaaatgggctaaatgccccaattaaaagacacagactggaaaattggatagagtcaagacccatcagtgtgctgcatttaggagacccatctcacgtacaaagacacacataggctcaaaataaaggaatggaggaatatttaccaagcaaatggaaagcaaaaaaaaatgcaggggttgcaatcctagtctctgataaaacagattttaaaccaataaagatcaaaaaagacaatgaagggcattacgtaatggtaaagggatcaatgcaacaagaagagctaactgtcctaaatatacatgcacctaatacaggagcacccagattcataaagcgagttcttagagacctacaaagagactttgactcccacacaataatagtgggagactctaacagcccactgtcaatattagacagatcaatgagacagaaaattaacaaggatattcaggacttgaactcagccctgggaacaagtggaccaaatagacatctacagaactctccaccccaaattaacagaatatactttcttctcagcaccatatcacacttactctaaaactgaccgcataattggaagcaaatcactcctcagcaaatgtaaaagaatggaaatcataacaaacagtctctcagaccacagtgcaatcaaattagaactcaagattaagaaactcactcaaaaccacacaaccacatggaaactgaacaacctgctcctgaatgactactgggtaaacaacaaaattaaggcagaaataaataagttctttgaaaccaatgagaacaaagacataatgtaccagaatctctgggacacagctaaactaatatttagagggaaatttatagcactaaatgcccacaggagaaaacaggaaagatctaaaattgacactctaacatcacaattaaaagagctagagaagcaagagcacacaaattcaaaagctagcagaagagaagaaataactaagatcagagcagaactgaaggagatagagacatgaaaaacccttcaaaaaattgatgaatctaggagctgattttttgaaaagattaacaaagcagatagaccgctagccagactaatcaagaagaaaagagagaagaatcaaatagacacaataaaaaatgataaaggggatatcaccactgatcccacagaaatacaaactaccatcagagaatactataaacacctctatgcaaataaactagaaaatctagaagaaatggataaattcctggtcacataaaccctcccaagactaaaccaggaagaagtcaaatccctgaatagaccaataacaagttctgaaattgaggcagtagttaatagcctaccaaccaaaaaaagcccaggaccagacgaattcacagctgaattctatcagagatacaaagaggagctggtaccattccttctgaaactattccagatcatagaaaaagagggactcctccctaactctttttatgaggccagaatcatcctgataccaaaacctggcagagtcacaacaaaaaaaggagaatttaaggccaatatccctgatgaacattgatgtgaaaatcctcgataaaatactggcaaaccgaatccagcagcacagcaaaaagcttatccaccacgatcaagttggcttcatccctgggactcaatgatggttcaacatacacaaatcaataaatgtaatccattatataagcagtttagagccaatgacaaaagccacatgattatctcaatagatgcagaaaaggcctttgataaaattcaacaccgctttatgctaaaatctctcaataaactaggtattgatggaacgtatctcaaaataataagggctatttatgacaaatccacagccaataccatactgaatgggcaaatgctggacgcattccctctgaaaactagcacaagacaaggatgccttctctcaccactcctatttaacacagtattggaagttttggccagggcaatcagacaagagaaataaataaagggtattcaaataggaagagaggaagtcaaattgtctgtttgcagatgacatgattgtgtattcagaaaactccatcatctcagctcaaaatctccttaagctgataagcaacttcagcaaagtctcaggatacaaaatccatgtgcaaaaatcacaagtattcctatacaccaataacagagagccaaatcatgagtgaacttccattcataattgccataaagagaataaaatacctaggaatacaacttacaggggatgtgaaggacctcttcaaagagaactacaaaccactgctcaaggaaataagagaggacacaaacaaatggaaaaacattccatgctcatggataggaagaatcaatatcgtgaaaatggccatactgcccaaagtaatttatagattcaatgctatccccatcaagctaccattgattttcttcacagaattagaaaaaaacaattttaaatttcatatggaatcaaaaaagaacccatatagccaagacaatcctaagcctaaagaacaaagctggaggcatcacgctacctgacttcaaactatgctagaaggctactgttaccaaaacggcatggtactggtaccaaaacagatatatagaccaatggaacagaaagaggcctccaaaataacaccacacatctacaaccatctgatctttgacaaacctgacaaaaacaagaaaaggggaaaagattccctatttaataaatggtgttgggaaaactggctagccctatgcagaaaaccgaaactggaccccttccttacaccttatacaaaaattaactcaagatggattaaagacctaaatgtaagacctcaaaccataaaaaccctagaagaaaacgtaggcgataccattcaggacatagtcatgggcaaagacttcatgactaaaacaccaaaagcaatggcaaaaaacccaaaactgacaaatgggatctaattaaactaaagagcttctgcacagcaaaagaaactatcatcagagtgaacaggcaacctacagaatgggagaacatttttgcaatctattcatctaacaaagggctaatatccagaatcaacaaggaatttaaacaaatttacaagaaaaaaacaaaccccatcaaaaagtgggtgaaggataagagcagacacttctcaaaagaagacatttatgtggtcaacgaacatatgaaaaaaagctcatgatcactggtcattagagaaatgcaaatcaaaatcacaatgagataccatctcacgccagttagaatggcgatcattaaaaagttaggaaacaacagatgctggagaggatgtggagaaataggaacgcttttacactgttggtgggagtgtaaattagttcaaccattctggaagacagcgtggcaattcatcaaggatctagaaccaaaaataccatttgacccagcgatcccattactgagtacatacccaaagtattagaaatcattctactataaagacacatgcacatgtatgtttattgcagcactattcacagtggtaaagacttggaaccaagccaaatgcccatcaatgatagactggataaagaaaatgtggcatatacacaacatggaatactatgcagccattaaaaaaggatgagttcatttcctttgcaggacatgaaactggaaaccatcgttctcagtaaactaacacagaaacaggaaaccaaacactgcatgttctcactcataagtgagagttgaacaataagaacacatggacatagggaggggaatgtcacacactggggcctgttggtggctggggggctaggggagggatagcattaggagaaatacctaatgtagatgacaggttgatacgtgcagcaaaccaccatggcatgtgtatacctatgtaacaaacctgcatgttctgcacatatatcccagaacttaaaagtataataataataaaaaaaagatctaatggctaaacctatagaaactctagctagacctgtggtttctattccttcctgggtataataataaaggctcacatttattttaagtgttacatttttcattgacattgaaatgagactcccttttcgactaatcggctgctttgatttcttcaccctaaaaatcactcttcaatgttttccacaattcttcaacattagtaataacttcctatatagtatctgtggtcctttttctttccccagtgtgatatatttatcatctattacacaaacttcctcttttgcttcctcccttttcaccaccagctctaacatcttaaattttcatttgacatactgcttacctaaattatttcatgtgtgttcccatccatggaaattcatttttgtgtgacataaatccctaccctactctatttcacagtaataaaactttatactgaattgccaaagagataggtaaccaaccacgcagtttaaattaagtgcaagatacacatgtttgaatattctgctctctgtctaagatgtgtagagacaggtcctgtttgtgtctgagcattctgtcatcttattcaaactgttggagttaaatcacctaagaactgttttctcactttgattcaaaagtaacttctgctatgcaaaaaaagcacagttatgaaataatatgtgtattaaaaaatctcaaaaataatgattagagtcacattcagtctgtgaaaggagtagctccatgacttgagcacatgccaatgagattagaactcatcgggggttggcattctcattgattgttgtccctctgtaccttcaatggtttccagtccttgtccaagttaacctttgctagttgttgtagccatggtaaatatcctgtttattggattttattagcgttttaaattttgacatttggaaaagcacaatcctccttctttttcatcctgtcatctttagtgtataagtgtccaggctccttccaattttaagtttctctttcctagctttagaagattataattttggaaagtcacaattattctgctagttggtggccagaacatatcaattgcatgtaacaaaattttattcagatgcatcattcatacattttaagtctcacggtttacttctttcataattatttgacatttttggtgaaataagtttagttctgaatcacccattttgttatgttgattctccactatttttggcgatacaatagtaataatgttagacatttgtatagcagtgtaaagttttcaaagtgcttccacatacacagctcttatttgcttctctaccttaggacataagcaatgtggtgttatacccattttacagataaagaaacacaggaacagagtattactttggatcacacatggtaagcctcgaggacagaatgagctcctgtgctagtgttctttccattgcatcgtatcattagtaatgtttacttacacctacatacttactgcttttcaaatatccagacgtcatctcctctactgtaccactctattatcactcgtgtcatattctgtttttatctctttgctaaggctatacccacccttccagttccccactgccctcattagactctgagctgctcgagaaaaatgattcatccatctttgtatctctagacccaagtaagatcacaccacatttttgccaagtctctcttgtgctataaatgttcatcttctcttagttgtaaattgctttcaacccaccttttttttttttttctaacttttattttaagttcaggggtgtaagtgcaggtttgttatataggtaaacttgtgtcatgggggttgtacagattattttatcaatgaagtactaagcttagtacctattagtaatttttcctgattctctccctcctcccatactccatgctccgaaaggccccagtttgtattgttcccctctatgtgtccacgtattctcatcatttagctcccacttataagtgagaacatgcggtatttggttttctgtggttttctttggttgctgtgttagtttgcaaaggataatattaccactgaccccagagaaatacaaacaaccatcagagaatattatcaacacctctgtgcacataaactagaaaatcaacccataatttttaagtttatgttataaatattagtattatctgagaggaaggcattacatccataagcagaaaggtggaaaaatcaggagagtgagtgatttatttgagagtatctggtttgttagtgaaagagatatgaaacaaacccagggctcctcatacctaggctacatctgtaacaccaaagtccaatgtactggtaccaaacagactggcacttgtgggatgctgtgtaagcagcatggacagtattcccttatccccagtgcaggctacagttgcttaaaagaactatggaaaaccggacattttgttcccttctaatttatctgtgttcctgtagccatgtctccacttctaaacgctaatcacttctctaggtgagcttaagtacctaattattaagagccctccaaatttctagtgtcatcttcaatatagttagtgccctttctgtcccatttgccccctgtgcttggcactgaatcagtatagcaaatatccctaatgaagaatcatggtacagggttaaatttacaaattaagcaattcctttagtttttatgtcaattccttttatccttgtatccccaccctgcatttgcttaaaattcatcccactgagaagctaaaaaaacaatgctactatgacgatttaaagagaaatactgaaccctaggactttttcctgagattcttgttacctgtaaactcttgaatataggatcagattacctaggcttccagggaatagtaagaccatacattagcagatttaatattaatctctagaatcccagatttacttcttgtccaggttaaatgcccttttgattattttagcaaaaaataatacaaaaaattgattacaaccattaatggaggcttaaaatgttaactcccatagctttaacccagtatctatgattaaatgcaaaaaatctaagttaatgcaatgttaaggttgagcttctaattgcacaaaagtcatgaaatttaaaattaaggtttctagtgctactctctgtcatttctacaacattcctccaatggttttctacaatatatgtttcatttaaatgtgtgtgttgtagagttcccaggaaagaacataaagcacaacagatcaggattcaacttgtggatacctagttttacataatcaatatggctggaaaagtgtgattcttttttaaactacaatgccctatttgagtgataaccatattcctgtttacaaatttgcccatttcctctaaaaatccttgaatcttcacttctgattacacactagccatcccctagagaaggaaagagcatttatgtaataaacaaaccaaacaacctgtggactgtgatagtacctacagaccttttcttcaacatatgacaaagcatattcatgtgggattaatgttgaaagagtaactcagaatatttaggtttatgggtgcatctagcagaacaagcaaaggtgaatagggactggaatcctgttaatactattaataggactagctgaggaaactgtcatcaaattattaaacctctctgaatgttattatcagagtaagaatacctgcttgtaggattattaggaagaacgagtgaagtaatatatgtaacacatgctctttaaaactctcttggagtttatagtaatagatcaactattactattaaagaatgagtaatcataatttaatgatcatctggatgtctacaggtattttggaaatatgaaacaatgataatttaaaattcattttattgaaagatacctagaattatttttttcacaatagtttcattaagttaggtatttgtttatagcctactatggaatgcccagataacatttaatacatgatgcactgagctgcatcagctaactctgaaggcaggtgagttaaatgaattcttggatattgggctgccatgcccaatattttcttcaaattttatgaaacatttgtgtctaaatagaaaatgtgcttgagaaattctagcccaacatgcaatttagagagaaagttataaatcataaatataagagcttagagctaaagtgccacctcaaccataactataataaaaactcctaagtgcattctggcaggaataaataaaaaatggcaaagcctgttgtggacggtgcagagcccaggaaggtaaccaagtgagtaaacagctaaggcaggattatcctcatttgggaggactccattccagacaggaattaaagaggaggggctggggaagggagaatggaggttgtgggagaaagtgtttttgcatttgaaagcagctaagttaccttgtgtaatgaaaaggaaatttgtttttttcctttcaacagtaatctcatttgaggtctagcagactgctacacaaaagatacatgtgttctacctacttggtttttctcctctggcagtgaggtacacaggaagggttcaggtgaatcagaaccattcagaataacatagtcaaattcctttccaaaggtttaaatacctattctttaatagctttcttcaaaagactggtaacttactgcactgttcctggcacattcacaaccaaaatttgttcctgggagtactataatacgatgcaacaaatgggtttaaacgaaagctggaaagatctatactgaaactatgaatcacaattactgaaagcaaaaaaatctcatacacatataatatccagaaaaacatacaactgtcccttggtatcctcgagggactgattccaggaccccactgcagatactaagacttgcagatgctcaagtccctcatatgaagtggcacagtatttacatataacttatgcacatccttcccttatacttctcaccatctttaggttacctataatatctaatacaataaacactaggtaagtggttgttatagggtatttttaatttgtcttttttttggtatattgttattttttattgttttttttccaaatatttttgatgtgtggttgattaaatctacaaatgtagaacccataaatactgagggctaactgtataaccaataatttctgagtccttttgtctctccctatgttaaagcaatggtgtagatgagatttctctgaatagaggggagcagctggaccaataagctgcattatcacttagagttatcaggactatatcaactgattcaagccttagcccccatctccgacttgctgtgatatgcaccaagttgcctttcttcttggtactttcctttcttaacaacaactagtaaattgactataaaacccttggctactataaactctattagaaaactggctgtttccagcatgagccaaggactctagctttccatactcaaagatttatatttctcaagtttcttaacaacattggcatatatttattacaatacagtttatacttttaaaatcaagcaaacagttaagattttaatggtcataaaaatgaagaacgcattggctattttctgagtagtgaaaaagttctcttttataatagcttaactcaagaacttttgaagtctttttcttcaaagatttttcatacaaaaattacctttgagagtaagcatgaaaaaatctcaggaagtaggtaagtattgttaatttaaatgcctcccttttcactccaggaaacataaaaccaaatgacaaagtacagatgatttattccacaactattcattgagcacctactattctctggcactgtggtaggcagtgaacaactctgctttaacagtgagaacaacattcttatctcctgtgacccttaaggaaagactagctgtagttagacttactggatttggtcataaagataaattaaatataaagcagtgaccatttaagtttaattatgttaaagaaattttgaaacaatagcttatttaaatcatttaagtatttgtttacaaatttttaccttctttctaaaatgccaagaattgccaaccatgaaattatgaaaacaaatcaataaaaatacaatgatttgaagaacaaatctatttaagataaaaaggcacataacctaacaccaataaaattacctgtagcactcttaaaaactagatttcttctttctttctttctttctttctttctttctttctttctttctttctttctttctttctttctttctttctttttctttcactttctttcttttctttctttctttttttttttttgacagggtctcactctgttgcccaggctggagtgcagtggcatcatcttgggtcactgcagcctctgcctcctgggcccaagtgatccttccacatcagcctgtcgagtaactggaactacaggcacatgccatcactcctgcctaatttttgtatttttttgtagagatggggttttgccatgttggccagggtggtctcaaactcctgagctcaagcaatccacatgccttggcctcccaaagtgctggaattacaggtgtgcaccacaacaaatggccccaaaactaggttttcaaatatgtgagagtatctctcagctatgtcaaaaatcctatgagtcattcattcagtgtttatttaataccaaaacatggaagatagtatgtctaggaactaattttactccaacaataaatctagaagaatgagtacctatttcatgtggttatcatgaagaaactctgtcagaaaactaaaatgaaatggctcatgaagttgacatatgtatgaaaatataagaattctgctcacacctcttctttcttcctgggggcattatccatgagcatcatctctgtatatgaaggacggaaaacccgctttggatatgtatgcttctgggtagtctagtcaaaaaggaatatgaactcttttatctctgaatgcttccaaataccagagaagaatgatttatggagttctgtatatgactaaaagagctgctagtacttttagagtattcattctttctttattccttcttcagggtgatctggaaattgcccttcccaggactttctgtctctcatataaactaccatttgtataccactttttaggttgcaaaatgctttcacatgtattgtgcaatttagttaaaaggcatcagggtgcgaggatcaagaacactggctttggtaccagagacatcagtgtttaccaaagctacttactagtggtacaccattgtgtgagccacttgatcactttaagcaacaattttctcatttgtaaattagggataacaatatccaccttgcaatataaggtagagattagcaatagggcagttaaaatgttattatgattaataacccatagtagggacaccaaggacttctcaatagtctgtttctcttcatcaggctggaggagggggtcttcacagttacttatgagtacatattacaagcttctagttaaagtaatggcctcttcaaatcttagatctgaaccatcttcataaaacagttctttaattcatggccaaaaacatcgtttccatatactctcagagacagagtccttttggagcaagatataaagtttaattctaagtctttttttaaccccgaaactattttccctgaagcaatccatgtgctgccatcagattttattaggtgggctaaaatagagtcagaaggagatttctttacataatagctgtccctacagaaacttgagacagtcagcttaaaaattatttttaatgaagaatttttgagatccataagtacaggaaaaattttgatggtctttctcccttactgattcattgataattctcaaacattgggctggcacaactagagtaaatcggtacatcttacacagtggaaagcggtgggtgtagatgtttttggagccagtcagtctctggcagcggatagagtcacacttgtgctttgttgcccatttacatcttcagaaagcagcctgggtgggcatgcttatcaaatgtgctcatttaaggataaacccatttgaatattataacaacatttggcaaacttcctctaccgaatggtggacctggcccactacctctgaaaactattgcctggccaggcaacataggtcctttgactttctttacatggtagaacacatctgagaccttccaatcaaacacccaggaggagtcctgagtgctttacctgttcctcaagcattctgaaggttctagtctggactagtgggttatggatatatggatatgcagtgagtccttccttttgcaacatacaccttttttttttttttttaatccagactggagaattcaaatgccttgttaatatctagtggtcacctttggcatgaagaagtcagcaaacatttactgaaaaagttgcacgtggagaattctgtatcataattaaggagatgccctccactccctgaagatgtttataattcttgctgggaatgagggaaaaacaaaacctatacaggcaaaactgcacagcacttatagaccaacacaaaagtgtgtacacacagtgtacaaagacttaagcagagcaaatagggttaaaaaaagaatttggaagaaagtaatggatatacattttccaaggtgagagagaagaataccatagagtggagaaagcataaacaaaggcatggaaatgggaactggaaagcccaccaacttggctaacatagagaaagcagagcagtaaagagtagggggtaactacaggggcatggggatgcatgaggaaccagtttgtaaagattaccaatgctaagccaaagctcttgttcattccattccagggaaacagaagttgatggagaccttggagttgggaaagaaaaggaggccaagaaggataactggtagtagagtggccttacagctagatgaggaattcggattctagtcttcaggtagaaaagcagcagtataaaatccaaggccaagaaatgagacatagaaaattatgtgtgggagcaggtatcctagatgcttaaaaaaattgttttgtgaagatagtttgaaggaagggtggcctattcaagcggttcagaaaggagataaggggccacttggtctagtgtcagcccttgaaaataaataaaagaaagaggctgaatgaagagatattactgggtgagaactggcagaatttagtgactgactgaatggtaatgaagggcaaaagaagaaaagatttaaaaatgatcgtagtgctggggcctcaggaaagggtcctatggacagtaattgaaaaagaaaactggtggctagagcagaagatgctctggtcagtggtagagcatcccaatgattaaggggtgtatgcatgtgaatgcatgtgtgttactataggcacacagatttaggagtaatacctcctttgccctaatgttacataacagcttacaattttctttcaattgaaatctttatttcaagtatttattaagtgcatactaggtgtaaagtttacaataagacttgtgcaaggtttacaataagaaaacataaaaaagttctattactgaacagaaactagtttaaactttactgcaacattttttaaagagtgtattttcatttttatattaattttctattatttgtaattcttaggccactgacataacagtgctttcattagtgctagatatgccaccttgacacaatttaaaaatcaataatttttcttagtgtacttggatatcttccttttcctaaatagtggttatgcatttggatgaagccagtgaataagatggcttttggtttaaatttgcacccagatcagtcctgatagaaggccatgtgtttctctgtaagagacacatgtgcatgtgcatattctctgcctcactcagattagccttatggccatggtatcagaactgcaaatagttatattgtggattctttcttgtttgtgggtgacaggagaaaggaaaactcacactttttttgaacaaagcaccatgtagatatccaactgaagtgggctctgttcatcctcaattcaggtgtgatgaaaacctacagggagttgaccttcagtactgaccttttacattatctcatttctctcatgcaacttctgtctaaggatgggaagagacctaagagatctattagtctcagaattacattcatctacaggtgtgccaaaaggatatcaagttttaaaaacacaactgcactatttcttttgtttttctttttattttctttttttttttttctttttgagacagagtctcactgtgttgctcaggctggaatgcagtcgcatgatctcagctcactgcaacctctgcctcttgggttcaagtgattcttctgcctcagcctcccaagtagctgtgattacaggtgtgcatcaccatgcccaggtaatttttgtatttttagtagagacggggtttcgccatattggccaggctggtctcaaatgcctggcctcaagtgatccacctgcctcagcctcctaaagtgctgggattacatgcgtgagccaccacacttggcctatgactggactgtttcttaacattaatataaagcaaaggttgcataaacaatggatgtaggaagctcattccttcataattattaagaactgaaaaggtacattgaagaaaactagccatgaataagaaaataacttcttcacagtggttaaagagaaaaggtactgaaaaaagtaaacaaacatatgaaagcctcttaatatactaaggtattactatatatatttctgacctttggctactgagaaaatgtgaaagatgacaattctatagctattctatataacggcagatgctcctcttattccaggaaacaaaatccttttatgacatttcactaaatatctaatcaaagagtattttatgtgctcatttcagatagtctcattcacttgcccttataactttaaatgagttcttttcttaagcaggccagcttgtatattatttatgataaaatactttctttaagatggattcagtgttaattttgtactatatgacttagtacagtgggacaattacatataacacttcttctatcagccctatgtttctatgttctttattaagatattatcaaagtaatagcaaaattctgttaaatgttcaatgtatatctttactgctaattttttttcaacatggtaatattactggtaccacagtgactcctcatatcttgaatatatgcagtacaattcattctctactagcatcaatttctttttgtaaacagaaatttggctttaacacagcaatttccaccaaactatataagtgctaatgatgaccaatttaggacataaacagtttactactgtcctttgagcctctctcttttttcatttctctaatcatcacactaaggattttttttctagaaagctatgggcagagttgatttcacagagttacaagttgacctttttcttttttttttttttttgactgatgctgttaatagagttttggtgactctatcagttaagaggtataccttgtacctgacattttacttgcttgagcaactggccccaactaactgatttttaatattttgcttttctgtttcctcaattttccttccataaaatattttttctacttctatataacttcttttttatttttttgagatggagccttgctctgtggcccaggttggagtgcagtggcgcgatctcagctcactgcaagctccacctcctgggttcatgccattctcctgcctcagcctcctgagcagctgggactacaggtgcccgccaccatgcctagctaatttttttgtatttttagtagagatggggtttcaccgtgttagccaggatggtctcaatctcctgatcttgcgatccgcctgccttggcctcccaaagtgctggaattacaggcatgagccactgtgcccaccctataacttctttatttattttttcttcccttatcaaattccatctcatttttcttacgcaattaaaatatttcctcactacagtttgggtcagcggtcagtcatatttacatcactttttccatagtttggttgatgatgtgcatagagtatatgcactagccaaactgatccacattcactgtggataggctgaagtccaaattgtaagctgatttgtcaacagctttgagtaagcctgatgccagacaatattttaattcttcagtgatatttcctcttcacttatgaaggaagccttgaagatggcaagttaataagtgcattgttttaactctgtaaataatgctttttggggggttgtctttaaagattctcatttactttttataaagaaagttataatttcttattttctggttccattcttgatctctttattttccttcagtttgtggatttgctctacttttaaaaactcataacttatgagtaattttacagatcccaagatatagtttgtttgttttttgagacagggtctcactctgtcacccacgctggagtgcagtggcgtgatctctgctcactgcaacctctgcctcctgggttcaagcgattctcgtgcctcagcgtcccgagtagctgtgattacaggtatgtgccaccatgtccatctaatttttgtatttttagcagagacggggttttgccatgttggccaggcttgtgttgaactcctggccacaaaggatcggcccagctcagcctcccaaagtgctggaattatacacataagccaccacaactggccaaaataaatttttttaaagaggatactgagcatctgaaacaaggggggtttgtagactcacaaggattaaaaattatttcgattgtctttaaatcgattgttttttaatcgattaaaaatatattcgattgaatatagtgatgcatttatcagtctatcattctgtaaatagtatggaaaattctggaaaaaaattcctgttcacaataaaagagattcaatttgcgtaacgatatttactgtgtgcctactgtgtcctgtcctaagacacagtattaaagttctttcacttaaagagttcatacctagcagagggattagacaaatttatagacaattatgcaaattaagtaataagctttacaaaagaagtgcacaaaaatttattgtgggcgggtggtatatacaagtcaatgactttcgttgcatgggagagctaaagagaagtaagcaataagggcctcagaaagttagaggcatttgggatgagcctttgaggataggtaatatttgatatatggaaatgaagatagagatatacataagcaacaaagtgaagaatgatagattggaagtgggctattcaggaaaaaatgcttttctttggaaaccatggataatatttcagcttctattcttataaattagtctcagcaaagttgccacttatcatatgttcaatatgaagtattttccttgcctataagaaacactacaaggatgtgagtagaggtgaaacatagagtagacgtgtcccaattgtaccccagatgtgtttgtaaacttctaggtatggtttccaaagaaataaagctcacagaacttttattaagaacacttttatttctataaataaatggaaactcatcttcagctaaaaatatagtggcggctcacatctataatcccagcactctgggaagcccatgtggggggatcacttgaggccaggagtgtgagaccagcctggacagcatagtaagactccttctctacaaaatattattttaaaacattatttgggcatggttgctcatgtctataatctcagctactcagggggtgaggtgggaggatcatttagcccagaaggtggaggctgcagtgagtcatgatttgtcattgcactccagcctgggtgacggagcgagaccttgtctctaaacaaaacaaaacaaaacttggaaattctagatatccaggtatttattcactaccacatagcttaactgtatttccttattattttgtctctagctgaagttctctggaatggtcatgaagagagaaaacatcaaagattaggaaatctatcccaaaaagatcacaaaatcaaggacagtgacacctttttgagctttttacttgactcttcctgtttttttttttttccacttcccttagtcattcactaatcagttctgctttagaaccattaaaataatagaaaagttacagaaacttggtaaaatgtttctctggcctatttccaaaccgcccaaaattaatgggaaatggttaaagtcaaaaaagctttttctctgacatggatttctaaacaatataattatggttcactccatggttatgagctttgggagctcccacaaaaaagtctttgctgcagatgtggccactggctgctataccaggcaatttgattcatgtttgttgttgttaaaaaaatatataaaactctcttatgttggattaagaggcttttaagaggaagctagacagaaaggccaggtctctctctatttgctcattcatgacaaaggtggaagcttcaaatttgtgatacatgtgaagaaggtgtctgttacttcgtgttacatttttgccttcagaattattgttttcaatcattctattttatataaatgcacaaaaaataagtccaagctaaactagtgatgctgggtcactccaagaagtgtcctcaatatagcttcacaaatttacccttttctctccaaatccacgtttatttcttgagacagttatatgatgttttgccaagaaagcaactgggagcaatgccttatgtttaactgggcttttagatttgagaagcaatccaatccaagacttcatgataagacttccacagcaattggatattagtgacatataaggaccttaagaactccaccattttatactctatataaatgtatgatgtggtacacaaagtattaatcaatacttcatgagcatagtagctctgtttataccaatttctagcaatgtacattaggcaattttgtagaaaaaatataataattgaaagtataatttaacttccactccatgaacacttagcctcttcataccatcctcttccaagcatttctttggtccttggaaaatcagtgaaaaatctgaaaaattgggattttgtgtttgattatatgtacatttactacaagtatactgggctttccttttctgatgctatagagatgaactatagctttcctaactcagtcttattattagccaggtccagtttatattagttaaaatgaacatcataaatttacagtataacttatctggtacattccttctattgtagtttgaaaatgtgccattcaggactgaaatgacttaaacataatcagattttatttctagagaagtaaagtctatacttctataattctgtgaacccatcagcaattaactttgtcccagtagaattaatatagtgttcaagttcaggattgagtagatgagaagaggaaggaacaataaaactcattcactcccatgctaggttctgcaaaatagcttccatattcccataatgtgatatttatcttccttataatagcacatttaaagtcagtaaccctaaaaatctcctacataaaggtttgcatctttccccttaaaaatgtacagatgagcttgtgataaagagatgatgtctcctgccaaattgtaatatcatatagaccagttccaggcaaagtattgaagaagcagtcaaaacttcatatacctatctatccttgtcagcctcacgtattcatggatggggtcacagcttatccctttattctttttggttagaaagtctttccagatgaggtcatcattttcattactctgtttcttcctctctcactagagtgtctttctaaaggaaaccaaggaccacttcagtgaaatattgaaggcaggggaggccctaaatgattaaaagaaacaaagctttcccatagcacgtgtccttttctttgtaaggagatgaggtaatatataatcttcccacgttactaccacaagggcattttgtggcagggagagatggatttctgggagtgaaatccaactgcaaagcaagggctattttcagaagggcttatcttcaatatcctcatttcagaattggtctctttgctcagagcaataccttgggcaacactgagaactcccatctctaaggtaagaataaaagttatttcctcattgatggaatatctgatgaagaaaaaggaagacaaaaaacaataaattattctcataaaaggtgatgcatatgaataaatgtcaaatccttctagtatttctcatgtggcttgtacacaagacttctatttgatctttggctctgcagtttctaccactagatgacccacatgtgtaatctggataggcagctagtttgcttacatataaattaaatagcctcaagtgtcagcagatctctgtatctttttaatatcccccaaactgcttcaagtaggaacagctacaaagaaccttaccaaaggacatggaattcacacttgccaaagaaatcactgcacgtgtaaattagaaactaatcatcacttcctctctggttacagtggcagctttgcctcatagtttatgttgaaatatacatttttatgaaatatttctcactgtagtcagcatcaatttaggagtatcaaacactaattcccagctccagcataccagaaaactagagacagagaagtgcagacaaagggaattgacaaaggcctggacttttcttatacttgaagaagctaattgtatttgtaaatttctggttaaaaacctgacaattatcagatctgccactgcaaggctattcctcaatttcttcatcatatatttttccctaaagtctctcagagaagtaaagggcttctagagatgaaaatgaacttgacaatcacgttgcaactcaaactgatcttgattcttttcgtcactttttaatttattgcagatggtgtaaatgggatgtttactggttggcaggtaatgagtcttgttgtagataatagtgatggacagaatctcacgcctgtcgacatcccagcatctcagcagctatatatggttatcatccattgctttgaagcacatataatattgtgacaggatgcacaatatttcccccatagaaacgatgattggtacacctgaatctcactagttcacatgtcatttgtcctgattccatcctcactgtccacatgagtagacattctaagatgtgatctaatggaaaatgtaatctgtttaaacatccaaacactcctcttccaaggtatcaccatttatcacaactgtcagtgcccctgtggaagagtaatgaccctcaggcatgggataatgctccatagaggccttatgaatgccactgtgaaacacagaaattgaccagttttcagttgggctggtatgtgcatcatgaaagatctgcacttactcactaaattacaagtggctgtttaccctttatacaataaagtctaggttgggaagccacagaccctgctgacttcaattgtcccaaacatgtgagtactagatttggacctgcctttgaaatggacttaagcagcttgaaactggaagttggatcacagtcattcaaaaatacattgggagataacataggtgtcattgccttccacttttttgcctttttaaaaaatcctctctatcaatggaggataacaacatctcactatccactattagcaattaaaaactaaacagggtaagcatgccagtgaaaagttaactatttgtttccttcttgtaagcttcccttcatccagaagaaaatctggatctggatctgttcatatattgtttctacaaagcagaacaaaggtgaacagttatgtggtatgaactcatgattttcaggtccctcccaatgggtccatttcctcattgacgatttccttgaagtcccctgtaccttcccaatcttatctacattttctatgaagtcaccttagataataggatcacttgcactctaagactgtttacatctcagtaaatgctctatcactatgaaagtttcatctaaaacatatctattcctcagtgctcagacaccctgaagatacccttcaggatgtagcatccatatgaagtcacaaaataccagttgatcttcccgtggaaattgttttccaatctgtatgaattgaatggctcaactaaataaatgaagaaaatgaaatattttactcacagtgattcattccatattaagaaaatacactaagtaatgaatggcccctatgaaatcattacagttatgagcatcttttctacttgacagatctctgttcccctcgcagatgagttatgccaacctaactatacttttggtattcacaatattctgattattagtatctccaaagatgggacttaagacactttcctgagaagagaaatttacaattagatacatcttaacaattaataaaattaatgagataatgaaataagaagctctcagtatactgctgaggatgcagaaatctttttgagaattaggaatgttctagaagacaataaaaaagatcagattgtgaactgagcaaaacaacctttgatgtgaagtgtcagccagaaatgtcaatccaattcaagactgcatacaaaggggcactgtgtctttgagctgagaggtattatgttacctgattatcttctctggaagaatgcattatggtttagacacttttattacctgaaagatgtagacaaattagggaagattaacaaccagttttattaggaagtagcagatgagctggtgtgaatggtactggttgttatgagttctgtattctcttttcagctttgatatgctctcatgtgggaatagtcatccttgaaatttagataggataatttatattcttttccccagagaaaagacagtttgggaatgaaagggaggggaagtgtttaaaacagcacaagaacctgggataacagaagggtcagaaattctattatagaatttttcaactcccatttacaaaaatacaaccaacaataaccagttcttaagcctttatttgaataagctcagtacatttagtatttgcagtatgtttttcatatatagtacctaattgtttttggtccacagaataaggctattctatgatactatgttattatgttcatgttttcctggaaatataatttgcaaggtcattctaggaactctgattatgaaattcaacatcactttaagtcagttaccctgaactctaatgcagtttcttgtctcttcatacttaccctggagctataacctatagtcttatagaagtgcccttttcaaaaaggctcccactccttgccttctgaatgactgtctagatatattttcacctgtaattgcatactacaccaaatttgcattatatatgaatgtgattgagaaatgattaagataattgtttagtttattagtgaaaataagtggtatataagctaaaataaattattatttttacacatggcattattcctagttgtatttattatgatttaccatttactaaagtatttcagttggttgacaaggaataatagcactaaacttccttcaagcaatactggtgactcactacagccctaatgttaatacattccctcagacttaatcttttaattctattgggaaacacctataaacacaacagaattttttccttttctgatgttcattcaaattacattacctatttccaccattcagtgtagtaatttctgggaactaccttgaggggtggatggtggtaaagaatcaggacatttaaacttctattaaaaagggacagaagaagactttaggtcacctgtgatcttaggcagctttcaggaaacagaggaagcacacttgtgatgaaccttcataaaattggcccatattcccaataattcccttacctattgagattcctggttgctaaggactttatcagttacttcaacaatcctccctccccgctaataacagtacctcatttgcgaacaatactggactgtactcacaattccttttccccttcctttcagaaagaacacttttacgcccctaaatagtcctataaatggccaaagacataggacatgctacatgattcatctcatgaatcagtttctgttctcttggctgttcaacaaaagacatttcaaattctccacgaggcaatgtattacactgccatgagattaatttctgtcttcaactttggacatttcttaactattaactgggattacttcctttttgctcctctacaacccattctctacacagaaactgtagtgatttctttcaatgtgacattagattctactacaaaaatcaccaatggctgcttactgtaactagaataaaattcaaacttctcactctacagcctatatagtctggttcctgattccttctctgaacacatcaccagtatacttttccttattcactgacctgtcataattcacatgcctagctcacttgagcctcaaggcctttgaagttgctattccaatttgcctgaaatgattttccttcacatcttcatatggctagtttctaacatcattcaggtctcaaccaaatgccatctccttacatgccatccgtgtgagattttactcttactttcttcatttcattcttcattgtgtgttagtgagtttacatgtttattaactatctcccttaactagaatgttccagaaggaaggaggactttgtgagttctgatcactattgtatttccagtgtctggaatagtaggtgctcaacaaatacttgctgagtgaatgaataaattaatgaccaaacagtaaataaatagtaaacaaggccaatatcaatgctctttattacagtagttatttaaatgtacctcaaaatgctctaaaaataaatatgtgctttccctgcacattaggattaaaagtactcattttactaattaaaagccaggacctcaatttacattaatgactggtccaagatcatatggtaaatacgtattgcacaattctggtctgaaatcttgttagcccagtcagtcctacagtgatttacttagaacacaattgtgaaccaggtataattaatctgaggtccaccaataggcttgagggggtttgtgaatcctttgaaaaggtattgcaccctcttttgggaagagggtccatagctttcatcatattatcaatggaagccataaactaaaagaggctgggaatctctttaagcaataccattctgaaacaaattattcttaacctccctaggtagattggaaggctgctggcttcaacattttctgtagagaaggaacacctatgaaaatcctatcactggctgagtagacatattttcctttccagcaccaactctggggaatggtgggcctcacaggctggctaacccttcttggagttcacgggaaaaagatgtctagttcaaagacgatgagaagggaggtatcattctaatcatgtggaaagcccactgtgcttttagtttgtgtttgtagcattcttagcttaatttcagggatgttattgtagctgtgaagattagataataataagaaaaactaattcttaggcaccagacagacaatatgaaaaaaatatataattctaaatgtaggtcaaattttatatttatcagcattgatgcagtgttgttttggtctgttcttaaatttttgttttatgaaaaacaatgaatgcaataatcttctaatacagtgattaagaaacagtgtatatttttccacatactatcaaagcagagtaaagagtgaattttgccatgggaaatagtgtattgctacagtaagtaagaatattaagtttaccaagtttttctagactgaagacttaacaataaataaggcacatcttccctgtaaggtttctcttgagtctgttacttttcagtagatgatgatgatgacagcaacagcagctaacatttgttgcttattatgtaccaggtcctgctctaagtgctttacatttattacttcacttaatcctcccagcaactatgtccatgaattaggtattattattatctattcttagagatcaggaaagtcagatgaggggttatttaacttggtaatgaggggtaaaaccaagattcatatcccacctgtctgatgccatgtccaagcctttcaccactacactttcctgtctccctctgtggtagtgcagggatactttggagatgtaacacatcttaattaaaaatactttattgctgaaaagtgctcaccaccctctgagctttcaagattaccatctgagtggtaatctttttgctggtggagggtcttgctttgatgttgatggttgctgactgatcagggtggtggtttctgaagcttggggtggctgtggtaatttcttaaaataagacaacaatgaagtttgccacatgattgactcttcttttcacaaaggatttctctgcagcaggtgatgctgtttgatagcattttacccacagtagaacttctttcaaaattggagccaatcctctcaaactctgccatcgcattatcaaatgagtttataaaacattctaaatattttggttgtcatttcaaaaaatgttcacagaatctttaccaggagtagattccatctcaagaaactcactgctttgctcacccataagaaactactctttacctgttcaagtttgataatgaaagtatgaaagtacaacaattcagttacatcttcaggcttcacttctaattctagttctcttgttattttcatcacattatgtacagttacttcttctactaaagtcttaagtgcctgaaagtcatccatgagggttggaatcaacttcttccaaatgcctgttaatatttatattttgaccttgtcccatgaatcacaaatgttctttatgacatcgagaatggtggatactttccagaaggttttcaatttactttgcctatgtcgatgatagaaatcactatctacggtagctatagccttatgaaatttattttttaaatataagacttgtaaatcaaaattaccccttgatccatgggctgctaatagatgtcgtgttagcaggcatgaaaacaacattagcctctttgtacatctccatcagagtttttcggtgaccaggtattgtcaatgagcagtagtatgttgaaagaaatctcttttttctgagtggtaggtctcaagagtgggcttaaaatattcagtaaatcatgctataaacagatatgctcttgtcctggctttattattccatttatagagctcaggcagggtagatttaacataattcctaagagccctaggattttctaaatggtaaataaacattggctcccagttaaagttacctgctgcaccagctcctaacaagacagtaagcctatcctttgatgctttgaaaccaggcattgacttctcctcaatagctataaaaaccctaaatggcatttccttccaagtagaagactatttcatctatattgagaatctgttgtttaggtcagccaccctcatcaattatcttagctagatcatccagataacttgcttctctatcagcacttgatacttcactttgcacttttatattatagagatggcttctttaattcatcttcatgaatcaatctccactggcttcaaacttttcttctaaagcttcctcacctctcttggtcttcatagaattgaggagtcagtgccttgctctggattaggctttgtcttaagggaatgttgtggctggtttgattttttttttttttttgagacggtgtcactaggctggagtgcagtggtgccatctcggctcactgcaacctccgcctcccaggttcaagcgattctcctgcctcagcctcctgagtagctggaactacagacacgtgccaccacactcagctaatttttgtatttttagtagagacggggtttcaccatgttggccaggatggtctcgatctcttgacctcatgatccacctgccttggcctccaaaagtgctgggattacaggagtgagccaccgctcctgtttgatcttttatctgcaccactaaaactttctccatatcaacaataaggttgctttgccttcttttcattagtgttttcactagagtagcacttttaatttccttaaagaacattttctttgcatttacaacttcattactgtttagtgcaaggggcttagctttcagcctttctgggccttcctcactaagcttaatcatttttagctttttatttaaagtgagagataacgtgactgttcctttcacttgaacacttagaggtcattgccgggttattaactggccttatttcaaaattatgtctcagggaacagggaagtcccaggagagggagagagatgaaggaacagctagttggtaaggcagtcagaacatataaaacatttattgattaaatttgtcatcttatatgggtgtggtttgtggcacctcaaaacaatcagaatagaaacatcaaagatcactaatcacaaatcactcaaacaaatataataatgattaaaaagtttaaaatattgccaagaaccaccaaaatgtgacacagagacatgaagtgagcacatgctgttggaaaaaatggtgccaacagactcaatacagggttgccacaaactttcaatttgcaaaaaatgtaatgtctggaaagtgcaataaagtaaagtgcaatagaaagaggtatgcttctatatcctattttcaatacaaagatgctgggtagccaatttctaccactgtctttgtctatttgacaaaactttcccatgacttttatactgttaacttttttgaatagcagatgagacacatacttgcatcctcaaatctgcaaagacaccttgggccagtttgaaccgaatcccatttttaactgaaaatgatgaaaataaggtacattattagcctgaactttgcataactctaaaatgtattaatcttcggtaaaaattttaatcttagttttagaatcctcatgaagtacttagaatgtttaaatgagataacactgggtatattaaacattatgaaattgccatttctgtagcttaaaaatggtcaattgttgccacagtcaagtgattaaacctaaggtaagtaatcaacttaccttattaagttaactgctattgttgtaagataaattattctcactctacaatcctccctccctgaaaacttttctagtctggaatgtactgctgataactagtgctagggacatagggttgaacttgcccatgattttaatttgtaatacataggcttttaaaattcatatcatagcaggtatacctccaaatgatgccacaaagacagcctagaaaatgggccttagaagattaagttaataaaggcttattatttttcctatagctggatgtactcttaactagataactttcaatagaaatcaagttcatgaagcaggttcatgggaactgtattagtttcctatcgctgctgtaacaaattagcacaaacttatagttctggaggtcagaaagtcctaaaatcatggtatcagcagagttatgtttttttctggagtctttaagagaaaatccctttccttgagttttccagttattagaggccacctgtattcattggctcatgatctattcctccctcttcaaaaccagcaacgcagcatctttcaatctctctctctctctgacctctgcttccatcaccacatctcctctgtgatcctcctgcctgcctctttcctttaaacggcccttataatcatattaggcctaaccagataatctggcataatcttcccatctcaaaaatccttaatttagtcacatctgtaaagtctctttgccatctaaggcaacatactcacaggttctgaggattaggatgtgaacatcttcggtggggtggggaggggggcattaatctgtctgtcacagagaccgaaatattctaggtacccaaatttcaaatagcaagcaagatggtatcttatttctttaaacctcatagcatggtaagctgcacagacatttttacatataccctcataatttttaaggagattgtgatgtacaactctccagtttctcttctggcacaagtgtgtggaaatcatggtcttagctttggtttgtagaaccagattttactcctttacccagttttagtcaatcccatttatatttaaatttgtcctttttgagcattcatactgctatccttagccaaagaattattagtacagtaagtgctttctgcacttccttctcctaactctaggaataaaaggcacacgtgtttagctgagaaccaaccaggacagaattctagcacttctcattacatctttcttgtgctcttccttcaggcactacattgacatctcaataagcaaataacaccagcgttgcaggtgttaacaccaatgactataccatgagaaattcccttatgtcacgccttgcatgggtaaagttaactcaaatgtcttccttctcttacctaaaatatctgcttgcctgacctacatctcccttgtccattgtttccaatgaacactaacccttaaacatttaagcctcatcagcacatgcccatcataacagcataacatccttgtcctgctggaaactattcagcatccagaggaccatctttatgctgataacactaaaatataaaataatgccaacagctggtgctacaaatggcttttaaaaacgatgttcattcactaaaattcctcttgctacttttgacatgaaacacgcagtctctaattattctgatcaagacggtgaaatacaaaaacaaactttaattgtgtttaacagatatttaatcaggactcactgaactacagattaaagctgaaattcataaaccataattacccgattgtcgcaatcttttggtccacattctccttccgtctgggcgtctggcaccttgccccgaatttcttttactgtcttctcagcttcattactgttcatgttttccagcagagatttagcacagattacaaaatatctgttcttggcaactttcttcattagctttttctccccccttgcaaaaagtttattttcttttttctaccagagtagctggaacaggcatacgtttagggtgctttgatgacacaaactaattatatagttatcaggagataatacggtagcgataactaaagttactacagttatcatgtaggtatcatgcaatttctccagtataccatgcggtgtgtcccagtcaccacgtaattacctaatgtcactactgcattgtttcatggaaaatgcttatctcaccccaacaaaaccttttctgccacatttagagaaaaaaaaagaagtgaaattcttagttctcatatccagtactgctcattcccagtaagatgttgtcatgcaaatgtaagggaaacacctgccctctcctgaaaatttgctcttacagggagcaaatggagcaattattattattattttttcctgcttcactctttccaggtaaaagaagtaattaccaacaatacatacattttttctttttttttctttttttaaaagaaaccaatccccctaccgacccccgaaagaaacaccctatttacttaggattcgtttagtctggcacttcccccctatactctttcctttcaaatttcagtcactcacatttgtttttcctagaattatggtgtaaatcattcttaacaagctaacttgaaacttctctcactcagtagaaacacaaaatgccactgtaattgaaacacggaagcttgaaactctttctaaccagttcttttgggccactcttcagaagggcatgccgagtttccctcacagtgcggtaacccctgggtcacacagcgaggataacatcacagaccaaggcaagaggataaagagaaggcactggctaaagaagaggtgggtggttcctttattccccccagttgggcagtcaaccctatgaagcaaggactgtagttgctacttatttatctcaagttgatggcttgaagtctgacctcactaagacctttagatgtgacataccacctgagagttccagtttaaaacaggatgtagcagcttcctttgcagcacaagttgaaagctatttccaattctgcttttattagtcacctcccaatctaagagctgcccattcaattgtacacttaactcatgtcggggtaaaaagcacctccagatttagaagggccagaaaaattgctatcctatcctagcacattgttcttcaatcacacagttcctctaaatacagttgacagcctttgagatgcaaaatgtatcactttaatgtagtagaggtccccttcactgcattgccaaatctatttagcagaatcttcttggaataatctgtccctagacctgaggatgcacagtgatttcaagcattttaagctaatgataatggttagtgctgagaacagatgtacctggctgtgatgtgatctattccagtaggcttttatgagctgttcattcctattgacttagcattttatgtctgtgcttttgcctggtgtgatggttgcataggggtgtcatgtgtgtattttcctgatgtgtgatggctgcacagggggctgtgtgtattttctcagtgcaatggccacacagggtgttatgtgtgtgtttgcctggagttatagctgcacatgttattgtgtgacttttctctctatttgatgcttgctcgcagggtcctatgtgtatctttttcttagtgtgatggttgcactcaatgctgtgctaatgatggacatttctagcaattatctatctacagggtcctcgggaaaaaaattgcagtgaaatcaataaacagtgctagacaggcccttgtaaatatgaaatgacaccatgcataaatgccgtttcctactatagcatgttaaaatccaaattctgttatgttattggcattgggataaaatttctatggtccctccatctccttcatatattgcaatcttttgggggaagttgagattactgctggttggagggcttttacacatgcatctatgtaatactactttttgctacattgtcctacacatcatctcttatactccattctgacttatcctggcataatagctgatattctaaaagtgaatatgcctttcatttattccttcagtctcaccaagccctcccccatataacccctacatcacacatacaaaaccccctcgcttgcctccctctctctagtttctccgtatccctcctgtgttcaccaaacggaactgacaaaggaaacaaccaatgaggttaaaatcttttgaaacccctggaatacagatgagctgggaggcatctggaaacaaaaccagacacttgaaatcaaagagacaagtaaattactatcctaatctaggaagaataactaaaggtgtcagtggggttccattgatagcacttggctctgggccagaatgccaagggttcaaactccacaccagctttgggctcaggcccaagacttgctactgcagggtgcagcagcatgtgcagcagtgttaaaggtgtcagccttctgcagagaggttaagtccaagtccttctgcctgtttgtcattacaccccagagagacggagagataaccctagctttctcttcgctgcctttctcaatagaacaggctgaggaggaactagtgctcagcagcagtacttgctagtatgagtactatacaactaattagtaaaattcccctctactgataaggctgcttgaagtatgcgcaagaaaatccactgtccctctccccccacgaaaaacctgatgtttgtcctaaagattcttccatcaatgcaaagagctaagtttggaaacctaaaaccatgtgtctaaaagaaagaaaatgttttcattggaacagcttacatgtctggtacacttgcataaaaactatcgcatagcattttagagctaaaattgctataaaatgcttaatacagtaagagtaattatgagattttgcatgcacagctggtatacaactagagtctcagccacatattcaatggagcatgggaaaaccatttataaaaattcctggtatgccagtttaactcaccatcaacagcctatcaacacttcattctttaagtggatagggaagatatttacctaccaaatgctttatttcttctctcatggatgttatcaatacttgattcaaggaatttgagttattacttagagagtataaatataagctgttaacaggacatgaatgacctgaatgcaagccttctccactgagtgaagaagttacaatgatagtagtaagtaatgaaccagaagaccaaatcattaaatctacttgtatcttccctttttaacctccgctttttgctatatcttcacatattcttatctctcttcatttctctaagattcaaatcctcgggtgagttcctgggtactctggactcccctgccatagcccacctggccttgccttcccctgagtaacaccctgaagacagagctcttcgtttacattttcccccaatcaagttataacaggtatttgttctccattccctttagttccagctacatcacttgaaaagaaactgatttgggtgagttgttaatggttaataataatttaataaagtttatttcttgatgaaaacattgattttaagagtcaaatgaagaacctctttattgtggtcttttaggctctatggaaaatgccataataggtgagatgattctaatcagaagcattgatggatgctccattgcacattttttagccataggagccagtggatagatgggaattcccaggtggacaggaagtttggggtcacaaaggcagcatgacacaatacaaaatgaatttgaacagaatcaggaaactcaagttttaggaccaacaaactttgccacgaagtgtttggcagacattcagtttcttaacctgagaaatgaggcaggccctgggatcagaaactctccatgatcctctctggctcttacattctatgactctctgaccgcagatcagtcaggtctcctggattagctaccacctccagttaagaactaatagttctgaataaagatggcggtcattccacactgagccaacctaactaaagaggtgttgatgtccataggtgagttttacctgtctgcctacaacctgcatacactacttttgagttggctcctttatgctatacagatatttcttagcattttgttttccctcatttacttaattcagcaaacatttaatgagcactttctatacatgaaacacagagtcgatcactaaggacaggactgaacagggcaccatctctgttgcacagatgattttattattcttgtccattctctctctctctccccaccttcacttttatgcataaacacatacttctagaactataaaagtagtatagaaaaaataagaggaattagacttatctgagccagtctgaaatactgtttattttaaacaaaagaatatgataataatttgtgttggcaaaatatatgcattcaattacgcacttcaatagtataaagggtatttctcaacatgtattttgaggtcagtaatttgcaataaggataacaatttgggggaaagaagattataaaggtaaaacattcccttctgtagaatcctgataaagtcctaggataaaatctgtgacttgtgtaaataacctctgggaaagtgagatcatagaattttttttttaagtttttgtttttcctctaaggattttgggttcatatccctccaaattttatttcctgacttaaaaataataactgccacttattgagtaaatattaaattccatgcacttcaaatacattatttttataaatacagtatgaaatacaatatattaatatattgtataatacaatatgatatattataatacattgtaaatattaaattcaatatattattaaagcaactctgctagatagatattattactctaacagacatgaaaactgtgggtcagagagctgaagtaacttgtcaaagataattcagacagtgtgcagagttagaatttaaactcaggtctgtatttgtctatgcaatatggctccataaccatttcttggttctgctgaatctaactttattttaaaaatgaataatcttgcttgaatgctttgttagcaaataaggaaagcaccctttttactcttccttcacattcattcattgcattacatatagtacaatgaaaacaggagatggttaagattttttcaatgcagatctggttgccttttcatattgatttggactgagataattaaatttgggctctcaatcaaagtgaaagaataagctatttgctatctgaataagtatttcttattaattgatcagacatggataaggtgtgttattacaactatatttgtaaggtatgatttatgttgttctactgcatattactctgtgctgtttttcattttcttgcactttggactttttgttttgtttttatgaatttagtcacagttggttgtgtgttgaactttgtaaaaatgtaatactaaggaaattaaaaaaagaaagaaaatattttcaaaatgatgtcaaaatcaaatctacccctcactaatttgatttgtaggaaatggagaacaaagtattagaagcagaatgcttttaaataatcctaattacttcaatgtgcaaatgcattgactaaatcgaagcatgcgtttaacactttgcacttcaattgtgcttattcatctaagttctatagatagcaattctataaaaaacaagagatatagccagccattccatagttattgggggaaaactattgttctaaaattcaagcttacctctcaagtcagcccacttttggactaacgcagatcattaggtcaaagaactcaaaataacataatttactgtaactactcaggttttcccaattgactctgccttccctattctttttttctgccttcagcggggtggggtgaggacgtggaggaaggaaagcttctgttaacaaagccacagagtggaagcagcaaggcttttggtagtcaagccacacagcattaagcagggccaatcttaaggaataatgccatggggttagagtggtttgtgatcaaggctgagatggagtcatgatggcagggtaacttagtacctggtctaggaccagctgcatcagaaccacctgctgagcatgttaaaaagacacatttcagggtctcactccagagcaaaccaacagaattagtatctcttgaggtggaactcagatctccattttaaacaggctccccaagtaattcttatgctacttaagcctgaaagcactggcatatgcacttaagctctctaattctatatccagcgacagccctgctgctacacctgtatactctgtcccagtcttcaagacatatgtgcaagtccaactacttgtcctgggaggcattaatgctaataataatggcccaagggcttagctaggcatgatgttatttgacatgcagtatctcatccaatccccacagcaaactacgagacaaagatgattactattctcatctttcagatgagaaaactgaaattcagagagacttagtaacttgttctgggtgccacaataataactgaaagagctctgaagaactatactactgtactttaactcagccctgcagaaaaatatcttgaaagatgtttacttctaaaggtgttcataacttggtgatatcattattccaaagaaacttgcctagatgctagtaagatagattatggaataacacacaaagtgtaagcatttctacccaaggaacttttccttagattatttcatagagacttaaactctcaaaaactaggctaagaatccttcattagttcgttcaacaattatgcactttgccagaacctgaggtatacaaagataaacaggacatagtctctgccttcactagacttacagttctgaaaaagagacaagcttgtgtacaaatggttctgggttaacttatacagtcagtggaggcctgagggagagagagtagttcattctcctggcagaaggaaaagagggtgaggtctgtaaagttttagttactccagcactatgccattggctaatgtaaggaacttagattttaaagattatatttttacttgtacagttttgttactaaaggggcagactaagttacttgtatatttcgagccaataaaactttatctggttcattctctctggcatcaaactggttttcttttttgggtaaatttctgggtacagagccaagtaagttgttatgtttattcattcttacacagagcaaccgagattctattcttgaaatgagtgcctaataaattttatcagtagtactttattccacccaataaaagtggttcttccttgacatactgtgtcctttattttcacttgtttcaattactcagaatgctattattagatttgcatattttcataagagaaatttagaaattacaaatgattgaaaacaaagaacaatctagattctttcctttgtgataagagaggatgatcccatatacatgtaaatgtgctttgagtatgttaatcttagaaatgactgaagaaaatgacattctaaagaaaatgagggccaggcatagtggctcacgcctgtaattccagcactttgggaggttgaggcaggtggatcccctgagctcaggagttcgagaccaccctaggcaacatggtgaaaccctgtctctactaaaatacaaaaaagtagctgggcttggtggcacgcccctgtagtcccagctactcgggaggctgtggcacaagaattgcttgagcctgggaggtgtaggttgcagtgagccaagatctgacacttcattccagcttgggctacagagtgagactccaacaaaaaagaaaaaaaaaaaaagaaagaaagacagaaagaaagatgaaagaaagaaaagaaagaaacagagagagagaaagagagaaagggaaaagaaagaggaaaaaaagaaaaaagagaaaaaggaaaaagaaaaaagaaaagaaaagaaaagaaaaaaatgaggttctggaacatcgaagttcaggctaatcacttaaggcaaaggtacaaggatccaaaaaagaaaaagaaattatgaaatatgatatgattcagtttggggaaactgaaaatctatgtatcccatattttagtaactgaataaattggaatcatacatgtattcttttctaagttgaattattaccaaatttgagattcagtgtttagattatttactgcttgcttaaaacttttatttttcaaattatcagagtatttttcaagcattaagaaagttcaataaaaaggcaatagaaatatcaagtaattccaccatacagagataactcctctttacatttgaatgtattctcttacatcattatcgaatactttcatttttatatttgggattgttttaggtatatatatttatttgtatcttttggaccaggaatttttagttgtgttattttataaacttttcctaataaaatattgtttaaaataactttaagaactatctaatttgcatatatgatatgtggtgatacatatggatattcaataatttaataatttctcgaattttgtaatttaagattttaaaatcttttttctcttttataaatgacattgtgataaacacctctgtacctaaatctttgtctgagattctatttcctctagacagatgcctagaagtaaaattaatgggtcagaggacatatttttaaagcaaggttctggataacataatgctacattactttgcagaattttgtgtcaatatatagatatccactatcactatgagtgtctatttcactgtaccattaccagcactgaaaattactatttttcataaatcatgactttgaatcctagtgaattatactttttcatgtttattagatatttgtatttcctttcataatttttctctttatattctttttagccattctatttgactgaacatatatctcaatatcttcatatctgttgcttcaacttcatttctgattgtaacaccatagtctgagctctccttaccttgctctgaatgatggcatcatgtctgcctggtctgtattccaggtttctttgattctgatttattctgcacactgatgccgaacagttattttgaaaatatgctttcatcatgtcagtcctgatcaagaacctatgacagctcctggttatttatctatcagctacattcaactgcctcattcaggggaaaattcatcccattcttggatattcccttatgagttctgttgaataatttaggttattgctatatggaccctatatgcacttacgtttttataagtgggtatttctatataaagacagggagacacaatgtggagtactagaatacaagaactggaaagggctttaaagtacatcaaaaccaactgtctacatttataaataaaaaaaagtggcctacagagtttaatgaactacccatggtcatggagccaattaaatgacagaactaggactagaaactaagttgcattattctcttttagtgacttttagatagagaataataaaagtcatttttacaatttaaaaaatagaaacagctaggaaggcagtttaatttcaatctgttgttatgtataaaagattgttaaaatcatgccacatagaaggcttgagtgttcttttaacatgaataatatgtacttcttataaatcaatcaaatgtatcattagaatttccataaaatttgcacatctgcaaatgacctagtttatttatactttgctttttcccttgctaatctatattgttttatttaatctgctttgccacaataaaagcacagtattttttatcctagcatattgcagattttcactaagtttcttaatcatatcaataaaaaatccaattttcccagcaaattcatataaaagatttcttttgactatagttagggatttgaagaactacctttaaaaaataaaaaaaaaaaaaataggaactacttcaaaatgcctctatttaaatagtaaacaacacgaactattgtggaagaatgtgggctgtcatccatttaatatgatatgatgattgctatatatattcaagaatcccactgtatttgccaaatgaaaacttaacggtagtcactggtttagaaacgagagttaccaaatatatttattatttgtggaagaggggtagggcataagaggtaaatgtggaaatagccatgaatggacctaactttgatagaagctcactgatttcaaagggctgattaacaaagcatgtgtttgcctaacaaaataattgacagaaaaggtatttattaaatcataaggtgattcaactgtttataaaatacaaggtttaaacaaaatggtagttcatcagcagcaatgagagctcagctatgttttctttctccgtgtgtgcatgtgtgtaaccaaacaggtccaccattcacttaacactcaaccaatatttattaagcacctactttgtgctagaaaccctctactatccaaaataagtaaccctgttattttgttacagaatactcgactactctggactgctgtaaaataaaaattaataataatttagccgggcgtggtggctcacgcctgtaatcccagcactttgggaggccaaggcgggcagatcatgaggtcaggagatcgagaccatcctggctaacacagtgaaaccccgtctctactaaaaatacaaaaagaaattagccaggcgtggtggcgggcgcctgtagtcccagctactcgggaggctgaggcaggagaacggcgtgaacccgggaggcggagcttgcagtgagtcgagatcgcgccgctgcactccagcctgggtgacagagcaagactccgtctcaaaaaaaaaaaaaaaaaaaaaaaaaaaaaaaaaaaaaaaaaaaaaaatgtatacctgatataaggtgttataacaaaaataataaattgagtgataagaggagacagatgaaacagcatcctaaatttctcatttcatgtaggatactacttcattaatgacaataattaaacaggcttgaatgtttttcagaaaaacaacagtgattattaccgaaagaataaactgtactttaaaacttcaaattgctagattgataaaagctaaaaaggtaatcacacatcaaaaaagacagagagtgagagtgagaaagtgagtgagaatagaccaagcaagcataaaaacatagaaaatataaaaaagatttatgagatagtactagatatattttttataaaacgaatattagttaatttaattaacattaaaaataataaccataataatgttaaaagataacaaaacataatttaaccataggatagcagtttaaggacactagctttggtagcaaaaacaggattcaaatattatttctgctatttacttgttataatctctttcctactggtgtatttatttagactatttacctcaactttctgctctaaaaaatggaaataagaataactgaacgtagaaaggattgggaaaaaataatatgtaatgcttagtgaccagcacaactaaacattcaataactgtaatttgtaatattatgtgttttaaatgatgtatctaactatgtacccatataaatttaaaaaaaaagaaaaaaatagaaaaatggtgctgatagattttctcaatgcagagttgccacaagccttcagtttgtgaaaaactcaatatctgcgaagtgcaataaagcaaagcacaataaaaataatataaaaaacataataaagagagataagaatcaaaggagtattgtccaagatgtattgttaccttaaaaattccgtgaaatataaaatgtgaaaatcacagaaacacagtcagacttaaaaagaagatgattagttacagaaagctactaaaagcagcccatggtgctgaagccataggcctgctgaaatctggatctagaatcacatcgagatacctagaattccagctctttagagtaatgaggtcaaagaggctccatttgaaatggtggacctgaacctggcttactactttatcacgaggctacaaaaatttggccaactactgcctggggaaacagcttatatagggctgcaggacctgagagctggaagaataaagatacagcattatgataaaatattcatataagaatgaagctgaaagctaccattgtaagatctggattgggactgagaagatccagataaaggcaactgtaaaacccctagttagggacatgtgaacaaaacgaaacaaacaaaacaaaacctgtaaaacaaaattctaaagcataaccaagtaatggtaagaaaatcaataattgtaacattcactccagataaatttgattttatgaaattatctgacaatgacctcagcatgaatatgcttgagatgcttagtgataaagtactcatacctaaaaaagaacaagaaatgattaaagatagaaataaaataagaataggtgaataagagtaaaacttaatcagaaatcttaaaaaattaaaaatgttcattaatataaaagtacaataaatgaaataaaggaatttcaaggaaagaattgagtgtattggaaggtaatgttaaggaattcactcagaaaaaaattgtagcaagaagaattaattttttgaaaatgaaatagcaattgagatactaatcagtaagctgattagaaaataccaatgtttatcttataagaattccagaaaaagaaaatggaagtaatgacaaaggaacaataaagaaaaggataatagctgagaattttccaaaactggagtcctgagattaataagtatatcctgagttcatgactaataattcaaaataaatccacgtccagacacatttcagagaaactacaagatatttaggatatagaataacttttaaaagctaccaggagaaaaagcagattatttataaagagataaaaacagattgatagatttctcttaattaagaatagttgacagaacaatagtctaagatataattgagtaatgtctttaaaatactcaacaaaaaatacccagataaattgctatttaagataaaaaacaaaataagtacatttttagttatatgaaatatatgtattacccaaggtcctcattaaataattactaaaaaaaagtaacaagaaaagtgcacccagaaaggaagccacaggatctaagaataatggtaggcatagtaatatctaaaaatattagtaaatataattaagcattgattatagacaacagtgatcaccacttttgaatatggttaaaaacaaataggtaaaactaaaacttcatacacaattatagtaacaagattgatacttaataggtaattaaaagatgctatgttaaccaccttttttatactaagaagaaggtcagaaatactaaaaggtcgattttatattttcttagaaaaatacacagttcagtatacacaaaagaattttagaattagtgctaaagaaacagataaaccacctacagatttcaagccagaagtaaaatccatgtaccagataaaatcacaaaataagctaaaaaaagtttttcaattaaaaccacataaaacacatcattttattttaatgcgtttaaattcagaaataaataataaaaatagagcaaatatgtttacaaagtaaaagcatacccttctaaatacctcaagggctaaaaataaaacagatattatgaaatatttaaaattgaacaaaactacgtatcaaaacatggtatgcacctaatgagaaaccaggagaaaaatttagagtctgaaattcatttttaaagataataaaaattattgaaagtaaaagggtaataattcaattcaagaatctagaaaaagaaaaatggcctaaaaatataaaaaaaaagaaggaatgaaataacgctaatgctgataaaagcagaaagtaatgatttagactacaaataaataataaagtagataagcagaatcaaaagccagtttttgtaaagaagtaaatgaaacagaaaaatgtctagtgtctaataaaaaaaagcagaagggtcaaataaatattaggaataagaggggaacataaggacaaaaaattaaaaatcataagaatatataaataactttgtacaaataaattgaagtataaactgtgaactgtatttaaaaaaaataacttcccaaaattgactagagaagaatcagaaatttcctctgtggttattggtttattctgatattcaagtctgcctacctacaacctactgatgaaaattaccaagttcagatgacaaatactcagaataaaaaatcccaataatgtgaaaactgtttaagatatagaaaaaaatgaaatgttactcagcttattttgtgaggccagtattgtcacagcaaaactctatagtaacagttaagaaaataaaatttaaagattgatctccccatgtaaacatactacatgtcagtaaattaaactcaatagtagattaaaaaatacaccaagagcaagaatattttttccaagaatataagaactgtttaatatcaggaaatgtattaatatcttataaaatattaacatagtagtggaaaattttatcatattattgatgcagaaaatgcattagataaaatttaactagtatttctgattaaaaacacttagtaaactataaatagtttaggaacatattaagaacttccttaatacaataatttcgatttctcaaaatcccaagcaaatgttatgtttctaaaacatttccattaaaataagaaacagaatagatattcttaatgtgactatcctattcacactatactgaggtttagtaatgcaatatgacaggaaaaaattgaacatttaagaattagaatttaagagaatgactgtcattatttactgctgacatacatgttgctgtagaaaacttaagagaatttaccagtttagttattcaaagtagtaagagagctcagcaaagttgctgaatatataacaataataaccaataaacaatgaaatggaaaacagatatgaatataataatgtaagaatctaagttatatgaggaacaattttacaaaataggttcaagaaatttatgatggaaattttaaaacatgattataggatatgaagatgatcacaaatagagggatatagtatgtcactgggcagcaagacacattataaaaatgtcaattctccccagattattttctaatgttaatgtaattacaaataaaattcagcaagacttttgccaaacttgaccaactagccctaaaactcatattgaatagcaaaagaccaagggagctaaaagaatcttaaaaaggaacaaggtagagagacttatcttaccaagtaaaaagaatattataaagctatggtaattaagggttatggtgttagtacaaggatagaaaaacagtccatcggatcaaataaagatcatataaacagatttgatataggcaaaagatggcattataaattagttaataaagaatgactaattttttaaataatgctgggataactgggttatccatatggaaaaagaataaaatagggtgcatgtagggtaccagaaccaaaaataattccagaaggattagagatctaaatgtaaatgggaaatctttaaaactgttagaagaaaatacagaaaggtaaatgaccttggcatgtgaaaggatttcttaaatgacataaaagcacaaattatgaaggaaaatatcaataagcctagttgagttaatattaaaagctttataaaaacaaatactactaaagccacagttaaaagggcacctacaaattgggaaaaaatctttgtaatctctatggcccaaaatatgaaaatccagaatattacaacaacagcaacaactaataccaaaaaccaaatcaagccaaacaaaactcttccaaaataacaacagcacaacaaataacccaacagaaagatggacaaaagatgcaaattaggcaacacagaagagaaaatcccaatggcttacaactaaaaaaaaaaaaaaagttaatgagatattattcaattccgatcagactgacaaaaattttaaaaagtctgaccatcacaaatgttgtgaagcatgtggagaagctctcatagattgttactgagaatataaattggtacaaatacattggagggaggttttacaatacctagtaaagttcaaaatgcatatttcttaaagtttagcatttctacttctatgtatatatgtctataaaaatgttaactgtggtcttgtttgtgattgggaaacaattaaaataatgtccaacaatgagagaattgataaataaattttagtaatacatacagaagaatacatttcatataaaccaaaatatatagcttatgtaaaactaattcatgatgatagaggttacagtggttttgcttgttctttaccttttgttaaaactttggaaaatttcaccttcaaggggcacatacaaaggattcttcttaggtattataaatattctgcaccttgggttgggtgttgtcacatgtatactcatcaaggtatacacttaatttgtctaattcactgtatgtaacctataataaaataataaaaaataggttcagaaacaaatgttccaaattattaaacttcgtttaacctgggttctggattcttgtatttcatattatcctttatacttccatgtgttttaatttttttttttttttaaagacagagtctcactctgtccaccaggctggagtgcaatggtgccatctcagcccactacaacctccgcctcctgggtacaagcaattctcctgcctcagcctcccgagtagcttacaggcacgtgccatcatgcctggctaatttttgtatttttagtagagacagggttctgccatgttggccaggctggtctcgaactcctaacctcaagtgatctgcccactttggcctcctaaagtgccgggattataggcgtgagccaccatgcccagcctgtgttttaaatattttacattagaaaatgtataaggcaaacaccatagattttcctaactagaattaatcgaggtaaaggaaagcactagtgtcatcttctcttcactatctctgataatagagcccaatattagtaagcacttcacagccaaacatgcctacaaagtgattattttgttgaatcaaaagcaaaagttttcattcacttcttgactgactatagaatctcaggcttccttaagtgagtgaccagagggatatattgttgatatagacagatgctgccaatgcacaaagatcatccatttaggtttttcagttgatgaagtgaggcatgcattgccagactttacttacatgaattaacagaatcaacaggtgatttggtatcagtactgctattggctggcgggtttcacctctggtttcagaaaagaaagagatgataccttttcaatgctgcatttcaagtcaaccatatgaaaagcaaagttttattccagtcacttttctttctctcacattgtggaagaaaagtgccagccactgctactctaaccactaaccatggtacagatgtttgaaaaatgtgaaacagagaaatgaaacaaaaaggaaaccctcaaaaattaagtttcgcataagtgaaaaatacagtatttatgtatcataactgcaaaaagatcaatggacttttttctcatgtattaaacaaaaataaacacaaacattgattttttgacttagtgttttgttgaaaccaacaattacaaggaccaactcaaacatggctaaaagtgggaataaaaataagatttcttttatcctgataaaagattttttatcaccaagaacgttacagtatgacctacttaagtgaatacttattaaagaaacagattcatttaaaaaacatgtttttaggtaaataggaacggtgcaagtgtttctttgaaatcttacaaaagataaaaattaattgaactaactaaggttccttaccctatgcaaataagaaacggcttagaaagaaatgtcttcaaactgttgaaatgtatattccttagttggtgtaaccaatgtgaggtctcagttactataatagcaaatgttctattagatttaagcacatcagtgcaaattattaaaatgagactgtctttgtttaaaataaagctttaaaaaatgtaatgtaatctctgagggagtattgcctgaaatgaaagttttaggccgagctctgccacaatcctattgcgcatcttggttcatctgattaaacatctttgggtctcaaaattcacatacattcacatttctaaagtgagtgtgatataaagtcatagcttgatcatcaaactcctttctagccctaaaattctacgtatctaatgagattaatttatcatgaggtgtttttcttctttcctttgttaatttccttacaataaatagacaaataaatgatcaaataagcaaataaataaatattaaaaagacatacacacactgatagctatccatctgaataggaagaaagacttttttttgtttgccattatctatcccctaatgtgtatttaaaaagagagctcccacagaaaagatttttatttttttctaaatcaaaaatagtgtatcatttatttgccatttaagttctactaagaaggaaaacacaaaatcattatggaaatcctattaggaactttagaaagaaaaagctgatgaaattccatttacaattcaaattgttcattcacgtatttccttttgcagaaactttaaatgctgcctcaaactatcttcacctctttttccagggacaatatccctaactctgttaaaaaaaaaaaaaggctctcttctcacacccttcccacctgtcctctgaggtagttgttccacaaagctaaggtatagattacatcaagagatatttgggatgggagtaaaacatttcaccctggagacagtaatgtgtgcaatttgccaagtctaaaagaaagttaagcctcatcaccactttggcaagaaatgtggttctcatggatggacaatgattatcatttttacacagaacttttgaaaatgaaagtacctggggcaccagccagaaaataagtacgagaatgcaagttttttgcgtcaatatttaaatcagacaaaacactatcagtgtacccttaacagacctgaagcgtctagaaagaatacaaggcagctgacaccttggtgaataagagcagctcagttttatgaaaaggccaaagtcttagggcaaactctctgttgttccaagtgctgatatacctatggcatcaacaaaggcaaaacaccatagggggcaataggcaaggcttctcttacaggcaaggctcctgttaaaggctgggaccctctggactacacactcgaggaaccccaagtgtgggtccctgaggggaggaagtttcctcaaacagaacggcgagaggctgaagttacacagtgtaggagtactccctgctggcagctgaggttggaaatgaactggtgatgtcctagagagggctgcttaaattttctatgaggaggctaatggagataacagtgctcttgaggggacaagagcatgggtctgattaggtttagataactccagatattatgctgagtgaggaggaggttaagggaagctactgatgacaggaactccaacaattgacaaaaactatgtgtagagctggtatatacaattttcatttaagtttcccatctcatatcattctataaagcatacacagccgtatgtgcacatgtgtgtggggttcagaggatgcaggaagaaatctatttctgtgcagttcattttacccctgcaagaacaatctttgaaaccgtctaatgtattcacatttatgttttacaaggaatcccttccatacttctaatggacctgcctggtatgccccctgtaccactatacctaatccctaggcaggtggtctttgtatgggcctggggcaaccacactggtttctccccagtgctctgctctgttagggttcttctgcataataaaatgaaggtcaaaatggcagcctgctaaaagcagcagtatttcagttgcaggaataacttgcttgtcatcaacttgttaatgcaatagtcaaacatttctctgacatgtacagtatcagctaacttcagcagataaagggtctagaacaggaagatgctgcagatgctttagctcggaggaaggcttagcagagccaaaacgtcagcagggcctgtttgttccatactttccatcgggctctgtgaaagaaatgttagattactgcaatgacaagtttgtgacaagcaagtcatttgtgcaactggtgcgctcctgtttttatctgtttaccattcagacttgtgaatgccatttcaagcacttagaggatttctggctcccattaaggggaaatggttcctccatgtttagaattttctacctcaaagagaattactaagcaattatttgttcctgtggtcagtgtcacacaaaagcactcttgagttgtttagctggactctgaatcatgaaatgaagtcctgaagactggatagcttggagcatcaaaaatttcccatctagtttattggaatgactacaaagcaagcctgtgagagacaataaaattatggccagcttgaaataccttgcccttttgctctgggatcatatatcaaggccatatgcttcaagccacataaactcacttgtaacaagtagatcctgagaagctaaggcctggcgatgtcacactgacatgtgatttagcatatgactgttttggtgacaaggaccactttagctgttgagaagagaatttccactgacttctctctataccttgtgggtaactatagggtcaatactaatccagagaacattttaactgtggtaaaataaagtaatataatatcaaattaataactagggccatcctcactaggctgactttttaatagtgaatggagaccctggcagatttgagatcaagaattcaagatcctctcattaggtccttcacctgaagttgctgagtttcttcaagtcattttaacctcctgggacgaaggtagaaaataacagcacatgttcctttccatctgacataaatggtctcagggtcaatattacaaaagatgaagagtgccttcagactcaagaacaagaatgatactctctaaacatcatttattctttctacaattttacatttttgcccattgttggtactgaatttatacataactctaggtataactcccttttttttttttttttttttttttgagatgaagtctcactcttgtcacccaggctggagtgcaatggtgtgatcttggctcacggcaacctccatctcccgggttcaagcgattctcctgcctcagcctcctgagcagctgggactacaggcacccaccaccacacccggctaatttttgtatttttagtagagacggggtttcaccatgttggacaggctggtctcgaactcctgactacaggtgatctgcccacctcggcctctcaaagtgctgggattacaggtgtgagccaccgtgcctggcccaattctaggtataactcttaaagaacataacagaatgaggctttgaagcagacacagatgtacactatctggggaagcaagtcaaagccggaacaggtggaatgtcaaggactagacaaaagtaatgatgtaaagtgaagcagagcttagaaagggctactagagaatgttacagaaagcgataatagtactcattgaataaaaattttattgtgaatgatcctgtgccagacactatgtgtattatacaatttacatgtgtaatttaatcattacaataattctatggcatatgcatgctcaatattttttcagatgtgagaactaaaatgtagggagttaagtacttcacaccataaatatgtaagctgcagagatttgaaaccagttttccattgttccaaagcccatgtactcttaaccatagaagaacgaaagtcatttccactgcctccagaagccttttctctcttgcttactggaaaacatttcagtctggaaatacaggaattcactaatttgatacaaaagggccagtgagaagattctagctctatctgtattgccatccttgttaggcctctgagaaagctgagtttcatcaagatgtcattcctttctccaggcctgacctattcctactttaatgcactggggaagaggtaagtgattctaacctaatcacatatctccgtgctatgaatggagggtgtttggcggcatctccttgtgtccatgacaattcctttctctctcttcatgtgtatagcctttagttcatcctactctttgctcccatattacttccagggggccttcttttgtcacttgtctgctattctgttttaggtgggggaaggggcggacagctttcttaccatgacaaggatcactgaaacagtctcaacttcaaactttgcacagaatgtatcctttgttcggtcttctgctttgtttctctttaatgatagctttgccatgagtcccattcgtatgtaactcagagctatgcaaatcaagctggtaagcaagcatttgcagttactcagtcttaaaatgaatatgtgtccaaccagtggaaacctgagtgaggaatgtctcctgaacattatgtgtggaatggctcctttccttgatgggtggcaaataataaactcagtgagatctgcattatattccctggtctcttttagtgtatgctcagagtgggtcacaagagtggttttagcttatgtaaaattttttcttatagtatttccaattttttttaacttcttgatgtctcccaaacacagaattcttaatagctactgaaaaatccccatgcctgaagaatcctaagatcccagggcaaaaatatggtaaagaacattaaacaacccatggtctgggtcttaatctggtgctcacagtgatcattcagtctctgctgcataccaccagggcacggaactctccactgtaggatacttctttctgttctgttcttccttatgctgaatcttaatccatattagtctgttctcatgctgctatgaagaaatacccaagactgggtaatttataaagaaaagaagtttatatgactcagtttcgcatggctggggaagcctcaggaaacttacaatcatagcagaaggcacctcttcaccgggcaacaggagagagaatgagtgctgagcaaagggggaaaagccccttataaaaccatcagatctcatgagaactcactcaccatcacgagaaaatcatgggagtaactgcttccatgattcaattacttctcaccaggtccctcccacgacacatgaagattatgggaactacaattcaagatgagatttgggtgaggacacagccaaaccatatcataatctatctttctaaaatccccccagtgcgtctagttctttctcaccctaaatttcagttcagagcttcagaaaattattagtttaatgactcatttaatgacaacccttgtgtgtattacataccaacaactgggtttagattgtcctgccttgtccctttctcctcacccaacatgatttaaattcccactctatccctctgacaagccggggagaaataaaagccagtcacacccatttctcatttccatttggatgcaggtagtactggtggcaaagcattcttaatctctttgattttctgtcctattctgtggaaaatctttcctgacaacctcaggcatctttgattgatatggctatttatagattgaccatttaatttattgtccaagcagggacacttttgacagtgaaagggccttataaataattataccaagactacagacttaaacaagaactttcccaggcaaacttacataacaccttgcatatacttttacttcaatacccatctttttgcataaaaactttcatgtctatttttcccaccaacctgtgaacactctttagcaacagaaacatatttttacctatgcagcttcagttcctagaaaagtgcttgtaagtataaagacctgggggtaaatatgtactgacgcacatgcatatgcctatatgcatgtgtatgtgtttgaattgatggtatatttttccataattacattctgtggacctctccccttatttcatagcaaataccaccaacacatgttaacttcatatttttggagatgaatcaaaaatatttcacttaatgccataggaaggaaatggtctgagtatattggtaatgggtttgcttttaatattgacagcaacaaacagaaagtgaaatgtgataaattttccactaaaagtctactgcatatttttttaacaaagcactgaacaataagctttaatcgctttcttcacaagtattataaattgtttcaggccgtgtgcgaaggctcacgcttgtaatcccagcattttgggagggcgaggcgggcggatcacctgaggtcaggagtttgagaccaagaacggccaacatggtgaaaccccgtctctactaaaaatacaaaaattagccagtcatgatggtgggcacctgttatcccagcaggaggctgaggcaagtgaatcgcttgaacttgggaggcggaggttgcagtgaagctgagatggtgccactgcactccagcctgcagcctgggcgaaagactgagactccgtctcaaaaaataaaaataaataaataaatttatttattaatttatttaataaaaaataaaaataaataaaaaataaacaaaaataaaaataaataaataaataaaaatttcagcagctgtatccacaatttcaagtttgtagtaaatgagttattataggaaatgatggtaatttaagagtgatcctttaatctccattaaaatgttggtggcatttctattgctttcaccctcgtcaagcacatttggaagtcctggtaacttttggcagtttttttgcttctgagtaactgtggctttaagaaaaagaaaggtaaggagaaagtgcctggaaaatgtgaaccacttagagaagtcatttcttcccttctcgctgacacatgcagaccattccagaaagatatgactctatactggttaaagagcttcatagaggataatctcacaacttccctttcagtgtttagcactcactattaataacctatctcattatcaaaccttaagattttctgttgcagcatattttgtcattatcagacctcagtgaagaaaagagagaaagccttgtttcccacttctcatcacttgcttaacagctactattagcgctctaccttaacattcctttttccaagataaaaaaagtcaatgtttttgactcttccttgagaatttttttccaaaatgttaaatttaaatttgtttggaggggtttgataattctgtctctctaagatgtttgtattcagtattatctgaaatcagaacaagcatgaataagtatgtaatctatgctcataagaaatcagagaaatatctatatttggcatgcttcttatacattccactattatagctattttaaaatttcagtttgacatttcacactcttgataaactttctataatctacttctagatgctatttttcccacagaggaagtcattctttattttcagtccatcaatgacatttaccaaaccatcacggataatgaaaaatataagacttataagattcaaaagaaacaaagttacatgtctattatttcagagtcttaaatatgtggaaaaaagaagacaatcccacacaaaagaagaaacatggataagcatgctcaggtgtttggtgctagctcaccagctattagtataggtgaactaatacagctatatggaattctctatacaagtgatgaagaagtagtggatgaaatgccacttttgaggtctgctttctctcctgaagaaaactaacaataacttttatttaacaacgttttgtttattcccagttttactgagtgttcatttcagtcctccctctgaagtggttagttatacttatctctcaaattgttgttatttggacactgtacgtaaaagcattgcactttgaaagcatgcatttcttgtcctcaacatctaaaataatgatttgcaaccatttagaagttctggtatcctgttgttaatgtgatttttgcatcactcttccttgcctattccttaaaatataattttaaatgaaaattaatttcattttgaggttttgaaatgcctctaacaataatttagaatacactgaatttgccaatattggaaaacatgtatgtagtctagattatcaagccagaatccaggaccgacctcaatagcatgtcacttctatatctctcaatactgagtctcatctcctactaatcatttcctgagaattctgaagtgctggccacaaaataaataggttagaattttttattttttggtcatttgagacagaattaaaggctctgctggttacgtggagttatatcataatactagctttgccttagttcagcaaaacttacattgggctaagaaagaagataatatattatcaaggcgttgtgtcctggtatcatcaaacgatgggcaaatcgatttcattaggtctctcctaggatatttcgtggaataaaagttagagttctatgtctataacttgcaggatagaattattaaaaatggttgtatttaagtgcattttcccaaatagtgagtttccttttggcagaaaagagacaatgaaggtaaatgtgaaagtatcatcaaccacaaactagtaagctgaactcaagtataatggcaatcttcctgggtgatcagccatagagcaccatttgtgcaagagtctgaatttctatactaacttacttttaaatttcgttgaatacaaacataacaatgtttttaataagtggcttatctattaagtttatagagaaccttccactaaagagattacttattctaatctattcttttgtccaatcttttccccatttttgcccagtgttttgtttatataatattttattctataaaaatctatattatacattttctacctgccttgtctattcttatacattcacaatctattctactcttagtatataatttgaacagattcacatacataaatcaacattcattacttctgggcatataaatggttgctgggtccatgacggctgtttaaataggtagcttccaggccactatgacatagggaaaaactgaaaagtgtatgttttataattattgagtaaaagaggattttcattatggagacatgtacagctatctcaaaggcttatttttccaaaaggaacaacgacactgtcccctgggatatgtgaattgaaaattcagtgtcaacctcttctaaaaaagtagatattttgaggtattaaaaagcgttcttttattagtgataacacctcttacttggggtcgttttgagatgaaagttggcaagtagatttttcaataaggcggggtgggaatcactataaattcataaactaaaaagaagaatgacaatttattggcccaaaaataggggagagggagagatttttttgttcttttttcttttctttttttttttttttttgagacggagtgtcgctcttgtggcccaggctggagtgcaatggcgtgatctcggctcaccgcaatctctgcctctggggtttaagcgattctcttgcctcagcctcctgagtagctgggattacaggcatgcgccaccacacatggctaattttgtatttttagtagagacagggtttgtccacgttggtcaggctggtctcgatctctcgacctctggtgatccacccaccttggcctcccaaagtgctgggattacaggtgtgagccactgcgcctggcctaggagattttggaataaaggtgtctctgtgactaaaaacatataactggtcatagatagtctgtttacctctagtgtcttttggagcaagggtgtgggtctctctgttgagtggtgcctatcattaggcatcacagcaacatcaacaaaactcatctccgtaatatagtagattttacattgtgttaaggtagaccttttaaacaactccttcaagttttctgttgatttcctgccagacagtcagacagctacttcttttttagtaggagtagtcaaggctaaagtcaatacatgtgccttccttgctgagttagaatcaggcatattccatcaacacatatgtcccactgttctcatttctctcactttactatgtgattagtagacaaagtatatactaaagaaagctgaggaagttgctaggatttctaaagaagaagaatccaaatcttgcctactttaggcaaaaaacattttagtattaattgaaaagagatggttaaattgcaacccataaattaaaatgtagttccaaagtgtgtctatagtgatctacaagcaaacataatttctcatattctttttttttttttttttttgagatagagtcttgctctgtcaccaggctggagtgcagtggtgcgatctcagctcactgcaacctccgccgcccgggttcaagtgattcccctgcctcagcctcccatgtagctgggattacaggcacatgtcactacaccgggctaattttttgtattttagtagagacggggtttcactatgttggccaagatggtctcgatctcctgaccttgtgatccgcccacctcggcctcccaatatattattaaaatatattctgcaggctaattctatgttcttatctcattcctgtttcttcctctgctccagaaaggattagtgtctagcataaaacaaacagtatataataaagaacagataatgtatagtcataaaattctgaatccacagcaaaaagagggtaaggtcttagtctagcaggtaagtcttattgacaataataaaggcatgtttctaagccacccatggaaaataccaaaaatgttctctattatatcttgaggtgaagttttggccgtgtaaaaaattatggttaatgctgtgtatgttatgttttatttgccttcattctgggaccacaaaaacggatctaactatagataggggcaggagagcatttgtgtttcttcattagaagctgtgcatgttagtctaatgtataagaattaggaaaacaatactaaatctcttgatgcaggccatgtcataaatccatttatacttatataatattttcctttttcttattctttcaaccttcatgcttcttttttcatttaaaaaactttggggtcagcccttatattaccagatgatttctagtagttgaagcccttgggaaattcatttgtccatccatgctgcctagtttagtacaacactccaaagggaacttccttctaccaaaggcaatgactgattggacttaaaaaataacttctataaatatgacataatatctggaggccacatttatagctggtcaaatgcactgttagccctacaaaaggctggctcataattatgaggcaataacatgtaaatttccctttctgatgagaaactaaaggtcacataggtcctgagttgtattaagactgcattaatactgttcgttagacatttcttttctcagtctcaacaagtcaccttaaaatctatggtatatagcagatcctgagcacctacatgaaaagcaagtactcaaatgttagagacctgaattgaaatcaagattgagatccatccaacttaggagttactgctggttcaatgagtccagggaagaggccatttaatgattcctccaaggaccattaagagttccagggtattcccttggatatctggaaacctgggttacttgatctgagcatgactaaaaactgggcaaagtcttgcatgcttatcctaggttggacacagatctctaagataagactggtatttggtaagctctcatctttcccattccttcctttagagttcatattcctgatgtattcttgtcacaagatacggtcaaggttacacatgggttaagagctcacagcagtccaataacaaacatgttgctgtaatactggtctcccttgtagaccttgaaagtccaatatgctatcatctagggcagttcatgggaaagttgacataataatgcttcaattattcaatttataaatgggacatttaactgatagagtagggaggacaactgagaaacgtttgaagatgtaaatagtttttgtttcagagaacaaccttatctctccaacacagtaatattttttctttgtgtagccaaatttctctaacacgaggctcacacagaagctatagagacttcacctagaaggtctcaatggccttagagccatatatatatttctactataaaacagcaacaacaattttggcccaaatatcataacctaagcaaaaatacaaacaaaatcaaacaaacgaaaactacctagaatataatcttaaaaagtactgcctatatgccatcaccatgtatactataaaacccaccaaacttagaatgcacaatgatgtcatttacttcaatttttataatactgctttttgaagattcctatttttatacgtaatgggaaacatgacatcatataaatgaggcaggcaaacagaaaggtgtagaaggcaaatgcaagatgcctatatattgtctaccaagtgttgccagttgtgaaaggatttgacatgctaatatccattcattcactaagagcatgatggctggcaggctctgcatttaagtgcggttatcgaggcccccaaatattgacagagtgccagattctaagaaactattgatgtacacagccggccacagctccagacacctctcagacagagtctttaaatgtcacagataaatgaattttcatgaaactgagagagaggaagagcaagaggagagaaagaacacagaatgagaggcaggaaagaaacaagaaagaagaaaatcacttccataacactgacatgaaagcatgtggcatctcatctctaaagctcaatcataactccttacacaggatgtgagatcaagccttctgaatgcattgcattaccaaagcactcaaacacttttaatcatttcattgcatggtattttaaaagttaagggagatacatgttacagaatagcttcaacaaactatttctgagcaaaatacagttcaaatataaatacttcccgactcaatcctaaagcaaattaaaaaaatatatatatatataaaggcccacaggcacagataagcattggagccttctaagcagttctccatatgcataaaaggtgaaaagtcaaggtgtcatgaaatctattttatgccaagacacaaatgtgtcctctgacattttcttctccacagtcctactgaaagtagtgacccctagtgggtttattgcacgatattaagggatgccttcttccttcacctctcttttcctgcctttccacagaaaacatctgccaggaaaatatacgagtcagttacttgacacatgataacaaaagtgagccatggttataactagaacgaccaagtattccttagaaatcatgtgtaactcaatatattttaaacgtaaaggaagcttttttactttgaaagttttccatctgctgagggcagcttctcttgaccttgatacactgtgccattgaaagcagtcacactttcaaggttagaatatggcttgtttgtgcatttactgttctatactagagttgtacaatctccacgttttacataaagcgatcatgccaaggcacacaaacaaaattcttcttccaattcaaaagcacatgggtaagttttctgttttggtttttaacctgcagcaacatggtttcacaaagccctagctgcctttttactagcatcacaaaaagccttggtgtaagttatttttctacatctggctctctctgttttggatacatgggactttagcaggtatatacttggagaataaagttccatagctcaaatattcaatagaggttttgtttttgcatcaacttttcagtaatttcttagtacttttcttttttatgttaggagataaaatgaaaggatttagatttcctgccatgggaaaaataattattttccctgtctttaaaggcttttattttgaagacaaaatcagttttaactcaaatggaaattgcagtaaaatctcagacactgtaatcagtgactgcattaaaactctcaagaaggaagccaacttccatgtgaggccacaattcagccaggatcacaaagagacattatccactttgcctgtggccattctgtcattttagactgtaaaatttttatactgtaaaattaaggttcaaggaaatcttctctaactttcacatacatacacataaatatactgatttttgcctgtaaccatataataagcagagaggttttggcttactttagacataggtatagaagacacttaataaagattattaaaatttccttcattatataagtaatagtgttcaccaaatattcagtgattggttaacacaaactgtgttatacaccctacagaaaatactgtaaagttgctaaaaaaaaaaatagacttaaatgtgctatatgacaggatatgacattatatatgctcaatccctcttgtataaagaaaattagtatacatatatacacatatttatgatagataggcatatacacaaacattttcttctggaagtatatgtaagatacttttgatgtatttggggaaaataagatggagaattttacttctaattacatatttttctattctgtttgaattcttcaaacatgtttaaaatataatgccaatagggatatccgagtggtaaggttatgaggaatttttttctcttcatttttttatatactggaaaatttaatatatcatatttcaaaacggaagcatcttcaaaataattatgtaatagtaattcatgttagttacaagaaacttgaaaacactaaaaaagcatgaagtatatcaacaaacagccttgtaattctctgacccaacaataaccactgtcgaatttttgctgcgttgtgtccagtttgcaaagtctcttctgctttgtacagtgtaagtaagaaagatcctttacattcccttaacggggggggacccaaaacagctttatgtgtcatttgttctgctatataccttcttagacaccttcaccaccacaccgtttttagttgccaggacattgttgaaatagcatgctatatgtgacacctccctaaattacacaggttctttattcatctgctattgccccctgaaaaacatgatctctgtgctatttcataatagtacatggcatttcatgatggaagccatggagttgaaggcaacagtggcctcatgctccacaattattatagtatacatactgaaatagtttcgtgaggactcagaaatgttcttctcttctgaatgcacagagatgcttccctgtaaggagctctgtcttagaacttcttcaaagcctaataaagttgaaggaaaaacacagaaaggtgatatacttggtgtgatattttaagcaactgacctattaattataataccttttgatattttctttgctgaggatcattttctgaagaagggtatgaaccttctctttcatgcaaaataccttggtataactgttcatcttttaagtatcttatttgccttttggcaaattaaagaattttcctacctttgttgttgctgttattgaaaagaagataataatgacaataataatttttatagctaactcttattggttgctttctataggttgggcagtttacttacattatttgcatttaattccaaaaatacctctattattattgttgctgttattcccattttatagatgagaaaacccaggcatagaaatgttgaaaaacttgcccaatgtcacaaatctactaagaagtagacgaagaaatctacatcagactcattccaaatcttccttaagattattatctagattagggttacatgactgtactaagaggtccaaaccatgtccagagctttcttatttttctaatactatggggggtgaaggggagtgggaagagaaagagagcgagcgagcacataagattccaaataaaatgttataaaatttatctaagacttcattttcctcacctctaaaatggacagcacccatcacagaggtttatcttgaggaccagttgagataatataagtgaaagcatctagtacaactaaaataaaacaccattattgctctacaagtttccttcctttgcataatggatatgttctggataaggtgattatgaaaaggtataggcttaacttctgttgtcaaatcaaagagcaattacactataaaatctcagagaaggattcccaacagattgagatgaagacctgatgtaaggcaggggttcaggtggaggctgggtctacagatttactgggagcactctgtgggttggtaacacattctagatcctcttacctctctctcctcaggctccttggtctgaaaattcctgagtgtactacagcagtttccagagatgattgctttctttttcttttatctggttacaaagtctagtggaatttatttgcaatgatgatacttcacttgaaggccttatcccacacattatgatataaaatagttagaaattcctttaatgtgagattctcaatcagataaattcactgtgctctatttactctggatgtttggttacaggtttccatcatattattaataatacttgcattaacttcctcatattcattacattgaaaggctctgagttagaaaatatgtattctactttcttggaaaccctacactcactagtgaggcctataaataaaatgaaactttaaatagtacgaacttcaccttcaactcataactaaacccaactctgggcttaaagtgctattttctccctccagtctcatcagatataagtatatcatgttactaactgaggccaagctatatatttacacaattcacttcatactaacaacctgctgcattttgttgcttgccttttcttgaggtactgggacttactcttaaattaatgccttagtttttttttttttctctagggacatccttttacttatggaaaatattcagaaagaatggaatttttaaaataagccatctgctgcgcagacctcaagaaaaacagttatgtttgaaaataccagattcaactaatgaggggcacaaaagccttattaactgtgttagctttcttatctttagagctcaggtaggaagtaagagccgacctcagcatgccaacaggtatcaagtgagagaggtcagcacagtctacacccttatgatatagcttgaacacatcagctcagaagtactcttcataaattctaaaaagagaccttcttccagattatctcgcacatggcagcagcctgggagtccttaagacaaaactctctagttctagaacaattcaaacaaggtgcatttacattatatttaatattttgctgtaagcagacgatagaatctactcaaaactatctctatttcactgtttgcccatattcccatatccgtcctttatttctcagcttatatctttcttgaatttctaaagataagaaatctaatttattcatgtattcattatacaataaatattaagtatctcagaaaagggcaaataaatagatgatagatgattaatagatagctaaatatatagacagataatagataaatagctagataaaacagagatgagttatggcctaaagaaatggctaaggaagaagattgcatattgaggatgttttaaactaggtattgaaggatacttgggatttcaaagtatagagagcaaggagaaatcatttcgagcagaataaactgcatgaacaaaaaggtcatcacacgttgggaaaagcagattatttggtttgtgaaagagagtagtaaaaataaaactgagaaggtaaattagggttagatcacatgagagttcgagtgccaaccaaggaatattactctgtcaataatctaggtttgaggaaagcacagtcaacaactctctagctttcataatttaagtaatgagtattataatccaccaaacctctggtctttaggctccacaggggatacgttagatcagtggtagagaaaaggtcctcatatttaatgagtcctcctccagctgagattatcatgctgcatctattgaagttaatcatctcacatgatttgaacaagaatctcactagttcctaatcacactagcattggcccttcattctcaataacaagttctatagagttacctaaaggctgacactgaggctggctgagatgagagcggtgagtatcccaagcacatgtgagatgtctgtagaaagtttgacataagctgtcatttgattttgaataaagccaaattgttcataagtgattggttacttatatatgtctagttcaggttctccctatgatacagaaagtcattatagtatacgtggaactctgagatctccttacacatcttttaaggctcactcctaactgtttaggattctttgatagaaggtgtttcccagcaccttctgttatgctccctctttattgttctctagtggacttactgacttctgatatgctttgtttttatgtatgtatttgtttactttctgcctctcctctccaaatgttaggtctttgaaaacaaggattatttgaatgtgcctgttttgctcactgttgtatctccagcatgtagaagagatacctattgaaagactgcttttgaaactgaagacaaaatatagaggaaggtaagcacatattaactggtatatgggggaaaaaaggcttctgtataaaactccccccaaaaactcatatgctatataatttgaaaatatcatcagctaattatgtcacggacgaattttctataaaactcaaagcacttttaaattaaaagtatgtattttttcttcctgttactgaagtaacaatctcattctctctattttatacaaagggaaatcatggcagagagagagatactctggagtacagcagatgaattcagagcttctgactctaagggccatctatattctatgcactatttaatgttagtttatattttactaccagtgagatttaagtgctgaattgaatagagtcctagaatttgtaccaataaataatgttattaacttatgctctttctgctagcacatggccttctcacagatataagcaaacaaataaataaagagcaacacagaaagaggaaaggtgaataacttaaaggggtgaacatggttgttcttatttttaaaatccagattgttcattttcgttgtaattgtattgtattctactggcagaaagagatgagatttagtgtactatgcaaattatagtaggtccaccacagcttatcaagttctgagaacagtatggtttctttttcctcagatcctcttttacccttaaaatatcttctggattaaaattctcattcaatgaaccacatctttcaatataaaaaatgaaattataaaagtactaaaagaaaacattagtaaatttctttataatcttggcataagaaaggactttttacctataactcattatctagaagctacatagaaaagattagtaaatctgattatatttacaaacaaacttcagtatggccaaaaaatccataagtaatttttaaaagtgggaaaaacttatgcagctcacatagataaaaggattatcatcttaatgtataaatagcaagaaatacataagagaaagactaacaacccaatagaaagaaaaggctaaggagatgaacagacaccttatggaaaaataaacgctaatgacattaaacatattaaaaaagatggttgacatcacttataattttaaaaatgcaaactaaaactataccgagataccgtcttttaccaatacaattggcaaaaatccaaaagcttaaccaagcactattttatagttgaggcttgggtaaaaaggtacttttatatatgccaatggagctgctaattgatccaactcctgtcgagatcaatttggcaaaacttttcaaaattcaagatgcatataaccctttgatcaataattttatttctgagaatttatcctgcagataaacttgcacatctatgaaatgatttatatataaggttgttcactgtaatattgtttgaaatgaaaaaaattgtttatcaatcgggactgaataaaccatgatgcatttatataatggaatactgcaaaactataaaagagattaaggcagttctctatgtatcaatagcaaaagacctctaagagatactggagaatacaagattgagaacagtgtataaagtggtttaacttttgtgtaagaaggtggaaggagggaatatatattcactttttttgcataaaaagaccactggaaagttacacaaaaaaaataatgaataaaagtggttactaatgggaatagaaagagaaaaaggtggatggggagaagtgaagacgtttttacatagttttgatttttgaaccctggaaatatatagcctgcctcttcaaatatatttaaaatatatgtaaaatatatttaaacaaatatatttaaaaactaaatgaaagataatctcatattaaagtaaaaatgagaacagcatagcaatgataaaaatggttcctgagctccataaatttctcccaacttttagctaccggtgcagccaatatctgggtaaacgtggtaaaaaaaacttggcagtttggtccaaatggcgtctttggagcaaaaaatgattcaggttcttccctttgactttgtagcattcttcagatgttattaaacagttattcctttctaagctcaatcgagttaccagtaaaatataaaatgacattagtgttgcagctgtgaactagttgggatgaatccctttaaaagcctaggatgatttccatgtgttgagtggagaagacctggatgtttgcttgttgctacgtaataagaacaaaacacatttcttgaggaattttaatgtgtaaaattgtttttaaaaataagtaaaatctatttattaattatataatatttatcaatcttctataatacttaggcgatgtactcagtatgcataacattcttaacaggaggcagaatacatcattaggcagatgatgtatgttgagtacttagaagttcctaaaggagaagcctataaagacagtgcattataattaataataaatgtaatagtataatttttttgtaaaataagcaacacatttatccactagtcagaaattatagcttcaattcaataagctgctttctcatgtttgtattgagaatgccatctagaacaatctagaagccacagacaagagcaggggtgaaagctcctaaatttcctatttccgttgtcccatgactttttggtaaaaagataatcagtgaattacccattttgtgtaagaatttcttcctctgggttctgttcttattttaggcaatgattttaaaacatggaggtaggtaagtagggagtattcattcaatcattcatttgtattaattaaacaccaagtatgttctgtgtatttcgctaacattagaaatgcagagacaaaagacataatttttgcccccaaatatttcaatctagtggggagaaaggaaagtaaataaccaactaattataacacagggtgaataacctgctgtaattgacttaagcataaatagctgtgagagaacagaggcgtgggactctgacttttaatgaggaggctcaataacaagttttgaggagtgggtgccttagctgaaacttaaaggatggaagaagttaacaaggcaaagatttgagaggatagaaagggattctaggtataggtaacagaaaaaaaaaagtacagagcaagacagaatatgatccattcatgaactgcaggtggttccagacagaggatagagtgatggttgggaatgccaagaaatgagttttcaggcccatccagattgtgatggaagcactactttagataaggtgataagggaaggcggagatctgaatgaacagaaagagacagccatgaagagcttggtgagaacaacgttcccagcagagaactgtacttattgcacatatatgcctattttaaggaatggttaaagagctaggggaactgattcctggttgtcagagatgagcagcactattccaaatactcttcccctgacaattatctaatctcttttgttgtctctggaagcatggttctttcccatcaatgaattcattcagtccctgtaatcaactctgattagtgttgtttaacatcaatcttttctactttttttcaaagaaagataccaatcagttgctgcacacccctgcttgttaaaagcagcacctctcctgctgacttaccgttcttttaatcaaaagggcaggaggaagcagttgggattcacttttctttttttttctttcaaagtacacaaatgtcaacttccttaaggatgtctggcatagctgagttcagtcatgtaacatacaaagtcagcttgatcaaaaggttgcaggctgcccactgctaaaatggaagagaaaaggaaaccatgggcttccctgaagtgtgaatgagtgcataggccactgccacgtgtgtatttatactgaagacatgctgggctgacaagggagattaggaaacataaatccccaccactacactgctctatcttcacctttgaacctctggagcagcactttctctctttcctatttcttctgttgtgcccagtgaaggagttactatatagctttatagcaactgcaagccatggctatttttgaatatttaaaaaaaacatttttgcggccaggcactgtgcctcactcttgtaatcccagcattttaggaggttgaggcgggtggatcacttgaggtcaggagttcgaggccagccttgctaacatggtgaaactccgtctttactaaaaaaatacaaaaattaactgggcgtggtggtgggcacctgtagtcccagctacttgggaggctgaggcaggagaatagcttgaacccaggaggcacaggttgcagtgagccgagatcacgccactgcactccagcctcagtgacacagtgagactcaatctcaaataaataaataaataaataaatgaataaattcttttgccccaacatttagttgaagtttataattctcaatttgcaatatgaggttataattcacaatatgcaatatgaggttataataatctcaatatgcaatatgaggttataatcatttctatggatttaaaagtgttaataactagaaaaagcataaaactgttcattcattttttttttttttttgagacagagttttgctcttgttgcccaggttggagtgcaatggcatgatctcggctcactgcaacctccgcctcctgggttcaagcgattctcctgcctcaggctcccaaatagctgggattacaggcatgcacccccaacgccgggctaattttgtatttttagtagagacagcgtttctccatgtttgtcaggctggtctcgaactcccgacctcaggtgatccacccgcctcggcctcccaaagtgctgggattacaggtgtgagccatcacgcccagcctcattctcttactcttttaataaatcagtatgtatcatgtgacaaacctgtatctgccaatatgacaaacccttgtcaataattctcctggaagatgcttctggcaacccagaaccagaaaataatttttccaaagagttgattatcttagactaaactaatgactcaagttggttttacaaatagggaacactctgtaaatactcatggacatatctaaacctgaacatacattctcatgaagcacaaaaatcatcatatatggttacagtccccaaacaaggctgcagaagaatttaacattcgtaacaatgtacagctagtataattacattttgtgcaacctcgtaattctttaacagtacaactgaagtgatgagaaggtacatactgatataaggtaacatagctctgtgttctagccaaaactagaactcaggatccattatttttaatctaggaacttttatgtgatgaccatttactaggaagggttgggagtaaaaagcataaggcaattgatatagagaaacaaggatgctttaaaaaaacaaaaacaccagtctaaaagaagactattctttactcacttgaaatggctctgaattcctgggaagagcataggaagaaatgtaactataggatcacttttatatgagtaaattaataaatcatttcccctatgttctctaagaaatcttttagaacaatatttcccaaacttccctaatcataccaattgactagtttcttgtttcagatccaaatgccaaggccccttcgtgaaaatttcttattctctaggtttatggtagactcaggaatgtgcatatttcaagggtgaccctgatgattcttagttcagggatgtttgggaaacactgttctggagaaaactttgtacaatagctaaacatttcttcattcctaatgaatcatcccattttaatgtttctgtggtgtgtcttaagcaggtgcagactctcatagcaaaccataaactcctatgttcctttaaaatagcttaagatacatttactcagttttcaggattagcaaaaagtcaaatagggctgttaactagcccattcccacagaagcaccaacctgtaattcccaagtatcaattctaatgtgttcaaaaataaaagcatatgcttagtcatgtaacagagggtttctttttttacttttatttcattgtctgtcaatctggttgatcagattactaatttctactctactggaagtgatctttagaaaaacaggtctgccatgtttgcattacagagatattaacaataataatgatttttaaaaagtaaaccaaacataaataaacaggaaaagaaaccaccatatttgagtccagtctttgtcctgcctagtgaaacatctgtcttatacctttttgacaggcagaaataagacctttcacatcgcctcatctctctgataaatcagtctatttccttacaaatttggtctgagacaaaactcttctgctcttccacttaccatttagaaaggcacagtcagaaacaccatctaagatgagctcacttctgggtgtctttcagttagacttctattaaatggataacaagaaaactaaccaagaaacaaaaatattcctgtcacttcttttgcaacaattccacaatcttgaggaaaattgaattttgaagaaaagaatggtctatgccatcttacaagcatgagatggaggagcaatgactataaagaatattcgttaattttggttgtactgtagttatattacaaattgcacaattaattcccactatcaaattacactggtaaacaggcctagattaaaaacacaagcctgctctgcttgttttgctctgttatacacaaagtaatcttaaattcagtttattatcattagtatggtttcactttgggggaaaaaaactctttttcctcataaggcatattgcatattgagatgatgaagaccaaagtcaatgctgtagagagttgtagggatataactgctgctaaaataagcacttggtttagtagactatttcccttagacgcttggagcacaataattttttcctgctgggagacaatgtatatcctgaatggggtagggcctgaaagacagtgaaatacagccggaaatacacctgatggcagaatccaccaggatcagacagcatcaggacagcattaaacacagtgtttgaagatagcagaggtatgtggactctcaaggaacactgaaagattacagattgtaggtgagcatggttttgagagtctatctctgctagccacaagaaaattagcagtcaacatttgcaaggtctgtttaattatgtcagtgaccagagctagcctcccaggttaagtgagaacgagaactaacaagctgcccctagcctccttcaggacttaaatgataaagccatggcaatcacagcagcagcagcagcagcaaaagcagcaacagcagcagctgaagcagcaacagcagcagcaagaacatggttttgacccgcagttcttgcccatcaaagagctgtgccctgtctgctcccactgacaggcagataaatacagagatctgttggcaagtacatatttatgtgtatctacagttccctcacacagacttacagagaatgcataacagcttctagtggtataacaaatgcacccactaatggggtgagacccattactcacaaatgggtgaaaagaagcatcaatatgcaggtcttaaccccagtttgtgggcagaaacctgtcattccattgcaggccgataggtctcctattcacacagtccttgtttaattttccaaacaccctttctctaaatggtgctactctgagctgtgtagtgcagacagacaggtttgacaagcagagctgtcaatttcacatttttcatcccaactgcagggcaaaattaggccttgtacgtaactggggttgactggttaggaaggcaggagaggttggcatttaagaggtattttccacattagaaactcagaactcaagatagaaaactcaaaaagggttgtccctattcaacatccatgaaatcaggagagtccaaagatgtgtactggtggtctactgtggggcatatacattttgctgaaacgagaagatgaagggaaaagtaaagcttggtcctatctagaaggagctatgggtaagtaagtagtgaaagacactcactcaaataccataatataaaaatggggcacttgccgtaagagaggaacatagcaacgtgtacacacaattcttggttaaccaagaagttgaatatataagtaatatattagtcaaatttttatccttcaaaaaattttggaattgtccaaagaaaggccaacaggatacatgctaggcaatgatgggtggattaggcatacaacgaaagcaagttaaccagcgctgtttctaacaaccaagtcccagaatatccttgggatctctgggactatctcaagcatataacatgagtctgggatggttttgaaatctctgctagcatatgctctgccctgaggtttctttttggtgctgatttggttgaactgaagaaggaagggagaacacatagaagaagagttctctctattttcaggcggcagtcctatctataccggtggtacagttaagaacctagaatgaatgctcctccagaatcccctgtgcagatcgacactctatggtatatgagatctcacagagtcttgcatatcagaaactcacaaacgggaacacagaagagtctgtgtgtccctgagtttatgctcaagctgtcaaacatcaagagtaatttatgttgttcaggaacatactataacaaagctctcacaggttggaggcttcagtgagcctgagggctcacttcccaacctggacttaccccataaggagcaacggactttgctaacatgaaatcaaaaggcaaaggaaatcaggcatttaggaggtattttacagttacaattacccaatcctaggttggactaggattggggttggtggggaaggagacatggaaagtgctgttaaatgttgtttgaaatgtccctttttgatccccacagtcatgagtgtatttgagtcttgattgctctttacttaaattattgtcattgcccctcagttggcatctctgactaatcccaaccctctcaatctactctgcacactatagccaggttaacttctaaaacatgcctttcattatttttgcttgtctctgtaagtgtttcagttattcagcaaatccttattgcattctaactgtctgatagctattgttctcatcacccacaaaaaataaatctggactctgcctgccttttggaattcacatcctagtcttcaataacatggctctcatttctagtttcactacttcctgtatacaccaactttatttccattggttgatatttttcttcatcctccctacttctctgttttcccatattaaaccattggctaccatctttgcttctttccaaaagaccttttattccattatctttcaacgtccagcttttacatctacagctaaagttctccgtctactattaatcaagccttctatactcctttctaggccaccataatgcagattcttgtagtactcactacctttcgttattgctcatgttggtgcataatggcagattggtaatttccagttagttttaggatctaattactagtctctgcaataagagtataaaaaccataagctctctgtgagcaggtattgtgtttctgatagtaacattattaactgttgtgataactgtgaattaagtttagcatcatacttatttctaaatttaaattgtaccacttctaacaaaattttctccatcgttttattaaaaaaaagtccaaaagaggatgacaataacaggaacacaataaatatatatccacatgtaatggtcagtggtcttttccagtgacaataatgctgcattttgctattagctcctttcttttttacgtgatattcactattagacatactactacactaatgccaacattttccagtaaaaattgacattaattaagctttggatgttgtcagcactagcctagggatagggtaggtttagggccactgagaccaagttcagggtataagatctctgatattcatcaagcagctaagataagaagcataatgaaaggcaaaacaaatggtacaccatatagtatgccgaatatttttaatgctgatttttgtagatagaacttgatatcagcttttactcatttgttattgatatatgtgtattttcttaaaatataataaatatagaaaagggtttgtgaataacataatatgaagatcagaatcaagattagagccaagggcatcagattaaaatgcagatgaataatgaatcacctgtaagattaaagctctaattccaaatggaaagaaagcattggcaaaggcatacaaacatggttctagtgtggtgttcacagttccatgaaggaaaagatgaagcagataggagggtgggcctactgtatggactaggtactggtattaagggttttgtattaggcaagaagacaaaaataattaaaagagtttggactggaagactgggaatgataactggggatagtgaataggatggcctaggtgtacaatgaggtcagcatttagcacatcaggtggccaggactaggacctaaccaagaagctggaaatagaaggaaactccttcattcattatttgaccttacatttttttattgaataatagtagtagactgatctatagacctaaaccagtggatcaacagacctagactagaccatgcttaacagaatttacagtttggagggaaaatagacatgaaagacttaagtaataagatgagagcagccagagacaatgagtaggtaataggagtgaggcccaccaaagaagtgatcatatatcagctacttgaaaccagtggtaaaagtaaactcagtaccaagctcacttcatccaaagcatggattccttatatgttctctgcttgggataatattaagatcaatctgtatgtaaagcttacacagctaggacaagcaaggattcctaggtcgggggagtgtgttcacatatgatggtgtctgtgcatgtaggtttttttcctaacaagtattaaccatgatcctatagcataagagtgagtgatgatgaggaggatgataatggtaatgatgataacagcagctgtttattgagtgcttattatatactaggtattggtttaaatattttacatttattagattacttactccccacagtaattttataataaaaacaaatttatggtcccccacctccttctcctcatccttaatttacagataaagaaactgagtcatgagaattagttttcttaaggttacagtgttgtagaatctacgtagtcttcactcttaaccacactgctctactgcctaaattcaggtaaccaacaaaagagttgccctgcctcatcttggagcttatagatgtctacagaatatattgagaaatatatatgagaaatgatttaaggatattcttaccagagcagtagccattctaaaaattatcacaatggtatattatattgtttagacataaaatgagagtattggggtaacatatatcagagatttggctcttacagattttaatttttaattgtactatttaagggaaaaattgagtattgtgaggagcactggaacaatggaaaaggtaatatggaaagtaaaaagtttagtctcagcctggtaagtgtggctgtctatctcttcaagcttcctttcctcaacggggtgacataagggttaataggatgactgtaaaatgcagttaccttatgaagaatgaaaaatcccattattactgagatttttcaaaccctgataattctgctgggattttctgaaccatgataattctgctgggatctggtattaaacagcatgtagacagattaatcccaagcccagaaaagagcaaacaaataaaacataagtagcataatgactgaagaaagttagattgtagtgtccaatctcatagtggccactttttttgtttgtttgtttgtttgtttgtttgttttgagacggagtcttgctcggtcgcccaggctggagtgtgcagtggtgtgatctcagctcactgcaacctccacctccctcccagtttcaagcgattctcctgccttagcctcccgagtagctgggattataggtgtgtgccaccacatccagctaatttttgtatttttagtagagacgaggtttcatcatgttggctaggctggtcttgaactcctgacctcaggtgatctgcctgcctcgcctcccaaagtgcccaaagtgcttgggattacaggcatgagccaccgcgcccagcctgtagtgcccacttttgacaaagttgattgttcatgtgggagcatgaacatgaaaatttaattacaaactaaggagaaacatacttaactttgaatctttcctattggtttcctggagtcaattttaaagtatcacttaataaatactatttgacaatttgcaaatttatataaatgtattttccttagagtataagcattcaactccaatatgatggtttcctattttcagtttgagtaaatatcaaaatagaatgtccctgttagatatctagggaatcacttttaggggacactatataatgccttactaaataccaagactacagtactattattttcacaagtgagcatgggtcaaggcaaagaagggcaagttggggtaaggatgtataggctgttaaccttgctgcacaggtaaatgtaaaagttccttttttctagcctcaacatgctggaagatcctgactttaaactgagtagagaatgtcttaaagcaaagaaacaagaactcctgtactctgaactttgttggggagttctggccccttttatcatttgatcgtcaatgaataatataactgcgtttagcccttaagcctgtatcagctgcaaacgtgacagatacctgtcatattttagaacagcttatcgcctcagcctctggagtgattgagtatttatagacacaaagatagaaacataaagcacatatgtataggcaggagtcccctggaggtggcgattaggactaggcagtaattttagcttgaagttcctatgacttaaatagccacttgagctctgctcttgcagtttacgatgtcaatagaacccctaaatgaaattacagccttctgatacgcagcaggatatcctttctttgccatgcaatgtacacggccaggagaaattgctctgtatatggagtttcactaaagcagaatttatcataaggctgctctgctaaaatatcattatgctgttattcactggataacacatctaatgactcgaggtgcacttgatagccatgtttcagtgaacacagacgcatgccctgatgtgaactgggcactccagtacttcaaagcactatcgatttcaattctaccataatttacacctggcttgttttgccaatagcttgaacccatgctaacactggaacatacacatacaagctttagaaagatcagaaatgaggtgtatagcaaaaatgaatgcagcaaactctccaggattttgcctttataatcatctcccttgatgccgattaaatattttgcacgattttcctagttaagtttgggcattccctctgttagcattatcctttggttggtgatgatggtaataagaacctcttatatttggacaagctatggacacttctgcagcaggatctgggtgccagtcatcttggttctcccactatctagcacaatgactggcacataatagttgctcatgataatctctgcaggctcctcttcctctctccattccagaaatgcactgtatataaaggaccttctcccttttgtcatctttcaatatatttttcctgagaaatgtccactccataattttaactattaccatgatttggatgattcagatgactgccaaagtctgtccctgacatctccagcattcctgactaaatccaactgccagtctggatgctcccctaacacccccaaattaaacaccttcaaaagtaaatttgtaatcttcccccatcctccaaaatctactcttcctcctcatagcttttcttgcttagttgtataaggcagaaacctgggagcaatccaaaattccttctctccatgcccagcccaaaggttattaaattgtgtcaattttgcctatctcttgaacatatctcctcctctctgtctattcccacagttattgtcctagttcagggcttcattgtttcctgtctgaacaatttcagttgcctcctaactcattttcttgcctctattctcccactcctataatctatcctctaccctgctgacagggtgatcttgtatcacacaatttcatcattaaccttctctacttaaaacctttcaatagctccctgaatgccacaagatgaagttaaaacttctttgcatggcaatcagggtccaacatgattgttccctgcctgcatctacagcatcgtttctctgtactcccctactacacataagtgatagtgttccccagctctgccatgctatttctagttaactgcctttgcccctgctggctcccttactgaatgttcttcctccctctgaccatctgggaaaatccttccattcccagcacggatttatcagctcttctgtgaaacttcctctgatcccccactccaagatatgttcagctgaacactcactgtgcctccatggttccttgaacatccttcagttacggcacttagcataatggtattaccccaacttgtttccctatctgcctctcctctagtgagcaacttgagaccatgttgtattcatctttgtattgtaaatgacaaagccaatgccttcacaacagcatattagggcccatgtgatcagacacccttgtctcccttacttcatctcctactagtctcatgcttacccactcagattctgccacacagacttccttgttgtcactcaaactttccagatacattcatgtccaaggcctttgcacttgatggttccactgttgaaaatgcttttgcttagatatccacaaaacttgcttcttcactttcattgaggtcttttctcaaatgctgtcccccaatgaagacttccctctctacctctccaccctatttaaaattgcaaacttatccctgacacaaacacacatgtatacactctttctcctctttaaattttctccatagcacttatcataaaatgccacatattttacatatatatatatattttatcttctgtctctcctatctagaaagtaactacaaggagaacaaagatttctgtttttttttttctaaatctactgcagtatccccaacccctggaatagtgttgggtacataatatgaattcctcaataaatatttattaataaatgaatcaatctttagcttcttgaataataactgacacagagtagggattcaaaaatgtttctttcctttttttttttttttttggtttgttttttgagacacagtcttgctctgttgcccaggttggagtatagtggtgcaatcatagctcaatgcaagctcaaactcctgggctcaagggataagggatcctcccatctcagcctcctcggtagctgggactacaggcatgtgccatcatgcctggctactttttaaaaattttagtagagatgagatcttgctatgttacccagactggtctcaaactcctgggctcaagggatcctcctgccttggcctttcaaactgctgggattataggtgtgagccactgcatctggcccaaaaatatttcttaaactaaaaaatacatgggtgaatgaatgaattaatgttaaatccatctttaatgaatataatgaagaaacagtctgtgtacagtacagtctgtgtacagtaagttgaatgggttactattatcctcattagacaaatgaaatagatgagtcccagaaaggttaggagccaaaattaaagctactatacatagcttaaacaggtttgctactctttttcaattcactattgaaaggaacagacaattctttgcactttgttcatgatgtacctctgacatttgttatacaattttgcttcctcttgactaggaatgcaattagcaggaggtgcaaggtgctaacactttttattacaatttatgtctttccatattaggtgtttttcataaaaaagatcccctttctttaattttcacaagtggattaggcactcatataattttgcccttcggagtggtttgtacatgactacccaggaggacattgtgttacaaatcctgccagaatgaactggaaggtgagtgcagcattcatagcttaaggatgaacaggttgtttggtgccaggtttgtactaatggagatgttctccattagtgttaactcccaaaggagaataaattcaataacaaaacatttcagtttttggcatttctatggagagttaactttccattgttcaagggttaattatccattatgtgaatcacttttctttctgtggctgcttacatctaggaattcagtttactagagagtgagcagggaaaataaagagacgaaaaggaatattctatatatataaactccaggaaaaaaattggtttaggggacagaatgagatatagtttggggattgctaagttgattgacaattgaaaatgggtaagattaaagcatgttttattatacacaatattttgggttttttttttaaattgtttattagggtcagtttgtagtacatgcagttactctctggatgtgattcttgtcagcacaataccatctagggtgctagaatgggcatttagcaaatggtactttagaggctagctcgacttggtgcccctctcctctgaagaaggcttagtgtgctgcagcttaatgaatgaaacagcactaagtgattccacctatttctctactcattgatgagaaacaactgcagtaggctattttcagctattatttacctcaaacagggcatttaattagtgcttgttaagacagtgcaaatgatttggctgccagtcttcttgcccctgctctttattgtgctgtatgtctgccccgcctctctcctgtctagttcacagggcatccatagccagtcttcatgcctttccataactgacatcagcctgacctccacggatgtggaagtttgaggaaaggaagaacaagtattgacaagctggagggactgttggttaatatgatgcattataggtaagtctggtactttctgactacatgagctgaccaagctggatattcggtcaccctcataagtccaggaaaatgaatggaactactgcaaactgaagatcccatgttccatcagaaattacccaagcattgtggggaaccttagcaatcttagtaaatggttggaaatgctgtcagatagttggaagatctaatgtgggagttaaggaggctcagatatagaagactctgccaatttgtgttctagacatggacatgtttttttcttttcttttctttttttttgagatggagttttgctcttgttgcacaggctggagtgcaatggcacgactttggctcactgcaatctccacctcctaggttctagcgattctcctgcctcagcctcccgagcagctaggattacacgcatgcgccaccatgcccggctaatgttgtatttttagtagagagggggtttcttcatgtttatcaggctggtctcgaactcctgacctcaggtgatccgcccgcctcggcctcccaaagtgctgggattacaggcatgagccactgtgtccggctgtttctttcactatgataagcaagatgtattcactgtcaatgcactgacatgtagatatccattcattcatcacctattcattgatcctccactcagactgagccaatctgacactggttgggagagaaattaacaaacctaaaacacaaaacctgccctctaaccacttgcagtttcatatatagaaaaaacttcaacttaaaagcatatataaatgctaaatgaaggtagatttgtaaaatgctaccagtgtcagatcacttttaatttgggttttatggaaaacttcagagaaaaagtgtgacttgtcaaggatatgatttggctgatcttgaaaagttatcagaaaaattatggttgctgatgctaatatgtaaatacagcatcaaaatatttaacatatagtaaaatagctgagaaactaaaatgggatcatctgtatatgtactcagccttataaaataaaatgaattcattaaacatatgctcaattttaagatatcaattaatttctttctacttaattttaaacttttatatatatagcaattaatattttgaagctgtacataatagaatttaggttgataagctaatatgtatatttgctgaaggataattaccaaacttatcagctaactacatctttctttttgcaaatactgttcataaatatttgtgtaaactttcggtgttgtcagtgtgataaaaagtcagctacatttcatttatggtcattatgaccaaaacatttgactgaaatcaaaggcaagtaagcctggctagaatttggtcatatttttaatagctgaatatagatatatggttgtgcgtatatgtaggcatttataagctaacatacatatacaatcatatgatacaagcaatcaactcctttttaagtttttaaaatatatgtctttcttaggggaatcacataaatactaaaaaccacttctatataaataagaaagaacaatttcttattggggtaacaacaattctgttatttagcaatttgatttgtgtatatctgcgactgcctaattaaatgaatatagcatataggaagtacttacagctaaaatatgcacgcaagaaaatacacatttcacaacatgcatcctcattaatttaatgaaattagaatttccaggtgagcactaggaaattgagttattgacagtgcattgtgaaggcttatgatcaaggtattgaaaaaataagtaatattaatatagccattgaagcacaaaaaatacatcgtcttgcctttgtatcagaggtacactaatcaaattctgacttcttatatatttcaatttagtcatgaaattcttccacgaccacttggaactccaagccttagcaactataagaaaaatctctctggcagattatatttttttaaatgtcatgtcttgggaatactcttaaatatttgttttcacctattctcttcttaaagttgcttatataatttcatatgtagtcattaataacatgttttcaaagtgttagagatctagcttgccttcaacgcagttctaatagacatccctaccagaaactatgagacagttttcctgggagtctgggcagtttgaatattaactgaggaatgttaacctcctatgtaggtcttggtggtaatggcctaagagctagttacattttttataacgtattgtaaacaccatttccctttcaactttttttctttagaaaacaagataactaatgaaaattacccaagaaatattatacatataaatagtatagtcctaacacgagctaactacaataggcaaactttactattaatataacattaaacttttaccatactagccctaataaaactctgagactattttctatcacaatgacagctgatgaatttaatgtgcctcacaaactataggaattgtgataggaagctgactctgtcctagaggccactgacaaacctgataaggctgtagcaggggtcagtctctataggaaacttgggctatatgagcatgtatgagttctgtggttaagaatctgaagcactcagtatagcaaacaaaattccaaagctgagtaccaatgtaatacgctggatcgctgtacctacttggacaagagtacatgcaacaggcacatacaatatacatctggttaaatgtaaaatcatccattgctaaagcattttaaacttctaggagaaatctactggcaatgtgttaacagcaaggacaaccaaaacaataaaataacatctctttcctaaaatttaagaacatcaagtaagtgccccttaggctgggttgtgattcctggaagtttcagcctatgagaaccatattggcgacatcaaagactccccctctttccaaaaagcaattcacttcagatgctgccacacaatcgaatgcttttatggccaccatgtttttttggtttttgtttcgtcttttgttttttccatgcttaatgaacatgccagattcttgaaatagaaagaagatgagaaaacccagtaagatggaatacctctagaaaagaaactaggcagggacctgatggtaaaggataaaaacacattccaacaggaattctacttttagggagagtatgagttattaagaaggatgtggaaggcacattttggctatgaaagctggtccgtggactcctctgccagtctcacatcagacaggatgcaaccatccccactccattccttcgacaacttcccagagcacattcaatcagtgtcccttaaattgaggacaatactatatttgggtttaatactgtgaggacagtcatttagttttcctgtggcaggatgataaatttcctgggaaccaaataaggattctcattgcattcttctgcttgatactatgaatgcagaagaataaagaagagggtgtgacaaatcatattttccaaaggtcgggtgtggggaggttccctaacgtttaaaagcaaccagttgttagcaaagtgatctttagaacagtattagcaagaatgtttgctctacatccactatagatattctctcctgcttagctaggcatgtaagtactgtgagcataatgtaaatactcagaacagaaatgcatggaaagctggtggagtgaaactccaaatgaacaattaattccactttcacttcccccatctacctccctgaatactacctccctgcccccactcacctatcttcctccccccaacaagcatgtttgctaggcatgtcaaggctgacatccatcggtggcagtatgaaacctatgcctacaggctgctcctgagcatagcctcaaggctctgccattgtccgtagagtgctctaagttgtgcccgctaaaaatcttcatcattccatttgactgtttggtagtatttctttaattgtattttttgtttgtttgttttaaaaacaccctttatttcctgcttgccttagagacaccaagaataaaatccttgacacatcaaattctggaacctcaccactcaccaggactatggttcctgatccaaggagtgacgactgagaatcagcacacagtctcttgagggtgtccaggcctggctgttaagctccctgctctgattagtttgtcgagttcacagtgttccagagtgctgaagcacagaaattagggaggggaggtggaaggaaaatcactggagcctcttacgatctaacttccactaactgggaggaaatgtcttataaataaacaacagtaagagaaacaaaaaaaaaaaaaacccatcccgtcctgccagaggaatgtacattattgtctcccgacggaaaactttacaccacaccagaatgcagccatgtctcctgaaactacctccctcaaaacagaaagaaaaagagaatcaaaaaggaaaggagaacaaaacagaacaaaaaagatttcatccccttgaattctgttgggaagttcatgtgagttcccagtagacaaactaaactaagcaatttcaacagtgtcactgttccagaattttgtgcagaggctgcttattagccaaatttcatttctgcccagatcactgctgtaccatccagacattttcagaagggaagttcagggaaggggggaagggtacgactgtggagaagaggaagaagagaggacaaaggaaaactcctgatgaaccagaatgccctagccacggccatgatagagcgagcccccacccaccacccgactactgcttgttgaggacttggtgatgcggtgtgttttatctacttactctttctgctcgggaggctgaggttcctacatttccagctcatgctggactgtaccgtaagcaacaagtgaaatgagttcagtgatctcattctagtccttcgactcctgtccacatcactaagcgactgcacagcttggcacaggccaggatgagtcagcagtctctggtcatgagaggccaggcctggaatagcaggggggtttaggtcaggagcaaaatgaagcagaaaggcagtctagatggcagggctctgttctgcaatacacagaaatactgcaggtcaaaatgaaagcgcctcatcagctctggggtgaagattgtaggactgtaaaaaaagaagcatcaagagaaaaaaaaaagctgcctaccaaacatagcaaggacaaaacagagtaccacagtcagaaaaagagggcactggtagagccctggaggataaaagatgctcattaaggtttctgaaatgtcttttcttccacatgctcccaaacttgaattaagaaatggtgacttcctatatactatcctagtattttggtactgttttcccaattcagtaagtagcaaaacaaataaaatgcaaggcactgcagttaaatagcaagaaaagcctcatatttcataaaataatatgagtctgatatctcaaaggtgtacatttgggttaatagtgtctgtatatagcctgtatgaaatggttaaagaggagtactctttaagttgagcttgggtgggggtagagaagagcttagagaaaagagagttaccagttaatgataaaacataggggaactatgacactgtgaccatatttctactcaatggggccaacatagacctccattagacctccatcaagaagtgatgctcccactaacaggacttcaaacacttctccctctgcagtagtactgtaatatagcaaggggagagggaaaataaaatagatagaaaaacaaggttcaacataaaaaaaattagtgatagacattttgtttcagaggaggcaaattgctctataagtcaactgataaaaaaaagtcttggtatctgaacagacttagagaaaccatatctagatgaagatgccaggtggagactgataactatcaggaaatggtagtaatggccataaagaaggaagaaagcaatctcaagtcacatgatgtagaataaaacagcatggaaaacagaaggagagcaacagacttcgggaacacgagtaaaatatttctttaaagtccttttaagaggagtaatgaggacccaccacatattcctaaatgttgtccctcagagatgcacagatgtatatgggtaaggaaatgtaaaataaactttcagctttcatttcagagggtattaagtcatctgaacacatatttactaactgtttaatcttgggcaaatgagctttctagcctcagtttctctctctttgaaatggaaataatattatcatcctcatggaatcattgtaagcactgaatcaatgttcattaacccttatctcagcagtacctgtcacatggtgaacattcagtaaattgcttattattcatattatttgattatcatatcatatcatctttataagtatccagtgaaagaatccccctccagtgttgttccactggattgagaggaatcaatatgaagactctagtaaaatcagttgagtaacactgcttacactgctgctttaaaaagattatttctgtctgggtatgttaaacattatacttgaagacacaggatgttgaaaatctattatgtgaaatccttgaatttgggtatctatgttgtcaaagcaacttggagcctaacagttgtccagtaactagaggcccaaaaaagaaaagaggaatttttagaagcttctccaaaagcaacaggataaaagtgttattggccttaaccgcatgatgagggctttttaccaaaggggaaaacgtagtccagttgatcatcgcagcctaattgattaattgtgggtctgaccatctggctgatgaatgctgacacccagcagtgattactgtgtaacacaattccggatgtgctctccctgatgcctcccacaataatggcaactctgaacttaaggttagtttattcaggcctcttggctcaatctcttcatggaatagtggttgtggcagggaatattttactagacctggtcaagcattatcttctcttatttcagttacccactcttttccaactctactcctacccactcctaagccctctcttgtatataatcacttttcatgcaaagcattccatctgtagttttcatcatattatctgattctctcatttctggttgctctgttctgaaaaatatttgactaaactaggagatctatactgctagaatgccatttcacaggggatcctattgggacatgtttattgtatcttatttgctactggtttacttcaaattactctgcgcttccaaataaagaaaattattttacctaattcattagcctgattaaaagtcccacatatggcccaagttttccatgagattatcagaatacaagggttaatagacgataattcttacatcttaagcctacttctgaccctcagttaggagtatcccatgaagaagattcccctggagcatactttactgttagagaaggaaagtcagacccatgtaaatgacaaggttcaatagcaatgccatccacaaaccaatctacacctggagatgacttgtacatggagaattcaccaagcaaataaaacctgtacatataaatataaaccctggggaattataacaaaataattccattgtattttgtaggaatgcacaggggagtaactgacacaaaatatcttatacaaccttgaccaacaagtcacaatgacaaatcatccgtttcctcttttcttttcccagattgatttccagctctaaattcatcttttctttcactccccacagatgctgaattcttctatgttccaggctgagttagtgttaattttcagtagaggacggcagtagcatgctgaactgtagagttccgggctgggagttgggaaatgtttttggcctgactgtcagtaaacaactatgtgtcttgggcaagtcaagtcccttaactccccatgtctcagtctcttcattgaaaaatgatagggtaggactgcataaactccatagtctctgccaacactaagattctatggttctatagctcatttccttttttttctccctttggcatcaactgctcaacaactccgctcatagtaatctctatgctctcagttactaatggaaaaatatgtccttcatttactagttggtattttgtatttgtaatctctctctttttttatttgatgctagatattttgagtcataaacaccaacatatccaaatagatgctttaaatttgaaggcgtttaaggaaaatagctttcccatgtagaatatttagtgtagcagggcatggaggaagccagccatccaaaagtggagcaaaggggccaattcacaaatgagagaaagcctttcataataagagtctccacactctttaacttagataaagctaaaatgctaccaacttctaactacttttccaatcaatcccagacaccatcacagacacttaggactacaaatctgaggaccagcactggcagcaatgcagttcttatttcacctccaccacccattgccaagcaggatttaggatggcatactaataagagccaagaggacgatctgtcatttattttcctccaaactttttgaaatttcccatttgggctctgtttcccagttttaatttggtaactgccatttttcagcatttcttttaacaggttactaataatttctgatacaggatctcatatttcattttatgctgctagagctgctgttaatatttcatctgccttcaattcagctctgaataaaggctgctaggttttgatagactgttaacactttggttctggggatttgatcactatgttcatccagtttgtccatattttgttaaaaaaaaagtaataggttagctatctcagaaatatctcagggtgtgctatacattctagggatacttcagagtttctttttctggatctttgatgaaaaccaacaaaaacaagtatcctgggtttgttttcacaaatgacttgccatttgcttcagtgtcagtattctggaagcagtgggcagtggttaagattcagggctcataggcagatctagattcaaattttggctctgaaatttattatatatatcacctcaggccagttccttaaccttgccaagtctttcttttcccatttgtaaaatagggatgataataatatccacttctattaattaatatgaggatccaataaattaatataaagtgctgaggattttctcagttctcaataaatgatggctatcattatcctagcattaataatctacaaattcacattatagaattattattttgcaacatcttttcagggtcaacaaattattttttagtacagcctttgttgtttgcttcactatagcttacatttttaaaaagtctcagtaaaatcatgtaaaatatttaaaaatttgatatttaaactgtatgtacagttagactaatatatagcaccatattattattattgtagcacttttcagtgcagcagcaaattctcaaaagtttttgtccatctaatagccagccctagataaggcacattgtaccaatactaatctgttctataaaaagatgacttatcatatttatcttctcctactcccaaagaatatagattattttaatattctttgggtatgtgtcagtcaggccctgtttggatacagagaccatatagcaatttgaatagaaagttagtttaaattattaataataacgggattaaagtaataagagtagctagtaagaagtaaagaatactttaaagaatataagaataacatgggccaggcgcaggggctcatgcctgtaatcccagcacttagggccgaggtgggtcttcagcctaggagctgaagactagtttgggcaaaatggtgaaatgccgtttctacaaaatattagtcgagcatgatggtgtgtgcctgcagtcccagctacttgtggggctgaggtgagaggatcgcttgattccaggaggttgaggctgcagtgagctgtgttcatgccactgcattcaaccctgggtgacaaagcgagaccttgtcttaaaaaataaaaaagaatagaagaataacaaatgtaaggaacagccattatttgcagggctaagatagcatatccaaggaagagtctcctccatccctggactgagatctagacattgtaggactcaagacaaaaatctcctggacccctggaccaggatccagaccttgttggacaacacacagccataactcattggatggcagagaagttgctggggagctgcatcagtagcacctgcactctagggtgctaatgaaagctatttacagggatgtatctcatctgaggcactctgctataaattgcccaatgtgtgtgtacacatgtgtgtgtacgtgtgtgtgtatggtgggtgctaggggtagctgctacctgccacgtactggagaagctacctgtgcttcagctgctgggtaccaggttagctgcatttgctgcaggagctacatgctgtaaaggttgcttatgttgtagaagccaggctctggagaaaccgtgcacattgcaggaggctgccaaagtagtgcatgacaaccaggaaggaaaatttcttctttctgcaacgtctccctaccttctctactgacaaagcaccctcaaaccagctagcaaagaaaaaatatttaaagaatccagatacatttttgcagagcaggcaaggagaactacatttggaaggaggcaatgggaggtaatacattggtaactggcacagatattattatttgctcacacacttcatgaaataactcacattagagattataatccagtattttcaactgattgcactactgttcacatttactaataaaccaactccctttgcatagttaagcaaatactgtcagaattaagaaaaataagaggccagtagataaatacctataatagaatattttaaagtgacagtactagtatatgtacataaccttttcccccaagtgctgcccacatacattttaattacatgtttataatttacttaagaaaaaaatatacagaagtactaagctattgacctaaatgtatgcatcagtgatctcacaccagaatctcaactaagtgggtattcagaagagtcattacaaacaaccaaaagctttgagagaggtaaaaattgcctcgattatcatttttcctttctctttccttttctttttaattaactctagaactcatatttgcttcttctatgacatttttgtggaggggtggggtggctcttaaataggttattcttttttttttttttttttttttttttttgagatggcgtcttgctctgttgcccaggctggagtgcagtggtgcaatcttggctcactgcaacctctgccttccgggttcaagcaattctcctgcctcagcctcttgagtagctgggattacagacatgtgccaccacacccagctaatttttgtatttttagtagagacagggtttcaccatattggtcaggctggtcttgaactcctgacctcgtgatccgcctgcctcggcctcccaaagtgctgggattacaggcatgagccacgtgcccagcaaaatataggttactgtttttcagaaaaatacatatttagaaattttttcttatgattctggtcctatattgttctactcttaatattaaatagagaagcatcaataaatgaccaatttggtaaactatgatactgtgatcattgttagaactagttttacatatggggagagagtatattccaaaatacctcccctacttttgcctaattcccttaagaagggaacaggtgcttttgctgtataattacaggtagagtttaaaaccacaaacacctgacattagcaaggagcgtggttgtgagaggctgagagcagaaaagctaattgggtgaggagagtcctgtagagagtagactatactgaggtcaggaccacagaacatctttctcaccattcatccgtttttacctatgtctggccatcagcactatctgttctcactattatggaaggggtctacttgttacctcacagttgtgttttcttaaagccagtggtatccagcaaagcaagccatgttgggttgtctcacaatcacactgtaggcatctctgccagctgcaggtggttatccttatgatttccttttgtttgtgctatgcgtgagtactgaggataaatttaatgaccctatgtttagttctctcctccaacacacatgcacacccccctctcccctgcaattcctgagttcaaaaagagatgaagacaaaggaatgtcataagtccgtgtgattcaggcaggcaagtccattttattttagtttgcccttctgttctgctggcttttctgctatgacccactatacttaacctgtcggctgttcttagtagcaacatgcctttttaatcagccttcctggggtctgcatttgattacagcatttgtgttctattttgattcttttgtactgtgccctgtggtgttcgcttgaaaggtgttatttataaaatgaaattctattgtattgccacttggattcaaagaggacatataatattaatgcagaatgtatttaataatatcttcaatctattaaatcaatttcttcatgagaatacagaatggaagggaggcacatgggctgataatcaggtaataagacttaagaatcacctgaacttttccttcacaagctttcctgaaagctggcacaagaatcattctcttaatgtcagggtttccaagtggaggagactacctttcttcagccagaccagtgcagtgcgcacctgtttaaacattcaactgtgcaggccaaacattttcctaggcttttagatgcaaattttttgactaaggaaactatgagaccaaacatgaatatgacttttttactacatagaaagaattaggttatgaaggaaatgtaatcacctatttctaaggatctactttcaagatttgtaaaaagaagtatatttgttctcacactgactcttctcaaaagcaggataggaaaattctagtgataccaagaactgatgcaaagtttccaaggtggcatgttcagaatgatgttctcacctagcaaaagggcaggtttcattgtgggctgctgggcctacagtcaaatgtttctagattagattgatggaggagtccccaagttttttcaacttctaattttaattccagctaaagactgaaacattgtacactgtatcacagcttgcacagcacatttcttgctgcatacattctattctttcactacaatttttttttcctgttgatctatctgaaatcatcaatggctatgctgctgtttggatagggaataagaaagaatttggtttgaaagatgatttaggaatcaggctctgcagaacttactaaaagaaactgtaacatacaaaggaacctggctgggcagtcttgaaatgagagttcctggatttttacctgttctcattcagtggcatattatataactccagaaaaatcagggtccagttttctaatcactaaaaggggaataactgtccttttctacttgcactgggctactttagggatggataagaaaatgattccagaatcttgtaaatgctttgcaatgaagaggaaatacaaatgcacaatattattaaaatgatagtttaggccacatttttgtttctccaaatctagagatgaaaaatagtaacaaaggaataaatttcttccacttcaaaaataaataatatacccttatttataaatgacatgtcaaacataaggaactaggatgtgttggggaatacacatctcagttttgaaggcatcaaattataagctatttgcatgaaggaatcacattcatctctgtatccacccaagttctacctcattgatttacattatgtaagtattccattcgttaacatatgttgaattgaaatgacaaatgagatcgcacaattttagagctcgaattaactagagaccatgttaaatcctgttgcctcattttgcagatgatacaactgaggcccagataagtaacttaactaagtccaatactaaaaatattacaagttttagaagagttattttaaagatctgccactgaaaatatatcactgaattaaaacaaaatagacattcttctgtcaaaataagaagcactattcagctcaaataatccgatgtatcctaacctaatcaagaaggctgaagcctaaagtaacaagtaaacataattaaatagctatagacccataggcatgttagaaatgccaagttactgaggggtgcatatcttaatactttgtctatcagccagtccaaatggcatatttttttcaagtaaaattaatgtcttaacaaataataggggtgaagtcagcaagatggcagagtggaaaactctacctctcattcttccacagaaatactgataaaacaatgttggaaccaaaataccttgcaaatatattcagattgtagctaagaaatagaggcaccctagaggatcccaaactaaaagcagttgcatttgcatgggtaaaaagtgcaatttcatgttagaatgtcatatcagtacttcccccagactggcttagctcaacactgagaggactgcttcagctcatgatttctcctgtgccacagaaagtgagattggagtgtgtatctggcttcctggcctctggcctctcagagaaccctctgttgggtcagttcctatattgcctcatactgtgtactgacgcacctgtagaacttcgttcccagggatgcgtaggagcaaagaaatgaggagggcaactccttacagttagagctgccttgcaagattaggaatggggcagaactgaggttattcttagatgagggaggaaagggaatgaagggggccttattctcagcatttcagagttccctctgtgaagccagtttccatttcaccttgtactgagccttgtgcgaccattagaacttggttctgagggatagttagcaaaaactaaaaggagcaggcatccctttgcagctggcactgctctgtataataagaaaaaaacatagaaccgagccttttccttgagaaggcaaggaaagaagtgtaaagggccttgcccccagtcttagattgtgctccccaaggtgtatgtctctatcttgtctcatattaagcaccatgaactggtaaaggtctctactcatcaaaactcatctgtagagactgggaaaggtagctgctacttcaaatatacagatcacaaagaaaatctacaaggaacacaaagagtcatctccaataaccatcctgaaagaaacagagatccctgaattaactgacaaagaatgcaaaataaatgtcttaaagaagcccagtgagttacaagagaacactgagagatagctaaataaaattaggaaaaagatacaagaacaaaatgagaagttaaataaagagatagagactattaaaaagaacccaatagaattactgaagctggagaatacaaaaattgaactgaaagattcactagaggagttcaaaagcagacctaatcaagcagaagaaagaaacagtgaacataaagacagatcatttgaaattatgtagtcaggagcacaaagaaaaaacaaggatgaaaagtgaggaaagcctaagtgacttatgggactcaaacaagtgaatcaataaacacattagggaattctggggagaagagagggaaaggggtagaaagcctatttaaagaaataatggtaaggaacttcccaaatcaggggagagaaatcaacatccagattcatgaagtccaaagagctccaaagatctacaccaagacccattataatccaattgtcaaaagtcaaagacagaattttgagagaaacaagagcgaagcaactcatcacattcaaaggagtccccataagactgtcagcaaatttctcagcagaatcctcacaggcaaagagagagtaagatgacatattcaaagtactgaagatcaaaaaacaacaacaacctgtcaaccaagaacgctatactcagaaaagccatccttcaataataaagaagaggtaaagactttcctagacaaacatgcagaggggtgttcaccatcactgtacctgctttgcatgaaatgctacagaaagttctttaagctgaaatgaaaggatgttgattagcagcatgaaaagatgaaagtataaaacttgccaataaagtcaagtatatagtcaaatactagagacctctagtactctaatgatagtgtgtaaatcactttcaactctggtataaacattaaaagacaaaactataaaagtaatgacatgatttgttaatggatacacagtataaaaagacgtaaattgtgacaccaataacatgaagtgtgtatataggagaagtaaaagagtagagattttgtatgtgatcaaatttaagttgctatcagcttaaaatagatgattataagttgttttatggaagcctcatggtaaatacaagaaaaacacctgtagtagatatataaaacataaagagaaaggaatcaaagcatattgctacaaaagataatcaaatcacaaaaaaagacagcaacagagggacaaaggaactacaaaacaaccagacaataatttaaaaatggcagtaataagttctcacctattaataattaagtgtaaatggattagcttccccaatcaaaagatacaaactggctgaagagattaagaggaagactatccatatgctgttaaaacagcaacaacaacaacaacaaaaaacaacaacaacacactttagctttagggacaaacatagactcaaagtaaaaggtgggaaaaatatattccaagcaaacgataaccaaaagctagtaagagtggctattcttatatcatacaaaatagactttcagccaaaaattgtcacaagagacagagagaaggtcattatataacaagaaagtgattaattcattaaaatgatataataatccccttgattaggatccttttgattggaatcctcttgactggagtagaacaaaaactgaataattgtaaactattattatgaagtagagatctccaatacactactttttatttttccaaagctttcctggagatcacagagaactgaacatggagaaaaagtgagcaagagacagcagtaggctttatgccttaaatggctgtatagcttgttaaagattattgtttgtgtattaaaaaaacatgattctagaaacataattggggtttcacagatcaaattcaaattattaacttagtatttcagcctccattacttgctctatcttgcttaggcatcctaggttccagtacttcccaacaagtgttctgtggtgtatgcagactatgttagtgtttccctttattttggtatttccacaggagacctaattttaaattttctgttctatcatctccatgatttcttaaattatgtctagacttctggattagaatattattcatgtacttactatgattcaataaacatcttctatgtgtgagacagtaggaataagatacaaataagacttatttcctatcttcaaagaataaaggaattcacaatacagtggccacttaaatatataacatgtgttcctgcttttaagcttttattctttctataattagagtatcctatcattattttattgattgaattcctttaattatcttatagtccagcttatgttctgcttcttccataaattaatttttactttttatagcccacactgtttccttttccccccactattacagtggaagtggacactattccctaaccaaacttcattccctcattcttcctagccgcagacctctattttgtgcagagtgtcaatgtgctcagtgctggatgatgagttttgaaatttataagccaattatgacaagtgtattctctaatttgcttgcttctctagcaaagaagggtggcctagggattcagttatagccaataagatctatgtggcaatccacttgagaggcaagtttctgagaaagctttttttttccgttacaaagaggaaggtaaaaggcaatccttctgtttcctcctccttccctctttgaacatagacatgatgcttggagttgtggcagctattttgtgatcataaagtgacaagcatgaaagaaagacaaaaagaatcccagagatatcagcacagactttatcatataccaggaatttcctacctctcaacttctggacttcctgttaggtgagaaaactgaatctctatttgtttaagccacttaagtcaggatttgctacctgctgctgaacacatttctaaccaaagtaataatagtaacattcataatttgaattcaccaaactgttcttcctaactagataacagacattggtcacattcttggcacttcataaacattcatttgcttcacatcttgattaaatatgctagacttttatatgtaatgaaattctcacacagaaaggaaggggggaatttggattagtatcagaaaagaggatgaaaccaggtcaaaaaaggaaaatttgattctataataaaaaattatatgacaaaaatttgttacaatgtagctcaattattatatacaataaaagcaaatttttaaatattttccaaaattaatagcaacatattttaagaaataagacagtagaataagcccccaaatgataaatgttttaaaggagagatgatataaacaagtcttctattaaatgtgaagacaataccatgcagttctactgaaacctaagtgaggaaccagcgtttgtcaaataccaccagcaataagactttttctctgtcctttaggttgtatgactgtgattcaccccaatgctacaggctccttagcatgctcattatttctaaaatctttcacctgaggtttgaacccatgacttaggaaactattatcgcatttgcttttggagaaaagactacataagttgggacagaagctattttcaaggcttccaaatattacaagtaagtagtggggaactgttgagaagagaaatgagtagctttgggtcattttaggttagtgaccttaaacataaggtgtgatttaatcagaagccagagtaattatggcaggaggtggggaaaaagactcagagctgtctggagttagggaggactttggtggcagctttcagcttgagctaaaactgcaggattctgtcagaggctccacaaacaaagggctgcattatgtaaggaatcttgtatttctttgtgaactagtccacaacaaaatttcattagtttttttttttttctctcctagagatttttttttaccacttccagcccgtaacttgttgctcagaagggaaactttctaccttaaataaaagtttaaattgtaagcaaactgacatttttttaggaacaaatcaaattaatttgaactttataataactgggaaaatgctttttaagttaggtggatgataagtaatcttatatgaagaatttccaaataatttagcaatagttggcaataatttagcaatagttagcaatacgagttcatatctctctccctctctgtctctatcattttctgatagtctgtttacacatgtaacacttttgggtcacctttcaatggagcatttcataggcagaattggaagatagcaagacacatggatggcacatagcaataggttctcataaatattatctgttttcaaaagaatatttatttttttgcccattataaagatattctaagattaattacagtcctaatactgtcaaatttagctttgatatacaaaaatctattttttagtagtttaatttttttttatcaattactaacttgaggctttcattttacaacattattttggtcagttataaaaataatttaactgccaaatgggttttcccatttgacatttcaaatgttggtttaatacttatcacttagacctctatgaaggttgactcaggtttactgggggatattgcatagatcatgtcttttggtccaacagtttgggctgtgaatagtctaaatttgcatggaagctcccaactaccaagctatccaaaaactacagggacagggcggggtgaatgattctcagcaggtggcactcttccttctaattaggtcttgaatgaatgcaccagcattctgctatctcttgggtggagtgtgagactgaatcattcaataatgcttatagcgcttaagaaccaaattcaagggaactgtggaatgaaggcaagttataggtaacatacaaggattttcattctgctggactttttcattcaaaacagcatcattctcagactcagaattatggataaccatgcctctcagtctactcaggagagtttccagtttcagttccaatggcccagtcacaattattagtagtgttcattttcactttcaaaagtgtcctagtttggatgataaaatatggggttaccctgtatataagctttaaaaaagttagtcataacaccatttacagtgataatcattctatttaggacaaattaaagtagactctattggccaacttctataaagagaaagagataaactaaaacattattaatttaatctcagagctttaatcagaaaaagtttattttaagatgacaacaaaatttctatgaattatttaggatttctaattttaggtcatttttttttagccttattttatacaagcaagcacgtatgcccttaagatttgtggtggagaaagaagtacaatatctgaaataaagttctttgaagcttaggtttgaattctaattctactatttactcggtgtgcaaatttaaataatttctgtgaacattattattaaccctttctaaaatatgtttaaaaacattttaaaaaccagaagggaaagaactacatatgctgtgaaaagctgtaagttattaacagttactattatttctctttataaataatgatagtttttccctttcaacttctatgacacttttacagactgtagaaaaatttggccaagcatgttgtagcaagggtccttaactgtaatcacctttgacacagatccatgatatttctgggtgacatctctacatggacattgatggcctgcaaagatctagaaaagaaagactatagatcttgtacaccaaggccaaagactaaaaggctgaaatttaaagtacaaaagtattgtgaacagttttgttagtagtataatatataccacttatatagataatttttcttatatagatataagaataatttttcttatatagatataaaatagggtttcttatatagataatttttccatggaaggaaggggaaacgaggcgaaaagtggctggagtagaaagactagtttgtaaggcagaaagattttctaattactaggtagattttattttattttacttgtttttactagctaaattttaaaaaagagattcctagatctctatagacatgttcctctttctttttgctgatattttcctatttcttttctgaaatcttaatttgactagaaaaaaaatgatgttctgatttaattctcttagtctacctgacatcaaaaagtatatggagggtgtctttagttttttatttatatgaatgtaatcaaataattttattttttaaaaaaagactctcactgtttttcattgtttaacagacatttctttaaaactttgaagtaattatagaaaatgttctcataaattttccctccaaattaaccaggtagaaagggctaatcctgttatgcatgccatttttgtttgtttaaattgactattctgagaattaagtctgtagtacctagtttgaggcctcaagattttcaggtatgcacaaggttctatcaactaattctttgtctcactgatgatcctttattttaaatatactctacttgcaaaggtggtagggtaaaaagaggagtggctgacaagagactaaagaggggaaaggattcccaacatccttaatatctcagggctgaaaaagagcattagaaatcttctccaatctcttggagaaaaaatatctttcacacactctgtctattagaacttcatttgtgtttaacaagcccctcttttaaaatgcaaatttgccttgtgaacctgtaaacctcattcacaccttattgttaattactttgatgttctagaatatgatcaacacttaactgatattggcaatctaggaatgaacaaattgctcagggtgaaaaaaggaaaattttgttggagtggggctgtaggtggtagtgtgagaatttcatttgtgagaaatagagcatactgatattctgaagttttgtctaggagaatggcagtagttacggtaccacaaaacgagcacttttcccgactgccgatgtctagttgagatcagaaaaagcctggaagcctgcaaacctaagttttaaatatttagccatagcaagctaatcaagcttgcaattttctgaaaacgttttaagttaattcataatagctctacaactcggtgaccttgggttctaagactcatttggttcaaccttccaggtttaaaattcaaccaataaatgaattccaaggaaaaaaagtgaatatggcccagtccttttttactgtctccctagtcattcacttcagagattttggaatgcaatcctagaacatactgtaagcaatttcagaagaatacacaggatgcagtatttctctatgtgtcttagtaaatgtcacttgacccgatatatcaaaaaggttgcaaaatttgaattagactttagttgacttaagctacacatcttagcttggcagaaattcaaggaaaaaaatattttatggcctcttgtaacattattaatcacccctccttttatataaaaaataaatatgctaaactcttcactgttcagaaaaggggtcatttttcctgccaaaatggctaattttagtttttatgtagttggatacatttgtaaactattacatgaaaacatatggttggaacatgcttactccttcatgagtgttccccttttgaggctgcaaaattttccttagttgctccatgtgctactttgttgtgctgatgacttcttgttctaaataattttcttcattttccattgttaatgaaatgagttctaataaggaacaaagaaaccctctgatgaaaatccctttcttgtagaatggactgggaactgatataggacacaggggaacagcaaatgctgtgttgcacattcttcaattaaatgatccctttgtagtttattcacctgaatgcattttggcaaagagtgaagcaatagtgggaaaaggattgtttgtgtggctaatctttggttactcagaaagtactagacatgttttcctgcatgtttgattgatttcctgcacagtttgattggtgaatcaacactttaaggtatctaacccataaggaagagtgaaaaacttccccagaggtattgaaatttcactaaacctcttcttggagttttggtgtatgattctcagttgatctttgagtgtaacagtcaactattaaattggcatgactgaagtacagttttttcaaatagaagagtattttagaacaaatgagaattctaactctttaactgaatttctaactttacattttgcccgtacctctccttgtaacattcttccctttttccctatatatttttaccagtaatcctttcaactgctccttaacagtgagattctactgttctggcacattataggttctctttaactattttttgagtgcacaaatgaccatttggacaaatattataaaatgaacaataaaaaaccttaattatgcaaattaataagtctatacctttgggaaaaaagccatgatagtaacaaaatgaataacaattccaaggatatttaggaaggataaagcctagaagattaaaaatgagaaattttagaatcataaaaaacaaaacgaaataaaatagctcaataccattgaaagcacatgtatgcagaaagaagctaatatattattgtaaaaaattaaatggaaagaaattagaaatctattggtattattacatcaaaagcaggaagttctttctttctggtccaactttagagagaagaacaaatttgccagtgccaccaagggcagaatagagagagatgtttggaatttaagagttacaggttatgttatggttcatttatatcattgccatcactgcagttcattcattttgtgtctaattattgatgttgccacggttgtcaataaacgctcagcattactaatcatcagagaaacgcaagtcaaaaccacaatgaaataccatcttataccagtcagaatggctgttgttaaaaaatcaaagaacaacaggtgctgcatgattgtggaggagagggaatgcttacacattgttggtgggaatgtaaactagtcctacctattaggtactgtgctcattaccataggaattagggtgggattcctattccaaacctcagcatcacacaatattcctatggactaaatctgcatatgcaccctctgtatctaaaataaaagttgaaattttaataaagatggaactaatccctcatatcacagaattatgtagttgtgggtagtcaggataaagaatatttaggatataatttaaatgaattcactagctctgaaaatgaaagaataaacagaaaactaatctagacattaaatttttttctttccctaaggataatgtatagtccctaaggataatgaatattcaaggacatactgtaataaatcatatacatttattattaatataatatagtttattgcacacacacactatgagctccacgatgttcgttgaactattacaaagtttaaagacatacgaaattacagtaagagccatccatataaaaataaaatgttagtgtttggaaggaccaattgtaggagactatattggcgagttaatacaaaagatcatcttttgtttaagagttcatatatttttgtgtaaattatatctatttacagaaattttctttactaccaactgttctcaaacccattcactaataaataattactatatgtgattacttaatatttacctcaaacctttatgaatatcactgaaagcattactggcaaattaattatataggcaaatggtgaggatctctcaacctcacctctcaccttcttcccaatcactcgaagactgactatatcaatttgtcttgttatccagaaattggctttatttgttaattccagagatgcttcaactgtagtttcagccagctgtttccttacatctttctgggtggcatcagtttacaatgcatagcattgttgagggtcaaagttattttattttggtattactattggatttttcccccagtgcctcaaaggggaatgttgagtcatggagatgtaatgtgactccttaaactaagtagacttctaatacaagtatacttttattatggagaaaccaaattaattttatcaattaaatgagaatttatttaccatttgcctttaccagatatttcattagacacaattctcagactttacacaattacaaagaatgttgtataaaaactatctataaagcaggagatatttcattcttagttttttgccaaacaaattatgttgcttcgaggaacagagggaaaagaaacattgatgaaacacagccctcaactatggcataaagtccaaagcacagagaaggtcagaaaagaataaagcagttttgcagaattattatgatagggagtactgataaagaagagtcaactttttggccttagtcatttactgagttcctttattaaaaatagagcataaacattttagaaataattttttctcaatctttttttataaaacctctacagaaaaaagaagcgttatgtgaaaagcagctaaatgggaggaaagtaggggtctgtgggtgaaacaggaggttaccattgcaaaccctgtccttgatgccctcactcagtaggactggtggatggaagaagtttgaaaaacttttatgtagagatgaagaaaagtagaagccctagtttacagagaacgaaagatacatttttcttctgtgtaggtagagtttgtatttggagaaggaggagactcctttcttctgatgaaaactccttcttccaagagaaaactccattaggaaaaatggagcagcagtgagtgagagagaccaggtttaagatttgttttggaggttaaatttgttgtggaagttgacagaatgtggtgaaagcaagacacatcataaaataagccaaaaaaaatctctctcttccagctcattgtatattggagagttagttgacttttctactgtaaatgtaaagaaaacaaaagtttcattcatcctcctgtaatgatgccaatctaatttgctattaaatttctattcaaaagccctattttgtttagttacaagggatttgatccccttaaactttcccaggcaatttgtatggaaaggcggttgctaagggtattcctaagggaactggcaaacgttggaagataaataacctcagtacaatatgcagattaagtagaagggatggtttaagagttaccttttgaaggaaaaataaaagattcagaattcagggctagagttgctagttaatcactgatttgaaggtacttaatcaaggcagttttattttattttattttatttatttatttttttttagacagagtcttgctctgttgcccaggctggagtgcagtggcgcgatcttggctaactgcaagctctgcctcccgggttcatgccattctcctgcctcagcctcccgagtagctgggaccacaggcacctgccaccacgcccagctaattttttgtatttttagtagagactggctttcatcgtgttaaccaggatggtctcgatctcctgaccttgtaatccacccgccttggcctcccaaaatgctgggattacaggcgtgagccaccaagcccggccaaggcagttttatacttctcaagaaagtagaactttcacattgttcctcttgggaataaaggtaaaattatcatagagaggaaattagagagaaatgttcaccatttccttccttatattcttcctttctttcctctctctatctctagagctcttcctcaaagattcaaataaccaaaaatatgaagccatgggtggcagcttggagttctcaaaagtccaaagtgaggttagcttctgaccaaaacttttggcaatttccttaggttgagtgaaagaagcaatgtgaaaaagcatgagtttagagtcagtcagccatcaatttaaaatcaaactccactatttattattggtgtgatcttgaatacattagccaacctctttatagtccagtcatttctaaagaggtgattatctatgaaacctgtattacatatacaatgtgtaagtactcagtaaatactcagtacttctctagtatctctctaattggatttggctagtaatcatgacaattgtgggagagaaaaaaaaagatatgtaatcctgagggcactcagtctctgtaacaatcacttgataaataatcaggtgatacttcgttgacatctctttaatcttccaattgagaaaacattaggagtagaagaaaaatgattaatctccaacttctgtcattggaaaataactaaagatcagaactataagaaacataaaacttttctagattattaaagttaaccttttagacattttccacaatcacatggtatgcaaattttaactaaattattttacattaaatgtattttgtgctatgttttgactagttgattttactgtagtatagaatgtattatgacattccattatcctcttattactcatcaataaaaaatttattgagaaaacaattaattataattaatatttattattcattactagtaggcattgtagtaattacactattattggtattttaaatatcattaatagctataaacatgttatacataataataatagaaaccatttgtggagtgcttactgtgtaatacattttgctaagcattttatatacattcttaaaattaataatttcaaagatttaatgagctaagtgtcaccagataaacgagaagacataataatctttatttattaaaggaaaacttgccatatccacacaatcttccaaagcactgatagaacagaatgatggcatgatggcatcttaaatttagaaagtgtcattcataaaagtgtactgttaactactaatttgtgctatctgcaataataatattatattacacaagatggaaaggctaccccctaaaagatagcatttgataaattgtacataaaaatctagaagaataagagtataacagaggagtgaaatttgatctgaaatacagagaaaattaagaaaaacaaaacatgttagccctactggaatttgtctcaatgtatttcaaggttcaaagtatagcagaggaagatcattgacactgtcagaggattatcattaaatttcaacccaaaggcaactaactcaaactatgcagatatggaaagtagtgtttcctaaaatgaaactaaggcaaatattatttattctagcttctactcttttgactaatcagctgacccagaaattaaatatttaaaggcttaaaaataatatagttttaagaagttgacctatacgttactaaataaaatgatcctcgttgtatttgaagtagctcaccatttaaaaatttaatctatgtccacccattttctttcttcccaaataatacaatgatttaattaccccacagtttaatttgacagaggagccaaaaagatacactattccttcattgttaactttaaggagaaaaatacactataaactatattagaaatcttattttttgggtgtccaccacaatgttttcactacaaaatcccttgctgcctgaatacaaaatgttaccattcaatcagatgagtctccatgaagttagaaacattcaagtgaaactcataaaataaagaagatatactctaaaaattccagttcttgagaagctgtttacacacaaaagggctattaaaagtgaaagggtaagtagaaaatcttctgggctcatttaataaaagaatgtagagttccatgggattcttttctaaagaaaccactaacaatgttgcagatctacaaatcctaaaagagtgcataatggactcaagtctctgctttgtgactcatgggtgtacttcatcaggatgtacttcctcttttagggggtcatataggtgaataagctgacaacaccttcagagagagaaattccacatgtgtcataggaatagaatttatttgatctcaagctttctatatatagaaaaaaaacaaattctaatccaaactttaatgaattcagtattgttgttgttggtttgcctctagaatgtctcttttgaccaagtcacattcctttaaatttacactaggtaaattatatattttccaaatcttttataaaagcataagctaaatgagataacattaaaaggctgattggagatttccctttaaaagcagtcataagaacaacagcaataataatataacaacaatatacactacattttgggcaccatgctttgaatttatatacactaatattattaaggcaatctgtgcttttgagaagctactccagactaggcactacacaaactctgccacacacaagagagaaacaatttcaattacaaagagagctagaaaataaaatggataagagtatcatgaaagattttttgtaaaactgaatagatcctttcatgtttctcagttttaatctctccaaatatccctattgtctgctttttaaaagaaaaaacactgtaaaaattctgaaaaaattattcacaaagaaaacttccactcgtttatataaagcattattattaacttcataacatgcataatatcatctatttctgaaagaccattgaaaagtagccataaaaacttaaaaaattgaaaataatctttagagatcaacaggccaggaagagttctaagaatatgcattggcctttactaaccattttcaatgccatgcacttttgtctgtcaatactttctcctgttatttttaatatccctagattaagaaatattaacatctatttacaaaaaaatattctaacagtttcccccacaaaagcatattcccatgaagatcaagaaaacaaaaaacatagcagggagtcagtattctgacagccttttagtcttcttcatcttcttcctactattattattagacctactgcctattaccagtaggctttttaaaggtcttggacataaatatcagttgttaagttgctattttcatggtcatttaaaattatttcaaccataaatgcttttaatttcctgaatatcttaaagctgtctaagtataaatattctcccattatattcctctgtgctaacacaataatctagttggagtcaagtttcatgaaaataagaaaattggtacattataacattttaaacactgaaaaataaacgtgatagctgtaggatgtaaagtgtagtcaggcctgtagaacttcggatgcatcattttacaatatcatttatcattttgataaaactgaggtcaagtttctaaaaatacaacttgttaaaagcaggaataaatgaatgagagatgagtcagctcgtttgatggaaagggtttaaaaaatacttcaaaagcataccacatgacttggtaaatattcagtgtatcaaaatgtagttgccatctggcattgatagactgggctagaatatgtgtttaaaaagaacaagaaaggaaataactcagccaggttaatgtgcacttgtctacatttcataattcaggtattaagtgctttaataaatattcactatgaaagaaaggctgcattacaatcagacttgggcagtatttgttggggacagctagaaagaaatgaaagaagacaagacctgatggcacttaagaaagctaaaaacaacaataaaaaagtggtttaggtaaacagaattctcaatcatatgtaatattgccagaacactagtatcacagttaaatgcagggaagtggtaagcttatatttgaaaataaactgaaatcttgcttattttcagctttgaatattttaattattcttttctttggctttgacaatttaaaagtatagagaaatccagggaataagtaaaacccttggttggatagtaaaaaaaaaaaaaaaaaaaaaaggaaaaacgaaaaagtcctgacattctttgaagttttaaacctagagtttgatattaactttgcaatatgcaacaaaacaaaaagtaaatttgaaggactcctcttttctccctcttgctcaagaaataaaatatatttagaaagcagtatcattcacaaaagagaaaagtgaacacgagcagtgaacacttgcccaagcgttcgactgtccaaggctgtatctgggcttgttaattagatatttctgtctttaaccttgaacattctccagatttccaaatcttgacaatttacattctaccacatctcttggaatcagagcaataggcagaagagaaaagttttaaaacagctttgaaggttaattaggacagggaccagggtagccattaggaaaatagatgaagcacttcaggtgagagttgattagggtcaacatgaaatttttcagagttgaggtataatttatattcagcaaaattcatggacttcaaaatgtacacagaatgagttttgattttgataaatttatacacctatgtataaatatgtatatataaaaatgtatatatttaccaccataacagagacatagaaagttcctttgtgcccccttccagttaatttctatctcccataaacaaccagcattctgatttttatcacgatagaatagtttcgccttcacataacttatgtatactcttgtgtcctggctcttctgcataccatgtttctggaattcatctacattgttgtatcatactctgttttgttttatttgcttgttagtatttcattatatgaatataccacaatttgtatatccactttccacatttgggtgcttccagttttaggcaattacaaataaagtcagtataaacttgcctgtacaaatctttttgagggcattattttcattattttttggtaaataactaggaatgtaattaccaaacaatatggtaggcatatgcttaaccttagaagatactgatccaatgttccaaagtagaactatatatttacagaaagtcttgaaattaggtaatgtgagtctttcaactttattctttttctaagttttctgcaatctcatatacattttaaaataaatttgacaatttatcttaatgttagaaaaacaagatgttgatattttgatggtgattgcattgaatctacagataatttggggaaaaatgacactttagaaatactgagtattcatctataaataacggatttttctctaaggccttttaaaattttgagtggggaatcttacattcttttgttaaacttttatttaaatgtcttatatttataggctactgtaaattgattttaaaacttcattttcaaattatttgccggtactacataaatgcaatcaatttttgtatattgatcttgtgaccttcctaaatgcactgttagctctattagttgttttgtatatcccctaagagtttctaatgtaaacaatcatggtatttgtgaataaacacaatgttacttcttcctttcctatgcttatacctttaatttattttactcgtcttattgctctggctaggatctttagaacaacgctgaacagaagtagtaagaatatatatctttgccttctactatatcccaggaggaaagcattcagattttatcattaaggacggtattaattatatgttttcatagaggcccttcatcagattgaggaagtttcaatctgttctaattttctgagagttttcactgtgaatgactgtcaaattttttcaattgctttttctgcatctattgagatcatatttttcttctttattaggatgcatttacagtgatttattttcaaacgttaaactaaagttgcttttctgagataaatcctacttgatcatgaggtattatactttttactttttattgttgaagtttgtttgctaatattttgttaaagattattgtgcctagaaccatgaggaatattggcctatacttttattttcctgtaatatctgtcaggttttgctgttgggattatgcctgtctcataaatcaggaagtgttttgtttttacctcctatgttttctgaaagagtccgtgtaggattaatattatttcctccttaaatgttatatagaattctccagggaaactatctaaacctgaagttctttttttaggaatgcttttgacgacaaattcaatttctttaatcaataaaggaatattttgatttctttggtttactatgccagttttgttaatatgtttttaaataaatttacctattttatcaaagttgttgaaattattgacatgaagttttcataatattcccttgttatcctttaatattgttatgatatgtaatgataatctctcattactgatattcataatttgtatcatctcttttttcttgaacttttctgttatagcttataaattctgttaatcttttcaaatattcatgttttgctttcattaatcttctttgtagtttgtttttatttcacagttttctgcctttgttatttgttttctttttttactgcttttgggtttaaaatgattatactttcccactttcttaaagtggaaacctacgctattgatcttaaacctttcttcttccttctaatttaggattaaaagctcaaaatttctgctaagcttctctctggctcatattataaatgtcaatatattgtattttcatttaatcagtttcataaatttcaatatactgcataacttaatttaattattttaaaatttcatgactttcaaccatgaggtattaagtttgttgtgtagtttccaactggtcttttctagatattttattgttttctttttttatttctaatttaattaattataaacaagaagcatattttgtagtatctcaatcttttgaaaatgtttgaaactcatttgatgaaccagattagggtctactttaataaataaagtagaacatacatacaggactctattcctgtatgttttaaatatgttttaaagaacacatattctccaggtgggaatagaacacattctccaagtgggaatagtgttctgtaaacatcaaacaggtcaaggcagttgatggtgtttttaatttcttgtgtattcttactgattttctgcctatttgttctatcaagttctagaacaagaatgttaaaatctccaattgttattgtagattttactatttctctctagttttctgtcagtttgtgtctacatgtttatgacttatgcattcatgataatttcacacatatgattaggaaatatccctccttatctctaatagtactccttggcataaagtctattctttgtaatattaatattccaacctagctttctcatgcttattgtttgcattgtatatatctttctatcttttcactctcaagatatccatgttattacatttaaagtgtattcctgtagacagcatatgttgactcttgcctttttattcagcctaatactctctcttttaattgtagtatttataccatttacagtgaatggaattattgctacaattaagtttaggtctaccatttatttcattatatgcttttgatttttttcttttgggtttttgtcattgttattcttctgttttcctttcctttttttttttttttttttttgagacggagtctcgctttgtcgcccaggccagactgcggactgcagtggcgcaatctcggctcactgcaagctccgcttcccgggttcacgccattctcctgcctcagcctccccagtagctgggactacaggcgcccgccaccgcgcccggctaattttttgtatttttagtagagacggggtttcaccttgttagccaggatggtctcgatctcctgacctcatgatccacccgcctcggcctcccaaagtgctgggattacaggcgtgagccaccgcgcccggccttcctttccttttttaatgagttaaactgatcaattatttttccattcaattgcacaactggctttttagctgtaccttttttgttattttttagcagttgttctaaggattacaatatgcctctttaattatcactgtttacacagagttaatattttaccactttatgcaaatgtgagtatcttataagtataatttcatttactgccacccagtactttgtagtatttttacatacttcatatctgcaagtactatagactcatgagaaaatactataatttatgcattagtcagtttttcttttaaagaaattaaaagaataaaaggatattcttttacatgtaaatagatactttaaaatttttagtgaaaattttctgtaaaaacaagtttctatcttggttcatagtgtcatttcccttcaccctgaagcactcactgcctttcacactacttataggaattccactgacaacagaaaattcatttcttcattattgcaagatcacattgctctacataaaattctggttttgcagttgtttttcttttcaatcattaagaaatggcattacatttagtatgaggaatgagtcgatgtttgattattcccctgtaggtgatctattgtttccacccttagggctgcctttgagatttttctttgtatctttggtgtacagaagtttgaatacagtgcctacatgtgattttctttgcatatttttgtgttttttctcagcaaattttggacattttcagctatgatttcctcaaatatcatttctgtcccattttctcatctgccacccacaatctgctgttaagattctccaacaaatcattttttatttcagattctgtactttaacctttggttctttttagtaatttcatttcttttttcttcttctgagacatgcaaagtatagtggactggttgatattgttgtacagatcactctgcacatttttgaatcctttttctctctgttctttacattaataatttctattgacctgtattcaagtttactgacactttcttctgccatctacaatctattgttaagccacttcaatgactcttcaaaaaaatttcaggtattataccttaactttttacttatttttgaaaattttcatttctctgcttattttctcatctgttccctcattatgactatatatatacatatatttttagagacagggtctcactctgttgcccaggctagagtgcagtggagcaatctcggctcactgcaacctccacctcctgggttcaagctatctattctcatgcctcagccttctgagtagctgggattataagcatacgccaccacatctggtggattataggcgtgagctaccgcaccgggcctgaaaacatatttttttaaaatcctgaatatatttataatttctgctttaaagtccttgtctacaacttctgaatcatcgaggaatctatttccatggactttaaaaaaaaattacatgtcacatttttctgtatccatcactggtaatttttgaattacagttgaacattgtgcatgatatttatacaaactctgggtttggttatctttctctaatgcaatgcatttttcttctagcaggttattaaattactagtcgaccactttgatttgaagaggactggttttattatttgacagaaactttcaatgcttcaggtttgtctctctttctataattaatttcttagttcttagctatcatctatatttctaaggtttgatccttctgggattcataaagcctgagacatttaccaaacccttctaactttgtaaactcaaactcctaactttgtctcctcttcatctaatgtatctgttcagctcttttagctttctagttgttgcttttctccaggcacttataggctcccacatacatgcacagtttatatcagccagaatgttagggtaacttatatgtagattcatgggagccttccctcgatggctccatcctttctaatacttccttcctcaatttcagctactttgccaatgccagctccattcgctaacatcacaaaccaataagattgtggttttctgcctgaattctaacttctctataccatacagactgggaagttccttgagggaagaagctgtaacaaacgtgaattttacccgggacagttcactccagattccaactgcttttggtcactctccggtgccttcaaataattgtggtgttttttttttaagtttttaattggagtttagttttatttttaacccataccatggtttggaactgttatctgtggaaatatttgtcctgaaacagtacaagttactcctttattaccaaaatcacaactaccaaaattgtggttttatgttagatagcacttgaactgatatggaaaactgcattagaatcaaagtgtctatagggcttcctctctcaatattcagtattttaaaattgagacaagactattttttaaccttaaaaaaatcactcatagtgccctaggaaagtgctatatattccactcagtcgctaaatatggccaatgaatatttctataattaaatttagcagaataatctgtgaataaaatgaaacagacctgtatgtaaagaaaactaccttaatgaacttgcttgggagatcagtggtatgtgatatttctaatcatgacagagaagttgaacatgtggtacagttgtgtagggaaaatggataactcttatcttcattattttttaagtcattctaagagaagcatttgctaagtagtttatatatatgaacttatataattttcataacaatttttaaaaatagtattgtaacattattttgtagatcacaaaactacaaagtatcccaggccatcagactccagagttaaattccaaccattccctctaactacctgctcagaattgagataaaactcatccacagcagtcatcattttttctaagaatatacatcacctattaatgttctttcccatctcccatgttaacaactttcttcctctatcatgtaaacttgctctctatcatctccgtgcctttcttgttcattttcatggagcagccataaaatggagaataacaattgaagcagtgaatagccaagaagcatctctcaatcaatgaacctgagacagcctgttcacttctgtccatcattcttgtcctttagatctcagtttcaaattcatttcttctagacattcatctcttcccatgtttaatctggaaccatctacccttccaccagaccaattatcctggcaaattaatgtaatagaccagtattaattatttgcttgtatgtcttaacaacattctaggtgctgtgccaaaaacaaatgaatagcaacacaaggtcttctggttacaagcacattacattttggttggggagattttgacccatctcacagtcataatcttcatccaggttatctcgtcaacctctatgtatgcatatattccaatattttgttttgcttttctttcttccttgtagtaatttcacacagactattcgcttcaagaacctaactaacttcctgttggtacccaatcctttaactctagagggtcaaatggagccctgtggctcctggcagtgttcctgaagatcaggtccctctggtggaactcagttctcactgccttatctaaccttcctcactcagcttgtaatcaacttaacttttaaagtctttgtacacattaggtaatatttgttctctgaactcccagaggggctgtggtaactgcccaactaggaagccctacccttcattattcagcaacagcttgaagaatattctaattctaactttccgccctctgacagaccagctgcatcaaaggctgtgttcccctgtttgtttttttcctgaagcagagtcaccatttcaaactaagtaatctatgagaaaagtaagagctctgggtccaaatgtttaaaacatggctcttctgtgaaccacggcaaatctaaactggattatgccttatgctggagtcagaacttacttggtcccttgttctttgccctctggctccctgcatgctgttcaggggaagttactggcttttgaactggcggtttgaaaacgaaggcatttttcttttagggagaacagtctttcagtgatttaaacaacaagccttgtgatcaaaataattcataaaggaaaagatttatgaagtgacttcactagcacacaatgcattttaaaaactttgttttttaaataaatctgtcagtacagaagccaagacaacacatctgaatgcaatatcagtggacacaccctgaatctcttcttctttgcttgtccaagactgtggtagaaaagggaaatgattctctttgtcttttcttatttaatattattattaaaaattttttaaaaattctagttccatgaaaagactttgaaaaattgtgcctacttttgtttcctgcaggaaaacctgccttgtaaaaatgtattttccattgaccacttgtgcttgtttaagaaaataaaaaataaataaagaactccaacttataatgaatacctctggcattagggagcctgttctaatctccctttatcaagtttgagtgatagttctgctcaacgagtattgacagggccgtcctgtttctcaggctttcgtttccctcggttggagaaggatacagtgcattttcacattctcaaagtctgcagttgtttttatataagaagcaatttgcttgggtcacgtcaggtcgaatgggatgcctgcccagctcttggttttaaaggaaaaacatacagaaagacacaaaaacacagcagtttccttcattaaattccactctacctgccatgggcttctagccacaatggaatttcccaccctggcctagcctagcctaacttttatttttagggattttttttcccctttaaatcttatgagctttctttcaagtgaactttgaggtaaggattattaaatgatagagtaattgcctggttaaaaaagaatcagacataaaaaacaaatgcctagtgaccttccataatatcgctggataaccaccccctggataacagcctttcaaaaactgttcataatcagcacaacaagacaggtcatgtaatttaaaattaaaacctgaatcatttaatgaatagggatcagcatttttttcaatagtaccctcttcttacctaattgcattggatgaagataattttggagaagaaaatgaataaatgaaaacacaaggaactagataaatagatggggcgggtggatggggggtggagagagagacagcaagtgagagagagaagcttttggacctctctctccaaaaagccatttatgcttttccccattgcctaggggcaactgatttaatcaggattgttcatgtggattatctaaactatgaaaagcaacagggagcacttcccaagaaatccagactgggtgtgctgcagaatacttggtttggggcctggagctaagtagactgttcacattgtactcagggtcctaagaaaagtggctcagtgtctctgtaattctttgtccctttgatctacctcaacatttggtgtctcttggcattaggaaagctcacgaaaatgaccctgcctagttaacagattcatagtctgggcacacaaaaaaagggtaagaaagaaaaaaagctttggtaatgagggagagaaacgtaccttcttgctatctttgctgggcataaataaaaatcgaaagatgtgatttttggagatgtgaatcccgttcttcccatatttagtaatagccttttcagagccaattcaagaccttctatcaaccacctctgttaaacatatcaagttagatttctcattcattattttcaagctggattttgcataatcttccttcaaatgaagaagtttacttttcgaacatgtcatttgctcttagcactgttgttctccttcacccattttggcttcttatcctcaaatccctgattccttattaaagtggattgttaatgcagccattctttagcaccacagcacatttataaatcaaaaattagtttactctgcctggcttccaaaaccatttgctgcttgaaaccatttcatgagtttgtctactcatgtgaataaataaaaacttgcctataatgtgactttgggaaaggaaagagcaactatatgaaacgaattctacagaggccaaaattattttcacgagtttcatggattcagcccttgcatgtgccattctacattaactttatctctgagattaggattttgcttctctttttttttttaattatactttaagttttaggctacatgtgcacattgtgcaggttagttacatatgtatacatgtgccatgctggtgcactgcacccactaactcgtcatctagccttaggtatatctcccaatgctatccctcccccctccccccaccccaccacagtccccagagtgtggtattccccttcatgtgtccatgtgatctcattgttcaattcccacctatgagtgagaatatacggtgtttggttttttgttcttgcgatagtttactgagaatgatgatttccaatttcatccatgtccctacaaaggatacgaactcatcattttttatggctgcatagtattccatggtgtatatatgccacattttcttaatccagtctatcattgttggacatttgggttggttccaagtctttgctattgtgaataatgccgcaataaacatacatgtgcatgtgtctttatagcagcatgatttatagtcctttgggtatatacccagtaatgggatggctgggtcaaatggtatttctagttctagatccctgaggaatcgccacactcacttccacaatggttgaactagtttacagtcccaccaacagtgtaaaagtgttcctatttctccacatcctctccagcacctgttgtttcctgactttttaatgattgccattctaactggtgtgagatgatatctcatagtggttttgatttgcatttctctgatggccagtgatgatgagcattttttcatgtgttttttggctgcataaatgtcttcttttgagaagtgtctgttcatgtccttcgcccactttttgatggggttgtttgtttttttcttgtaaatttgtttgagttcattgtagattctggatattagccatgagtaggttgtgaaaattttctcccatgttgtaggttgcctgttcactctgatggtagtttcttttgctgtgcagaagctctttagtttaatctacgtctgattggtgtacctgaaagtgatgtggagaatggaaccaagttggaaaacactctgcaggatattatccaggagaacttccccaatctagcaaggcaggccaacgttcagattcaggaaatacagagaacgccacaaagatactcctcgagaagagcaactccaagacacacaattgtcagattcaccaaagttgaaatgaaggaaaaaatgttaagggcagccagagagaaaggtcgggttaccctcaaagggaagcccatcagactaacagcggatctctcggcagaaaccctacaagccagaagagagtgggggccaatattcaacattcttaaagaaaagaattttcaacccagaatttcatatccagccaaactatgcttcataagtgaaggagaaataaaatactttacagacaagcaaatgctgagagattttgtcaccaccaagcctgccctaaaagagctcctgaaggaagcgctaaacatggaaaggaacaaccggtaccagccgctgcaaaatcatgccaaaatgtaaagaccatcgagactaggaagaaactgcatcaactaacgagcaaaatcaccagctaacatcataatgacaggatcaaatccacacataacaatattaactttaaatgtaaatggactaaattctccaattaaaagacacagactggcaagttggataaagagtcaagacccatcagtgtgctatattcaggaaacccatctcacgtgcagagacacacataggctcaaaataaaaggatggaggaagatctaccaagcaaatggaaaactaaaaaaggcaggggttgcaatcctagtctctgataaaacagactttaaaccaacaaagatcaaaagagataaagaaggccattacataatggtaaagggatcaattcaacaagaggagctaactatcctaaatatatatgcacccaatacaggagcacccagattcataaagcaagtcctgagtgacctacaaagagacttagactcccacacattaataatgggagactttaacaccccactgtcaacattagacagatcaacgagacaggattttgcttcttaagtagatgtcatttttctccagtaaaaccaagtggtttaccctgacatttagtagtaatttagtgatttcagagttccttctaaatctaaagtaaatgttcatgagactcatgaacttgtatctagacaattaatctgagcattttaagacttccctgaggctacatataatctctcacaaccccttgcaaaacctgagattttgaaccactgtcaagtttgtggttgccctggtaaggagtaaagcaaaatcattacttatggcaactaccacacaaacattgtagtgaactgaagtataagaaaatcactactatactttagacagaacattaggattaatgctggtaaccaaggaactaagagcctgtaaatataactggcttaagaaggagaacaggattaaacaatattggagtttagaaacaaaagtagtactgtatcaacctgtcactatgcagccagtcattacaataaaactaaccaaaggatggcggcagaaagaaataaaagtatttttgtgtacaattcttcttgaagcactacttgaattgcatctgtagggaacaggtctcataggtctattatttgcccacctccccaacacacacacacacacacacacacgtactagcctaggccgatatctactgtggtaagtttgcatctgtgagccactgagcagctgctttatatatgcagcataggatgaaagagagaaaactggggtactcatggtttttgtgtaatatcacaaagaaaagaaaacaaaaaaaggcttagagaaagttaaaggaaaatgggcagtggtacatatacagaacaagttaggattccctaggaactggtaataggactaaacttgcttaacatctatcaaaatgacttacttattccagggtcttgcatatacatagcagaagcacaattaatttttgctgaatgaataatctggaacaaggaatgtaaaataaattatccaaaaatgttgatggaatgaaacttttctgagcaaggaaaagctaaactgatggaacacaatatttatccaggtgtgcagaaaggtgccagtgcaaatagagaaaaacaaaatattcaaatacagtcgtttgccgtgtaatgacattttggtcaacaatgaaccacatatatctataccatggtggtcccatagattataatactgtatttttgctgtaccttttctatgtttagatatgtttacatatgtaaatacttaccatctactctgttacaattgcctacagtattcagttcagtaacatactgtacaggtttataaggtttatggcctaggagcaataagttatactatatagcctatatgttagtagtatataccatctaggtttgtttaagtacactctatgatgtttccacaatgatgaaattgcctaaggatgcatttctcagattgtatccccatcatcaagtgatgcatgtctagtttaattataagtcttacctaggaaagggacttaaaggctatgagctctttcaggcaaaaaggccttcaaaattttggcactcattaagtaaagtaatgaaaataaggtttataattcccttatattaaaccctctgcaattatgtgaaactatctgtacttcaaatgccatgttcctataacataacaactcagggtgtcttacacaggacagtcattaaagagtttaaggtagattaaaataatctgcattagtagagaacaaattattttgcggtattataacaattcattgaacatgagaaaaagcaaacaaacacgcttgttaataaatgttacttaacagacatcacactgacatttcttagtgactgactgccatggaagctttctaataagtctaatttttcccacgctctgagtttataagatagcaatattgtagctttgggtgtttacctttgtttatttattgggcggagttttattgcgtgcctcctccagctgtgccaatctggtaagatcaaatggaatcctttagctattgtcactatcctaaatggaccgcatgcttcctttgtcccttgcattctctgattttcgctgggggttatctatcatggctgtacatccaagtctctaatctatctcctttctcatccgtttttcctgacttatttcccttttccctttgtctatttccctgtgagaagccaaaagactgtatagttcttagtagcggtagtagtgctatctagagttggcatccaacagcaccagtgttataatacactttctacaatcaagaaatgatttgatttccttgcctcagtagaaattttacaagttaacagtggttcacctgatataaaccataatatttctatcatatcatgaaagaattctaaaaaatctgttagactttcttctacaagtttgcctatttcctctgaatacagttaattcacctggcaacaaaggagattagctatttctttttgtatgcagacagaaagaagtgtgatctttctttgccaataaaaacttctagtaagtggtgatagacttcaaaacccttctttttatttgaaaatcatggttcagttatcaggaattccaaattcagaatctaagaacagtgatcctatatagtcttgtgattttgcacatgctagggattggtaagttgctgaagacttcttaaataagagaggaagcatttttcttttcacttgcaaagaaccaggaggtacattaaaagaggttttagagtaactagaatgtgtgataaactgttcactttctgttttaaaactgtccatgaggttccctttagagataggacagactacagagaacgtggtgtctcgtttctatgggttgaaattccacagaacaatgctttgcaaagagtcataccaccagttccttttcctgtgagatgcaaatactaaaaacagatatgggctggacaagattattttaaaaatagatagaaggcaataaaagctttggtgatattctagattacatatgaaatgtgtaaaagcgtaaaatgaaaagttctctactttttaaaagctgcatcaaaatttccttcctacactgtaatcgtgccccttaacccatctatgcctgaggttgcaatttctttgaatttctgcaatcagaccatggcgatgaccttgagcagtaggatataaataactcctccatgcttagcgttccaataatggaacactaggcataaatgggataaaacacaaattgctaggttcatgataaacagagcacatctgtaaacaaaataacttttaaaaaatatgcctacatatataattttattacttctagaaacacaagtgttattagacttaaagagagccagtgaattgaatcaacttattctgatatgaacctcaatgtgatctgattgcaggctgcaatgattaacacgttttaaaagaaatgggtccatactatactttccaactgcccacccttctgttcttcttatgctacagatttatggcagcctaacctccagccaacaagttagagaattgggtaagacatcattttggctttttaagaaaattatggataatcaaaaaacatgacacaaaagatttagtggctattatcagggtataaactaataactaaaggcatttatgtgttaggtaataatgatgcttagaaaattataaatatcaagatgctctttcaacaactatattccagatttaggaattttgtagaggatatggcataagagtgttaagaaatgtatacttttttgaaaataaaataaagtctgatttatttattatccaagttcctgtgttttctgggaaaaatgtattaatgagaggtagcattatttgatagttaatggagagtggaaatcatctgttacaggcccacatgctcacaagcaaaataatattctctcaatcctcaaatggaaatggggattataaaatgctataagactctgtcaacatttctgataaattccatgaaaattttgtgttacatattttaaaaattgtgtactatgattataacatagttgattattaaatatgtaatcctttctttcagattattcttcttccttaaatgtaaagggtatattattttcttgatttattcttttggataaatatcctgtacatagatgtctgaaatccagcccgtcagtttccctttaaattctagcatattttaaaggaccttaaaagatgactgtggagtactgcctgatttggaacttgcctctgtctcttacacactgtatgacgttgggcaagccacttaacttctcagtacttcagtttcatcatcagtcagaacagcacaataatagtaccctgctcctatggttactatgaggattagtgggtttcatactgtcaataataagttgcctttctgggtctttgaagtacttgaaatcaggttaattaaattaagcagagctttggtccctttgtttgacaagtaatctccaattttcatttccaggttctgatcccctaaaatcagtggaataaaaccttgtttgtgtaactgccatcttcctgccccaaagccaagattaatttacctgttggttttagttttcactaggtctctctttagctaggtgcttctaagggtaaaatatcaactattaaactatttgaggcaggagatgttgaaaggggaatttaattgttaagtcaatagcagtgtgccagcttagtctgcctttcagaaagatcaccatagtaataacgagaccaataaataaataaaaagtataaaatatacatctatgcagaatcttagaaccctttctctaacacataagtcattaaaggaagctctgaggtctgcctatgtgattcaacatttacacacatcatagttctatggaagaaattctcagttgagagctaccagctttcttcagatcggatcagatttttctatactccattataaacaacaaaaacaaaagcaaacaagtgaacaacaacaacaaaactgtagttgtggttcactccagtaatatatactaccaattcagtggttcttaactgggggacaattttgccacccccttccccaccaggggagaactggcaacatctggagacaattttgataatccaaactgaggggtgctccaatggggagaggtcagaaataccactaaacatcctacagtgcacagaacagacatctaccctgcatcccggcaaagaattatctactccaaagtatcatagtgccactgttgaaaaaccctgtgctaaactaacatctgagagccactggccttaaaccatcagccacatcaacacgtaagacactcagcctatgggatagtctaacagttaaagaagacaccttagagggaactacttcaaaaatatataaactgacaaatctggataccatactaaggaaaaaactggtaaaacaggtagttgtttgaaagcttcttatgcccattattataaaccaataattttagattactgaaccaaccagactaatattccctttgaattccaggaggtataaaaatatgaagtcatcgactatgcaacattatcctgctatggagacattctgaaatggtttataaaagcagtgaacacattaaaaaaaaaaaaactagcccaaatgagttatgcaaagttaaagtcattttttctaggaccagttttttttcctgtgcatagtattttccatatgtaccgcaaacattcatttgtgcagaacatagcaccacatttctaatacaactcctctctgaagacaaatcaggctaaagctaagagttgcagaaccatttctgtatgagtcatttttagcacaacataagccctagagtaaaatttattttctaaataagccacaattattctgcaaacatttaacctagcacctctcaactgttaaagaatgtcaattatatatgaaaggaagaacaaatataaaggaaatttgaaaatcaagaaaattttttctgagaaaagtttgtgagaattattatgaatacagctaaaattcaaatatgtgacattttatttttttaagggtttccctgtcaaagacaacacatatttttctaatgaaagaggatgcctgaagttgacattcataagagcatttggatactaccaatgtgaagttgtacagatttactcatttctgcaattaccctcttgtgtttgaattctactttggttagtggtagcaagcactaaactgtactgagggcttcgcaaaagttgactttatttctttacacttagaaccccaaaaatttacttcctaggaagatactagggaatcatatcttactgaggaggaaataagaggtggaataactggattagcctcacaaagaatgaaagctcagtaatttctgagttggcaatatttttcaccctccttttctccatttaaatttctagatttaccttcaaaacacttgcctttttctaccttaagggaagttctaggatcagggagatggagatagagaaggtagagatagttttaggttttcacagaagttcaattaaaaactgccaagtacctcctaccaagagaccaccactaaaatttatttctagaacaaggtgcagaaaaataaaaggtagaaagcaggaatgttctggtactgtaaaatatttggggaaaaagtctaatttctgttctcaaaatggttactatcttgctctagagaaaaacataaaccctcttaaaataactgaagaacaataagaaacagtataattaagtgtaaaaatgggtggtagaagcaaaatgctgtggggcacccatgtgtcttacatctttccaacacagagaaaagagacaatgggtcaaatgcagcctactctagtctctgatattagtttcattacacagctataatcccattacaaagaacttgaaggaactgttgacattttttgctgccctggagtttattgtctcaagtattgcttgaaataccagggtacatgcagagatgtctgctctaatggtatttgttgacctacattatgttagggttagcctgaataaatggagaggaacgctacatggaatcagttagttagattgtttgtaagtaggcgtgcattatttttaccatgttttattatttttaacctaaagactacgcatttaaagtagggtattatctgtaagtaatcttgttgttatatgaaacagtaatatttattaaaagtgcttttgtaaagcccaaaaaggggatctgcagaggcagatttactgcatatttaatggagcttaaacctcagggaccttcacttgcgcagccccccttccaaggtcctgtacttaactctgtaatcataattttgtattctttttcttcaagaggaccccccaaatagtttaagcttctggtaaaatcttgatctagcctaggtataaaataatcttgaagggatccaaactgatagttctaaaaggctgatgctgagaaagatacaaaatgtgcttttacaaggatatcatatcaattatattttccaaatgtatctctcttattgttgtcgctcccccttccctgccaataaataaatgccattttttttttttacctcactgttaaaaggttattagacccttttaaataagatcggtctgttcagtgactgggaataaccagagtgttaaaaaaaagatgaaaaattcagaggcagaagataatttccaagaatgaaaagatatcttagagagactcacaaaatgtttcactaaaacagcaataattattatccatacctaaggagtacatgcatttgagaaaaggaagggcatggaaagtctctcaatacaatttacagtagtacctactgaaaactgtgctgagtttacacagagtgtgggaatttttaccaccagtaacaccacgtgtctgtttttctggtttctgaaaaccccaaataaatcccacaagcgcctctaaactccaccatggaattctcacacttctgagtaagaagttcagaacagaataaaaactttggatgcagtatgtctgtctatagtttttcctataatgccttgtcccagtttttgaagaaaactgaataaaaattaattcaagaaaaaaaatgaatgaaattacctcaaatggaatattaaattgaaaaataatagtcaaattgctcataaccacttcctgttaattttttttctcttttagaaatggagtaagaatgcttcaaataaaaaacgtaaaacccatcccatcccataaagggcccactcacgtaaacaggaagcttattaaaagaacttttcttggtttcctggcaaaatccagcttttattttggtggcagcatctattaaggaggagactcattttgtgggcaggatgaaaaattaaacattgcaaatccatcaggtacttgctggattagagttagttgactgacttgttggctacagggaacaaggtagttctgaaaccaaggaacaagctgccaaggaacagtccagccctgcccaaaagatgatggtcttctccatccaggcagcacaaatcaactcgaggttccaagagggccagtagacgccagcctaccttactgtaaagtgtctcacatgcatatctaactgttctctcctttcctttacatttaaatcctgttgtattggcttctctgttttccctttcctggaagcgctgtagcgtaattaaaagagtatgagttttggaatttcaaaacttggtttatagtccagcctctgccaaatactgtgacatgttacctgcttgagccatcattttctgatatgtagattgggactaacaattcttccttaatcagctcaagtttcacaaaatatgggtaaacatcacgtgactcaaaatcaactgaggcaaaaattcagatgtcaatggccctttcttgacttattagaacctccatgagctagaaattcttggaatctgaattttaaactcactcccaagtgatttccatacacacagaagtttgagaaccacatcccaccttgtcttgtgtcaggattaaataaaaccatataggtgaaacttatctgtaaattgcatatcaagacatgcttagctgctctcaatagtatcattttccagatagcccaaagcaccaaagtaaggacagcgggccattttcccaagatctttcttccagcttttccctgccatgccaacagcattcttcatcttcaggtaggcagggcaggttcactgggggttggggtagagctcagcactgtgacacaggcagtacttccgtagaatttcatttatgtgactgtacctaccccacagggtgatataaggattaattcctatttggtaatttactgtgtgtaaaatgccttgagccccttggaggaaagtgctatataaatgtaaaataattattataataataataacctcgactatttaactgatcagtgaattagccagaagatttaggctgccaagggacaaggctgaaaccattataagtagaaacactttacatcatcatatctcaaactgttatcacgaaaaagggaaacaaagggtgaaaattaagataaatccatgttctcaactgatttaaatgacagaggatcactagtaatgattcatgaaagccaggaaatgcaaaaatgacagctgcattgtaattctaactcagccacatgtcctgaggttttgtacactttggtcttttatttgtagggaaaatatctcatcagtgcaacatctaaaatttagcattatgaaggcacttgactatgcttttgcttagttgaaatacgttcataatgtatcccctatttgtaggtaatgatttttctacctaaaaagcattgacattattctatgaagttccaggtaaattttgaatcggttgcttacaatctgcctccccacatacacaccctaagaatacactctaacaaaacaatggtgtatttctagatctaaatttaggaaaccaaaatatatagaagataccttttcttcccaggaagaaaatgctttggtatataaactcacatgagctcaaccgtcttcagctcttacattatttgttttatttatttattagattcatgaagattcttctaccaaaagctcaaggggctgaacccagaactttcatatattgaatgtgaatcacttcttaaaccacagaaaggaaaataaagggctatagaaatcttaatgggcaagctccagatgctcaaaagcaattgtttagttactctacttagttatgcatcattcaaaacactttctaacaatcgggcaagaaaggttcctttgtgaagaacaggctttggggtcttggacaagttttaattctagttgttttatagctcatacaaaatagttgtggtgcatatgtaaagaggtactgtacttacatgcaataaagtttgcagatgaatattttgaaaatcaaagaaaagaaaacaaggggaggaatgagcatgtggtaccttgctctatttttaattattaacttgtagcctcaaagatttccatttagtagaaacacatgtaaactacaatgaaggagtactagaaaataaagtcaattggtataactcaaattattttgtaaaatgtgaaattaagctttaacctgtctatgtggaagggtgatgaataaatgaatgaatgaagtaaaaaatcaaagatacagagttgtaactgattttctttgcatgaagtagtaaatattaatattagaaatatcttttgatttagataaaactggccttgggtatataatacacaacactgaaaaacatttcaaatgtggtatttgtttaaatatatacatacataaacacacacatacacacacaagtcaaaaatatgggtgttctggtatagttttctgccttcaaagggtctctggaaaaaacagaagaaaaggtatcctataaactgcttttgctgaggtctctagtagagagcaaatcgaggcaagtgctgcccaaaataatctctattacaaacatttaaaaaatctatctttcatatatatatatgaatatatattatatatattatatatatacacaatatttttaatttttaattttattttatttgctgtatagctaacagcatagccaatgccctgatcttctagccacactgtaatttcttgtccttgcatcacaaccccagctgtagtcatcaaagtggaaaaactgacagcattgtctgaaagacacagcttgggaaaattgctccttgtagctcccctgtcaatgaatattatcatatttttctcatggataaggttactgtgttttttttgctgggccgggggtggggaggcttctacatacttagctactaagcacattaccattccgtttgtggaatggactaaacgtgacaatgcgagctgtagggttagcattcccaacattctgttttaaagtttttgtgtgtatatcttcaaaaataatattcctttatgtattcagaagaagtaaaatcacaattatattttacttgacattactattttcttaaggaggctaacagaaaaatcaatgggtgggcataaagagaaagaaatcatatgaggctaccacacatattctgttactgaatttctttcacctaaatatacaatggaatgctctgaattgtatgttttcttttcccatcatattaaactaaagcaaagttcttgggctgaaagtagaaaaactgcactttagtgttctaatgatccacacctttcacatattcacttcgcttacaattctagatgctaactcaataagaaagaaagaaacaaattcagagtatttcagtcaccaacaacaacagcagtaacaataacaataatattaatatcagttaatatttatttaactcttagatatactagatgccattgtaatcacatgtattaactcgctaaatcttcacaactctaccagagagtactgttattactccgattttattggtgaggaaatagaggcacagagagatcagaaacttgcccaagatcacacagtcagtaagtagaggagtcaggattcaaacctaggaagccagactctgttacaggatgaatattttggttgctaaaggccccatcttccttacttctcctgatcctcttccccaactgatcagcttgcagcattcatttgatcttctcaacaaattacgtattcatttgcacaccgtccatttagaataacacagtagttaaaaacttaggctctggagtctaatatgagggtttactgccacatattggtagtgcttaacttttctgtgcctcagtttccttctgtataaagtagtaataataaaagcaatttcatgtatttgttgtgagggttaaatgagataatgtatgttggagctcaatggaaggtcaatgttctataaacattaagttcattattattgatttttatctcttaataaatagaatccctttttccaattagattgtttttcagaaaaattgtgaatatgaatcttttttgtctcgtgtaggggttcccaaatgttcagtatgttgaactcttagatgtcctaggtactactgaaatcacgtgtattaacattcataacaactctgtcaggtaatacttacatttacccataatattataaatgatataatataccaatgtctaaaatttagtgagaacttactcactggacaagtgcattatggcattatctcattctccctctaagcctctgaactaggggatttttttttttttttttttttggagatggagtgtcactctgtcgccaggctggagtgcagtggcacgatctgggctcactgcaatgtccgactccctggttcaagcgattctcctgcctcagcctcctgagtagctgggattacaggtgtgcaacaccacgcccagctaatttttgtatctttagtagagacggggtttcaccctgttggccaggatggtcttgatctcctgacctcgtgatgcctgcctcggcctcccaaagtgctgggattacaggtgtgagccactgtgcccagccaactaggggatttttataatctcaagtttatgcaggaggaaacagaagctcacctcggtcatcagctggtaaatgttcacaaatgtaaattcttaaccacaatgccatactacctgctaaaaaatgaatttaaggtagatctttagtaaatatatttggtcttgatgatgaatcaattgaattctttatttctgttaccagaaaccttgcacttaacaataaactaatgtggccttgaccagcagccgccagtccccaggcttcagacactggtacctgttaggaacttagctgtacgggaggagatgaacagtggacaagcaagcattactgcctgagctctgcctactgtcagatcagcagcagcattagattctcattggagcacaaaccctactgtgaactgtgtatgcgagggattgagtctgcacactccttatgagaatctaatgcctgatgatctgaggtggaacagtttcatcctgaaaccatccccacacctccagtccatggaaacattgtcttccatgaaactggtccctggtggcaaaaacgttggtggctgctggcccagacaatatcactcattctgttaactattgaaaagagatgactgtatgtcaggtacatgccaaatactggaaatttgaaaaatatatatatatacattgtgggtctaaaactgtatcattaaaagcagctaatgatttaatatcatttcatttactatcattttctgtttactcttacaaaaatcaaacttcttcctctccccttcctctctctgcctactctttcttattccttcttttaaatcaaagttttacagtattaaccttacaaagatttttgcccataagaaggttatatgttaaggcaaggaactgttttaattatatttactcttcattttgagtatatttctttttcatacctgacaaagacttttgaaatgactaaagaaaggcaaagcaatctgattctttataaaaaaatctttcatatgcaatcttttgtctgtagtattctcataatagcttagaaattttaaaagaaggttttagctggttttgttcttttcaaattggcagaatttgatttttttcctcttcacatttggattcactttaaaaatcaacaaacaagaaaataaaaacatattcaatttaaaaaatatgctctccattggtgccttggcatcatcaaccaatatcagcatcactctgaaaaccatttctattctgtttttaaaaaaaagagttttaaaatgcacacataaaatgcacttaaaattgatcctactgtattaaggagagagaaaatttaagggcaatggagagctttgctgtaaccaactcttcagtcaactataggatattgttaatactgccttcacctccacactgaagatataggtaccattttgactgtgcttttgaacaatatatagctaaagatttgaagtgagtaacttcaaagtcagtagttttcatgtatacgtcgcagaatcactgcatcttatgtatgactttaagttgtattaagctgataatttcaaaaagagagactttcaatgaaagaaaattcctgaaatttggtcattaaatggttcgagtacgtagaattacttacaatgtaatgccaaagaaaggtatattgtatttatccagaaagcacgagcataagaatgacctcagaaagttattataatttattacttcattaaagatacatttctagtccatctattatgtgctaggccttataatagacaacaaaaatgcaaagaacaacaaatgtgatctgaaaagtagtaaaggttagggaagatgggactagtaagagagaacagaagtaagaaaataaagtgattataattgtaactgccatgagctgagggcatatcatgcattgaggtaaggtcctaggtgcttaatatgaacaagccctgcaagacaggtatcataatctttgtctcacaggtggtgttgggaaaactggctagtcatatgcagaaaaatgaaactggaccccttccttacaccttatacaaaaattaattcaagatggattaaagacttaaatgtaagacctaaaaccataaaaaccctagaagaaaacctaggcaataccattcaggacacaggcatgggcaaagacttcatgactaaaacaccaaaggcaatggcaacaaaaacccaaaattgacaaatgggatctaattaaactaaagagctcctgcacagcaaaagaaactatcatcagagtaaacaggcaacctacaaaatgggagaaaatgtttgccatctatccatgtgacaaagggctaatatctagaatctacaaggaacttaaacaaatttacaagaataaaacaaataaccccatcaaaaagtgggcaaagatatgaacagacacgtctcaaaagaagataattatgcggccaaaaaacatatgaaaaaaacctcatcatcactggtcaatagagaaatgcaaatcaaaatcacaataagatactatctcacgccagttagaatggcaatcattaaaaagtcaggaaacaacagatgctggaaaggatggggagaaataggaatgcttttacactgtttgtgggaatgtaaatatagttcaatgattgtggaagatagtgtggtgattcctcaaggatctagaatcagaaataccatttgacccagcaatcccattactgggtatatacccaaaaaaattataaatcattctactataaagactcatgcacacatatgtttattgcagcactattcacaatgtcaaaaacttggaaccgacccaaatgcccatcaatgattgactggataaagaaaatgtagcacatatacacatggaatactatgcagccataaaaaaggatgacatcatgtcccttgcagggacatggatgaagctggaaaccatcattctcagcaaactaacacaggaacagaaaaccaaacaccacatgttctcactcatacatgggagctgaacaatgagaatacatgaacacagcgaggggaacattacacaccagggcctatctgggggtctacggctaggggagggatagcattaggacaaatacctaatgtagatgttgggttgatgggtgcagcaaaccaccatggcatgtgtatacctatgtaataaacctgtatattctgcacatgtaccccagaacttaaagtataacttaaaagtttttttaaaaaatatgtgataaaataaaaaaaagaattaaccacagtgccttgcctattcttctataacagtatctatttcactctattttattttgaagctatttatctccaagtttctttctagaatctaaacagttaacagcctgagggcattgaccttgactcttgtctaagttttacaaacaaacaaaccaaaaagcacactgcattgatatacttggccaagtaatgatgtccaaatgctacaatgtcacaaccagtgctcagtaactattagataaataagatagagtcattcactcaatcattcactcctgcatgtttcacttagtaatcttgtacgctcattgaataaattaaaagctgctttatgaaaatgttttctgttaatttgaataaaaacctttacacatcaactagatacaaaagagaaatctattgtttgacaatgatcgttactgaatcaaaaaacagtggggccatctgcagggtacagatcatgctagagtcagggaaaactggtgataaacttcagaaagccaagaaatataccagcttacaacttagcagcactgcctccacacagtcttcaggtatttattgactgtctcacactaatgcatgagtgcctgtggtaatggtaaaagtatataaatttacttgcccagagatactaattgttaaaacaaatacaacaatttaatggcaatgcaagagaagacagactaacatttacaaagctatttcttgtttaggcaagatagtagactctaaacatatattatctcatttaaattatcatttaaaaacccttagattgttagtatttacccattttaattaaaaacataactgagcgtataatttttttttttttttttttgagacggagtctcactccgtaacccagattgcagtgcagtggtgcgatcttggctcactgcaacctccgtctcccgggtttaagcgatccttctgccttagcctccaaagtagctgggactattaggcgtgtgccaccacgcccggttaatttttgtattgttagtagagttggggttttgccatgttggctaggctggtctcaaactcctgacttcaggtgatccacctcccttggcctcccaaagtgctgggattacaggcgtgagccaccacgcccagcctgtaaatcttgacaaaattcccagaggcaaaattattagaaggctgggagccaggattaaaaaacataaaatccttggcttttccatttatttcacattgcctcttcttagaatccacttctacaccaaagcagttaaaatcaatgtggatttgtattttaatagagggtttatggagtagtgggaaagatagcaaataataactatgtttattgaatactactgttcctaacattttgaacctatccaatcatttaatcctacaacaatcttttggaagtgagtgctattattattattgccactttgtaacagagaaactaagccaaaaagaagataaacatttgaaaagtcataaagctagttagccgctgtgcagctgaacttgacagcctatagcccacagagtttaaccatcatgctatattgcttcattaggttgaaaggttattaaatgaaatggcttaaacaaagttctaagcacatggcatggcacagagtaggtcttcattaaatgttagtttctgttttttctttaatctctaaaattctataataataatacctttattttcaaagtaattctgctttttaaagactttatgacatctgatttaaatttcacaaaaaaaggatggtgaatgtggaataaatcttcacaaaaatgacactgaagattatttaaaggcatagaatgttactcacaacacagatttaagagacaaaagtagaaacagtgttcacagtgttttaccaaaaacaaaaagggtatatatgcacaggaaaaaaaatgattagaaaggtatatccccaaagtttgaaaacaaattacttctagacgattgtggggattttaatcgtcctcttgtaatttatgctacgcacagaattctacaatgccttttgtatgctttctatactaagaaaaaataaaaaagaagagtagtactccttttttgagatcataatactgaggggggagaaaatcagtagaaatgtgtgagatttcaccctcagtgatagagctggaatagaattcgcactcttcatctctaacctactgtgttttatctgacccttattttctattcagtgcttaccataattgatgaattcaaaactaatctatgatgaaaacccctgaaagtgattagagagactgtgattgtaaatgtggtatcaatcactaacacaaaagtcccttataactcatcaggcttcttaagttgtttattcaaaccatttgtttctgagtccaaaccaataatatatgtgatagaccggattactttctctaattcttcactccctctctataatagaactttacatccataaactttaccatatgacttgaatgtaactctcagtagagtatgtgttaatgtgggagatgggatatatatctctgtctcttggctttgagcttggttaagtgacttgctttgactaatgaaatattagtaaacatgaaatgagcagagactttaggtattttctgcgggaacaaattctgtagttgtcaatagtttattctcctagattaaatgtttgataaacttttctaaaagaaggaatttttttttcagagagaaatatagctaacatggaatatcatgtccttttgtacttacctggagccaaagtaaactacttggaaaattaaggtaccttttgctggactattcctcatcctttagtttcttcagtccagactgggacattttggttaaaaaggagtaggcttgtgatgttaaggtgatcatcttggtcaccataccccagaaaaaatctttacatatccatgtcttagacactgaggtacagaaagagagttctgaactttccattccattgtcatttgtgttgtggagtcttattaatctgtctcatggaaggtgggaatcaggctatgaatggacaataattcatggggggcagtcaacagtagagaagaagttgctgcaaattgattaatacaaacaaaccaacctgagtacctggctcattttaggttccctccaaaggcttcagtacaggcagtaacttagaaggtaatctcagagggtaagataataataaggattgacaataataaggattggccaggatctctgagatttacacaaaatggctccagaggtagacattataaagaaatagaggctagaacatctctttttccagctctattcctcctttagttgagagtttccccagggcattaagccctgggggcttaatgtaagccccactctccccatcctagattttttgagatctcccagcattggaaaaggtcctggggcagaaggaaaagcatacttgaggtgggagtctgggttagcagagaacggcttcaggtgcagctgaagggaccatgacagcactgcctgacatctctgagggactatgacaggattctgacagccatatctgctacagaagcctgtaaagacttggggtggggggcagtggtgtataatatactgtgtagtctgatattgcatcctttaaagtatgatctggggaaggttaggctgcatcttctttattaaattatattccaaacaagttgtctcctctgactcctgcatgaagtcagactttgggacagtaaatcctacactgtccagctaagaaaaatgacatgttgttaataggcttaactgattctcttgctatgatggcaagatcagatttttagcagtgcttctgaaaatcctgacactcattcaccaattattttcttctaggagtctaatatgtattcatcttcccatatttcagggaagaaatagttgaacgactttagggagcttttcccaaaatgctgacgcatttttgcagcattttgccataatggggcctattgaaaatttttctgacattctgaattcatagcattaagatttgtggtgttgtttttgtatctggtttgtatttatttttgtttttattaaaatacaggagaaattgggacaggttaagagttgcacctaaatgtatgaagcttgaggtctttgaacataaatgagttagatatacagaaagttattaagacctttaagcattcgtaaacatttcatcattgctgacaatatctatttactttaggtaaccctgcctgagcagctcctgcattgctacaaggatgaaggtggggttatttaaaaatttaccaagctgtgaaagagttttctggagaaaactggtttggggactcagagcataaggataaacaatggatacttttatggttacaggagaggagttgataaacccctcattcctctaatgtaatgtataaaagaaaatattgtattcctggtcctcacaaatggggaggtggtagggtaggtaggttatatgaacacacatgtcttccctttgacaatgagtgggcaggcctttaaaaaaaagtctgaaaaaataaagagccctggggaccatttaggctctatcagtgagttctatcctgagatatcaaatccagttgcacagaatctaaatgtcaatatttacaaagctctttccatcttatatcccgcttcctttttcttttatgctctttctaccccttttccttcctccctattcccttgatcccctacatcattctgttttcccatttgctctcatttcctaacaacccccatccccattagtcagtccaaaatctgttcatcccgctataggcttcagtgatggaaaagaaagggccccaaacaaagccaccatccaagacaaggagctccagagggtggtgaattggtgattgaggtaaagcctggggactgagaatgttcaccgctctggaggttcttagcccgaaaagtgattaggcatcagcaggcttgatagctgtatcaagcctcatgatttcaaagctttcatgagctgacaaggacttgctaatttcaaactttctaaccaattacaatcacaaagaactcaggacaacaatcagtgagcaaaatgaaactgctggagtgaagcagccctcggcaggtttcactcttgtagctctgctacgcaatgtgcagctgggactctgcttcaataagtaaataaaaatacattataaaatacaaacatacacaatggatcccacttgctgtcttgttcccagtaaaggggtatgtaggaacgctgtcttgcattcattcagtccattaatttctgatggtgttaattaaaaacttttgatgctggtttgaatggaaaatacctcaaacagtgtttcctttattgaaacaccaagttccaagtcttggattattaggttaagctctgtcagtagtgagaccaacataaatgcttttcataccgtatgctttgacaaaagagaatagtaataataataaataaataaatgaaaaggaagaagaaataaagtgtttagactgaaaactcctttacttcaccaacctgtttttttaaggactaaactaaaaatccaggtccctgaatgtagaacatataattttaaaaaaatcttttttcaaatctttatagaacattcaaatcacccaatgttccaggacctgaattttttatattttaaaatgaagaaagctgcttaaaataagtgaatcagctgctaagtgatttctctctgtcttttcctctactctctctttaaaaagactggaaaatgcttaaaatggtatatgcaattgatatgtgcagcttaaggagcttaatataattactgaggactcagactttctatttaaaaataagatagggtagggtaacagaaactctgagtggtgagtattcatcccttgtgatggtgaggtgtgggaaatgtttccaaatgtttaatccactgagcaaggtaaagagtgcgaagcagttattcacagaatttggtgtccttctgaaaacctagggaagcctaggaaatccagagaacaactgaggaggatagtatgagagatgctgtgcaggaaacaagcaaataaaatatccatttcttcaatccaatgcttttgtgaagtattaagccaaccaccaaaacattctgattgatttttaagactcttctctaattttattttttaattactcttccctttgtgtattggggtctgaagccttgggcacccattctgagaggtcttgtaaatgtgtctcacatatgcccgtttctcttttgttttctaatatacctttctctatcatttttcatttcccaacctgtttattcacactgtctgcaatgtcatctgaatcctcgaaaaaccacaagactttctctttattccccctgaaggccttcatcactcttgttcttgttttgatctacatatctctaacgagaatgaagttctccataaaggctaagcagtttggcagaacttccttccttccctccctaaccgcaggctgtattgacctcaccctcttggatcagtttgctaaaatggcctccaaactttatgtgatatgatagtgaaccttcaacaacaacaacagcaataacaacaacaacaacaagagcaacaggataacttcagtgtaaggcatgtgagaaaaatacgcagagtaatagaactaaaactccatgagggaaatgggcctgagcaaaccacagcatgggtctttttgttaacaaaatgtatgatttttccccagagtacattgatagaggacatagcctacaaaggaccagtaaatgtaaattaactaacagatatgtagcaaatgaatgcatttaaagatgatttccagctgaaatgtttttttttttttttttctggagaccaagtttttgttaaacttaatccttactctctttcctttccagcagcagaaacatctggtcggttttagattccccttggatttccaacttcaaagggaattataaagaataacaaattcatgtaccggcactaaaaaaaaattagagcagcaggagagaatggtaaaattgtccttatttgactgctagtgacaggcgccacaggcagaactatgagaaaagacaaaggcaagatcaccagttgacaaccagagttcctgcaagagactgaatctttggctacatgcaaatatgcacagggcccttaacaatccatagggagatttacttgcttaaggaaaataaataggtaaataaataaaaggagttgaaaggtaaaaaaaaaaaaaaaaagaaagaaagaaatgagttcatgtttgcctgtcacatagtttgttgaaataataacaaataaaccaataaatgtttattgaaagaatgacctggaaataattttaaagatccacttaaccccttgggttttatttgatttaaagaaaattgtgagagttctgattctacaaagggctggataagtcatccaagaaataatacaggctcttaagagtccactaaacttggatctccaaagttcttaaaagtagtttctgtttctcctttggctccagatccttattatcaaaagatgtgacgagaaatcaaagtcttcttagtggccgggcgcggtgtctcacatctgtaatcccagtactttgggaggccaaggcaggtggatcacttgaggccaggagtttgagacaagcctggacaacatggtgaaaccctgtctctactaaaaatacaaaaattagctgggtatgatggcgcgcatctgtaatcccagctacttgggaggctaaggcacaagaatcacttgaaccggggggacggaggttgcagtgagccaagattgcaccactgcaatccagcctgggtgacaaaatgagactccatctcaaaacaacaacaaaacaacaacaacaaaaaaccaaactaactgttcagtacatgctcagtacttgggtgatgggatcatacataccccaaacctcagcatcacacaatatacccaggtaacaagcctgcacatgtatcctctgaatctaaaataaaagttgaaaaaaaaaaaaaagaaatttgtaactgtgtcaagttgtgtttgacaccactttatagaaatggatttattcttctcctctatcattttcttagcaaaactgaaacacacttctagagtgcaggtcttgatataatcagacatgagaaaatgagaacagttagagaaaatacaattttgccattgtaattacctcttacaaacagcctttcctctttcctgttttatgtgcaatgtgtacagcaacaacaataaaaataaacaaagacatgattaaccgatcaatttgtttctccaaagagagaaatagttaagggctaaagtgcctttcaataattaattataagagtctttaaacttagtattgagaggttacagatttccataccacaaatacattaggttgattcacagagtggccatcaaatacccagaaagcaaattacttttgaccgaaatgtatacatcaacagtacggttaggaatgttttcatagaggaggacagaacatacataaccagttctctatggagcctagcatagtgtcccatggaccaatccacataagataagaccatctacagagcatattcttcatatcacagactctaggtaagaagaaagtattctctaggtaagaggagaaaaataagtgaagatttctttcgttaacacttccaccatgaaaggaatgagctgactacagaaccattttcttgaatatttttgtcttgagtggggtttttatccttccttcaccactctaggtagagcagaatcaccaaagttctctcattacggtaatgtcataaatcccatcctatagcagttgtgcatgatcctgtgttatgcatccaataaagtttattcagaaaatatgtcagcttcattaaacagggatctgatgatctgaacaaaccacttatcttgcttttgtgacatgtattggtatccttaggtctaaaatgaaaatcttggttggtgggggtatctgccaaggattccctgcctcatgtaagcagaatcatctaaccacaattctgagcttaactgggggaaaggaggtggaaggtgtatcgtactagttcgttctaagaaatgtcttatagcttgaggatacgtgaggtcacaaatgtaacaacaactgaactagcaccaagagccaaagaggccaagcataaggaaacctgaagcaagagaaaaaggtgtacgcgtacatacaccaagaagcaaatgctatcattaataataattattgttattacagctattagaatgatgaggcattgatggttcacttgggtgaaatatataatacataagctagaaagaactgtgggtaaacttatggatctttttaaaaggcagtttatattctaggtttatgtgatatgagacacataatttaacaccacatataagaacaggatgctgaaaaaagtgaagaagacttgcagctttaaaatagtataatggctagttcctactggtcttttcttgtgacacctgccttagtcaagccatccgatatagttctaaccttttctgatattttaatgatgatgacaggcccagagtaaaggagacaaaataatcagaagattcagaggggaaaaagaaatggaaagaaaaaaaaagagtttgtattgtttataccatctaatctgacaaattttatatatgctctctgtttgctcaggatagtttattgctaatgttatgactttctcttttttttccatgtgctttgctctaccagttttggctgaaaatattttgtatatgtccatactgtaaaccctcatatttttctagagatttagtgtggtggggaaacttttttttcttccccaagggttaggcacatcaatattctagctactcacttttgaggccaatggaaaatgtgctcctaagattaaatagacctgagtaacacataaattcagtttatactgatgcagtatgttgcatagttacatcctgaatttctgatgcgtgtaatacacctgttggacaacacatcactactgaatagtcactgacctacaattcaaagacagtgagacagcacaagactacagatacaggttctctacagacagcctgatttgtacagagcattcctcatctgtggaactctgtgtgtaaaggatctaggctagccatgggaagctggctcatagagggttctaaatatttttagaataaactagagcaataatacaagcacagagagcaccctttgttatacaatgcataatttctttccccccaaacatgttgtttaaaaatgattcagatttttattatataattcccccttttacatatttctaaatgcctcacatacccatcacatgttttccatgtctgccaataatcttaattaaaaattataaacttttaaagccagtgttacatttgatttaagtagatttgccatatttatctggtattggttggctgtagccagactggagttctaagtaataaggggactatgctttcctttcacctcaggtaagaaattgtattcaacacatgcttaaacccaataataagtataattaatgctgtatagatctggcaggcaaattagcatcctaaatttgagtcaagtaaaaaaagtaccaaaagaaaatagttcccccaagaaacctagccaaatctgtgaaatatttctctaggcaaccaaattgccctgtggcttacagatgtgtctaagaatattaggcaactcactgatgagattttacaatcaactgttacatgttagaaaatatgatgtcaggatactatgaagaaaaatactactatatacaataataagaactatttatctgaatagtttttaacattaacgtgtaaaaaatatcctgatggatctgaaataatgatgtactaaatactacaatgtctggggtttgcttcaacataacatggtgatatagtgagaaaataacaggccatcagttagtcattgtgcaagctggtgatgagtacatgggagttcattatagtaatttgtttatattcatgaatttaagattttttatcataaaaaatttaaaaacatatactgatttgaacttttattcatttattatttgttgactgattcatttactgtttatgcaaggtattattgagatataaataataataataatgctcttattgggcatttaggttaaatgagctattcctcttcaggaatattatatatttattttaaatgtttataaggtctatgtaattacatatttcttaggttaaattttgaaagcaggacacaaaattatatagaaagtatgataacatcatgttttaaaaatatatcctcggggaaaatgagagtaaggaaatatatcaaatggttattaatgattggatttaaattatagaaataattactttaatttttcttcattttactcctatgtgtttttctaaattatttttaatgagcatgtatcattttaaaatgaaaataaatatttcttcattactggaaaagatatgttctccttccccaaggagcttttcatttactgaaacagagaaactgcaaacacacagcattgcccagatagtttaaatctccatacctagaagggaaatacacccacaggaaaagaaacgtcaatacagattttatctgatcatagaaacataaagagctttctctgtgttggacagcaatagggaagaaactggcttgtttgcaagccagcaaaagcgtgaaattcagtcctttttgtgatgagatcattttgtgataaatgcaaaaggagtgacaaattaaagtcaccaaataagcctttcccttgagctcctgaggcttactaatacgagtttcttttggggtagcatagcaagtaaagcgtgggagtggggagggaggcggagctacaatcccgaaggctcctggccttcactggtgagatggatatgctcagagagacagagatagatgtgcaacagaatcagaaacaacaacacagtgacaactatggattatgcacaatggatatggaaagtctctgttagaaaactatctttattaccccaagagattatttccctcagtttatgcacgttcatataaagcgaagtcaagagtgtaacttttaaaggtttggatgaatatgatgttcatgactaaacaggcctagatggagccaggcagaacacagttagatgccagggaagtcacccttttcctcctcctccctctccagtacagttgccagtgcatttcaatgcaggtcagcctctagcaaagtcagctgtttcaagctctgattggataatactttatctatacacccccagtcttgacctgcactcttctcccagtcatggaaatatcaagaattctagaaggccacaataccaatctttttgaaactttacaaactttacaaattttcactacaagacacctagaaaaatcttcaagcctatgcttacctgtagccctggtcttggtcctcttacttaactggtaaaagaggatagccttatttatgtctttgaagggtattttccttttttgcttgttggtaagtacaagagcaaccatgtctaattttaagattgatccaaatgaagcaaatgcatttcaaatttacagaataccatagaatactaatgggtagttcaaagtatcactaaatgtgtttggagggttttgagttttttcaaaacatacaatgttccacacaggaaacatcagtgccaacttcaccctatcactctttctgtccactcaggagtctcctttggaaatatatctctctggagggtcttccaaacaaatcctttgaatacttccatcttgtttagcagagtattctaaaatatttgtcaaaatctgtgataataggttctggagatcatgtttcttattcttctaaatgctggtatttcaaatgaacaaataggatattaaagatctgtcctttaccaatgtcaaaatatgttctgtcaaaatttagtattgctaaagtttagacccaaagactcaccacagcctttggatctcatattttctgaggttcatggaaagatatttgacttctttgcacctcaatattttggactgccatttagagataatgagagttacttaccagacagcaatgtcatgaggaatatcctgttagtaatgatgaaacattctgaaataaaaagagtacaggtaagtgctaggtatttattttaataaatgtatgataacatggtaatcatagaaaataacccatttattcctcactttgggatactgactaagtggtagtatataaaaagtaaaggatgtttccctttgggaatggaaatagaattgtgcactaagaaagtatcttttgtaactgcctgcatgtttaactttaaggtctctaaccagttgcaaccagttatgaatgacttgctgcccatttctgcaattcactgtaacttgtgttgagaaggttatgttttatggttaattatccatggtctgtttaaaaaaataaatcaaaccactgtaaaccactaggatttgcagctccatttgagctttactgtagttttgatcaaacattttgtacataaaaacaagctggtttctctttgtttttagttgtttgttatttgtgttataaatattgtggcaatggtgggagaataagctatggattatttaccctcggtttcatgagttgtgagttattggccttatcctcctttataagtataaataaatgtataatattatattccaagtcttgtaagacaaatggaacgagtgaactgaaaccttttagacccaaaatcttttatgcgaagtcatagaacaacaaaacaaaacccaaattaacatttaaaaagcttctactgtggagcaacaaagtctttaaatattatataatctgcatttaaaaaactgctcatctaacaggcagcagtctatcattctacaagcttttcaatgcctttaacattcagaagctacaggtggttttcccaaagatcactcagcacccccaatatcactaccacaatgaaagccttgaaaatggccagcatgattactttaagccaaaatggatttagaaaaatcaggaattcgtgtagctaaaagtaatgaaacactgtataaaagaagaaccctatagaattttttttatagttaccatcctaggacttatataaacaaaagaagtccaaaaacaattgtccagagaaaatgagaaaagccaagattcaaaggaccctgtggcagagtgcatgaggagcatactcgatagctagaatcataagtatctaacacatttgcatatgaaacttaatgaggatcaccaaagtagcttgccaaaaattatgtttgttaaatcagccaacagtctatgtagcacagacccctaaaaagaacctctaggaaagatgtaaaattgtcttctgaaatttgcttcttttataaaggcagaaaggataaaaaggcctttctcataaaatgaagtgattggtccactactacagtctgaagagttctgtatcagatttcttcttaccctttattacttgtatggcttactgcttacctgcatcagcagtctgcagggttggccatagcaggtcccttacgagttcactgaaacacggaaaatatttatgatggtactattatgtgccagacacaactggatggattctgcttgaaaaggtaagtcagtaactgaggttcttgttgccacattaaaagaaaaaatctatccctactgccaacagcaataagaagagaagctagggtgaaagagttgtcaaagacttatgaaaaattcgaaactgtttaaaattctccctagcttcttttcttgcatgtccaagtaacagaaagcttaggcctgccacctgtcttaagcctggatcccatattaaaaaaataaaaaaaaacagaaaaatgagaaacagctaatgtgttcccaaggccttggttacaacagaaaatgagagccgagaagtctacattggcacacatcgagatttgaaaggtcagtcctgccctagtatggttcagagaccgtgaaaacccaccaagatgaaaatggaagctattctgacaacaagaggcagggaaaaagttcaaagacttttcctctgcttcttttataacgagatactttcaactatttttgacaatcaataaaatgcaaatctccctcacttttgtgttctaagttttttttttttaaatttaaacaacccatttgaaaattagggtactcagaataacttcttgtatacagaactacacatttaaaaagctttgtgcagattgttaatcatattaaaattacatcataaacaatgcactttacatggtgcaaatgttttatgtttttttcttttgacaatcaggcacctacatgcaaaactgcatattggaatccaaactcaactataatacatgtagaggaacccttagaaaaatgcatgtgggaatatgatatcccagttagagactagaatattctgaccaattttcattatttctctgtaataaatttatctgagctatagatcctgttaagaaaataaagctaaatggaaaagtattgataaaatacattaaatatatatatactagcttagtcattattcatattaagatcagaaaagatttccgcaagtcatcacaaatacagagatgggataataccaataatctcgatcacccagttgttaaaacagagaacctcacatttgggcaataatagttttgatttttatcttgtgcaccagatttttccatacaaaggaattctaaattgcaatagttaacacataagacagtgttaaacaaattcataactttagtaaaattaaatgaaccaatttcttatggctttaatatccagaagtaaagtatgatcttaaagaatgatgctgatctgagatacaaggagatcaagcgcttcaatagttcctcctcacacactaatgatcgcatccatcctctcttccacccacctcccaccttttctggttgtattaaaaacaatcaaaactaccaccactgctgctacccttcacacacctgaacttaatttcttctaagagatgcctaacagtgcctagggctgtgctatcactttatatccattttatgaccgcttgagaggcagaaactaaaaaggaagaccaaaacaaaacaaaaaatccctccaacctcccttatcagacaaatgcctggttcccagaggacaccagtcagttaagcaaaaccaaatattacaacagggatgaaggacttataaattgcatacaaatctcactgtgctcccacttaaggtggaaagggagttactccaatgaaagaaaagggggagggggttgtgggaaggagcgaagggctacagaaagagcgagagaaaaagagagagagaaagagagagatttattgtacatttgagacattaagaaggcagtacagtgaaaccaaaggtgttccagggagaaatgtgacagaaagctctaaatgagaattacagaaactattccttcttaaataaaactgttgtttagatgatgaattctataggaagtctgaattaactgtctctgttgtagcatctagatgttttctctttcattaagactttggagtttgaatgtactttgttaaaaaaaaaaaaaaagaagaagaaagagaaaaaaagaaaaaaaaaaaagcattagagctttatatagctcccaaagtaaaaagcaagagaaagatgggtttatataactggcttttttacataaatattacatcaggatacatttcaagtgaaaacacacaaacacacacacacccgtcttccttatactctttctattttaaaattcatttcatactttaaatgttgttggtttttcacaaaataagtaaaaacgaagtcaaaacatctcaaaataagttgccttatattacctggaaaattaacccatcatacaggtcacgatgtctcatttaaagccagttaaggtgctgacaattatgggacattttgctgcagcctagggcaactagaaagggccatggatgttaactaactcccttttaaacagtctgagaaaagggaaaaaaaactgtaagtttccccatctgttatttccttttttttttctttttggctgtggaaaagtaaaattatgcaagagcttttgaatgtaaaggctgtgtgtgctttttccctttttgtctctgtgtaccggttaagtgatgttgcgtaactgagtacagagtaggcggttagcgtttactattgatttacactatgccatctaatgaattcagaacactaaaaagaaaggagcaggagagggagggaggaaaaagagaaagggagaaatagggagaggaaaaaataggaatgaaggagaggaagaaagagcttattcagagaaacagttctaatgactggaataggttcatttttattcctatagctctgacttttggttattgttcagctctcacaaaaaaatggtcttgagctggtgaccccaatattccaatcctatttctaataaggattactggcaggtgaatgcctgaaagttctaatgtgtcaaattacttgaaaccaatttcactatactgtcagactcctccatatgcatctatttatgattctctctatgcatttgtgaatctgtatctgtgatcaccatggatttggtcctactggcttacccaatcaaaaatattatttgaaatatatcacgggaatgtcatcagggtaaagagaaatacattctattttacccatctcctttaaaaatacataaagaacacatttagaactttaaatatatcactattttactttgaaaacagacatgctacaaattgtttggctgaacaaaacagcccaatataggataataaaagagaaataggcaaaatgaggaagaacgctaaattgaggaacaatattcataaagaaatttaaataatttcttatgtctatggagagccttttacttttgtttgggtggaatgcctgtagcattctcagtctttgaatgctgctcagtgcttcccatgccatataatgaattcccaaagcgtggaccagaaagaaagggtgaagttgtttctgctgctaggtacaggtccttcctgtacctgagtgccctcctatggctgagaacaaccactaaggtgagaaagagaaagagaagttctctttagtaatcagctgaaaagctgggcagggaacttgatttctccctcaatgtgtgtttgcaaatgatgactgggaaaaatcacaggaggttatccaaaggaaagaacaagagttggggtttctagtcatccagttgtcttctcttttcagccatctgagcttagaaaatattaaacagatgcgtactctgtccacttgtcaaagatgctttaatgacccatggtggtatgcacacagttgtatacctagcacttgccatggtgcttggcacattttctatactcagcaaatatttattgaaactgaaaaatgatgatgggagaaatatctctgtagaaagaatgcactagaaaggcctgaaaaaatatattccgatgttttacaagaaatcttaggctatattgctctatcattaatctgcacacaaaataatactgtaagagaaatatcaggcagttatttaggggtcagttgacttcagttccattttattaggaaaaagcttaacaaaaattataatactgataacatcagcaaagttttgtgttcatttccaccagcccttttgggctgtctttcatttcagtcttgggcacagaaaagtctattttaatttccatggacacattctaaagaaaaagtcatgggatatcaacgtaattcatcttttaaaaaatactgagacaaatgtagccatttagtaatggaagagaatatggctttttgttgaagggcaaggcaggtggagttttgattaggttacacaaatttaaattactagaaggacaccaagaatgtactgatttccattttcttggttaaacagtttttttttggaaaaaaaaaattctggtttagaaagtcagaaatgccatctttcagttaattggagaataagacctttagaaaaagaattgcaactacaatttctcaaaaattccagcgaagattcaacttaaagcatgtttagcaatagtagccatattcttttaaaaaatggggctaccatcttgttaattctgtaggactgagcatgtagatattagtcaaaaccttcaaaaagttttttatttctctctcttggtcatctatttaatgtaatcggattcagcaacttccttcaataagcattctggcaatatgtcaacaagatcattcatttcatgattcttaaaagtggatgagaacttacctgttcttcttcattttatatatgaagattctgagactcagaattaattttctcaaaagcatatattttgaggcagagctgggactagtatctaaagctcacagttcatttttttcacagcacagactaaatcaaagttgtataaattcaatcttattttaaatgccataggggaagatttcaaaggattcttttataagacaaggaattcttacattatgtaaaatgttcacctcaaagctatcttatacttttttttatcttaaatgtgagcctactgttcaaattgttgcttctccttttccttgtcttaatttttgactctttagagtctttgcctcctgtcctctcacttgtactctgtgtctagttcatatatggcccttcctgacttcatattcttccttctctctctcttttcatctttttatcaaacttttatttattcttgttcctcacagaaataatttccttgttaatgtgatatcctcagaaactacaaaggaagaaaaagtgtaaatttagtattattataataaataggcctttggtttatatttaaaacaaaactgcaataagatattgacaaacagagtaaactacagctataggcttccctatagaaagttacagctgtctagacctccatattatcaatatgaaaacttgggggctagcatttcaaagtatctcatcaaagacagagagcaaaggctcatgatctccagaccactcattttccactacatcaggacacctttcgtttcccttttctttctttccattctacattattgatatttgagactgattacggcacagcaggaggagattcagagaaatctccttggcttaatgtggtcaaactctctcaattccaaaaaaagtcagaaagacctgcacactaaaattgtagttacacagaaaaagaactctgaggaggttaaaagagtcctctgacatgagaaagtagtctctggatagcagggacattgctgccaaaatcattgtaattaagattgggtcattgtttccattataaaccttatgcttatggggtttgtaattcagttaaaatgatcagctgtaggctgaaatgcagccccaagtatcttagagtgggaggtgtttctcccctcctatttcttaaaaaagaaaacacatagcaactatttaataatttcaatgagagttgtattctgacccttcccctacaaagggtagttaatcaatgagcttaatctagagtgagccaaggtgagcaacatccactgtggaatgaagcacattaacctggcatatgaatgggcaataaaaggatttcctattatttcataaggtttaatgtacatcactccattccactgtattgatgtgaataggctttcagcaacaccgtgttgaaaaatctcccacttctgtttgttaactcattattgtaggaaacattacaattataggagacaggaatttctgatggtttccttagatttctttcctcataagctcattcccagggtcagtattagataatcaataatttctaaaatttcttgctcctatttctttagcattgtctacaatatctgatacctatagtgtaatgctatgtgccaccatgatgtagagggattggggaggaaatcatagctatatattaaaattaacaggccagaggaaactggtatttactgagtacatactacatgacatatattccattaatattatttcatttaatacaaacctgcagtgaagtagctgtggcccatgttttatagattagcaacatagttaaagagctgttagctaacctgcgtaaggaaacagagctaatttaaaaagttgcgaagtgaggtttgaatcaagatctgtttgactcccaggcccatatgtactgcaatgcaatgcaacaccaggaacagaatatgaaaccatctaactgaaaaaaaaaagtctccatgccaatgatgagagctacctcatgctccaagtaggaggtagaaagggtaaatgactcctaaaaagagattcttgctttgctcttggctctgataaatccctgtttattcatatgcaaatatccaaatgcatatttggaaaatgttttgtcttagataagaaaatgcacaatctcctagaaacctttaaatgagaccagacatttgaatgtttacaaaaattcctttgaagatttatattaggagaaagttttaaaacataatgcataaaaaaaaatcagatgattggctaggcatggtgactatcgtcaccatgggagtcgctttgggaggctgaggtgggtgcatggcttgagcccaggagtttgagaccagcctagacaacatggtggaaccccatctctacaaaacacagtgaaaaaaaaattagcaggcatggtggcacgtgcctatagtcccagctactctggaggctgaggctgaggctgaggattgattgagcccaggagaccgaggctgcagtgagccatgatcgtgctactgcactccagtctgagcgagagaacgagaccctgtctcaaaccctccacccccaaaaatcagatgattaatacaacattaacatttcaatctggatgtgtgtgtttgtgtgtgtgtgtctatgtgcatataaacctataaatatacacatacacagatgaatttttttgtctttgtcaaaatttctggtaattattataaagtatttgacaaaagctaaacagtaaatatgttacaccaggagaaaaggaaacaaagaacaagaaaagaggagtatgtgtatgtacatacttccctcagaaatctaatcctaaaacattttttaagctaaatgggacatagtgctttagtctaaattgtgtgtgtgtgtgtgtgtgtgtgtatgtaaagataaaggacttttactatgttattttggcaagtgattatttttctaaaatctttgctgaatcgttttatgtagatatactataatactcttgaataaataaatacttgttcaagttaaccttagagctcatcaggtaaataacagaatttaaaaaagaatctgtagtctgaaacactgtagagtatgccaactttacacattacattaagtattcgttcaaaataatttataaattgaaaagtatactccattttattcaaacaatgcaattttttaaatgaatcttacacaaatttgtgtgtgtgtgtgtgtgttagagagagtgtgtgtgtgatcctcaagaccactgagtcattctttaaaaatattttaaaatcataatttggtgaagaacttaacaacaaagtaactgaagccagatttgagagaagaagaatgaacagttcttcaggaagcaccaattcattccttaacattcaataagtctttattgcttcgcccttccctcctttttttcctctagtctaaactctgatttggagcagaagttaggaggaacacgtattctggtccctcttctctcatccctgtaaggaaaagcaatggtagactaatgacagaaaaagcaattgcaacaactttggcagttttgtggtactgggaaaaagcaggctttgtatttgtacatttcaaggaatttcttcaaattttagcttctttgaatgttcctacaacaagctgaaggggagataagatctgctagggaaatagatgaggtttagagagggaaaatggagggactactttttttttattcaaatagcattcaaacacatgagcaagatataacttgcaacattaaaaagtaaattagctagctaaaaataactcacaatacccttctcactaaaacaaaataaaataaagcaaaaactcacaaccaattattttgactggtaaaaacagacagtgatatgaaagtaacagatggaagcccagttttactcacacaacacactcactaaagacaattgcaagtgtccccatgacaataacttaacaatggtcactttagcctgagatatctcctttaggtgagtttccttaaagacttcagaggggcttgtagaaaatactgtagaacgaaaccaactcatttgtctatatgtagaaataggcaagagttgcaaatcacagcctgtggacgaaagggatccaggtgtcacatttgccaaatctttttgcaagactggaatagatattcttttcttatttattttttgttgtatggcagtatttttaggagtggtgacatttctgtacttttaaaaacacaacactacacagcacctaaaaactttcctaaatcaaataattaacagtaataaatcttcctgctaatttctcctcaaagttgaaagaaaggttattttcttacctcacactgagccttctgatatgacagtgtcattcagtcaataatttcaatgtcagttactgatttctaactcttttattacaaagacttcaagcaataatgaaatggtgctgatctgcttgctttcactctatataacgtctatatttatatgcttatgcttctatttggatctatatttatctgctttatctgcctacagtgcatctgtttctcatacacacagacatatatttatatatatacacacatactgtatatatatatataggttatatataaacacacatacccacaaaaatgtatgaatgtatgctagtgagcttacttcaacaaccatgcaggtgcataaatattcaggcacatgacaaatatacaaagaacataaatgaacatgtaaacatagttacacaggaaaaagaatatcttaacaacagccctgtctgccatacttggctgttggcctttgagacttatacactgttgaatgatatgtcatagactactctgagaagcagaaaaatcttctgaaggcaaaagtatatgactaaatcaagataatgaattctaactctctcattttcgcaatgaggagtctgagatactaaggtgaacagcaaagattttacagctttctggaggcagagctggaagttttacccaagtctctgcctgctagacaaatgctctttctactactatgctgaattgaaaggatgaaaacaattttttcaaacccaatatcattattttctaattgccactctttcccatttttcccttttcttgctgtgtgaaatgtaaacaaacaacattcactcagggtcaggcactgttctaaatattctatatgtactataccatttaatctgtaaaatatctctatatagtaggtattattattcaaaatcttagtttagtgaattaaataactcactcaaagctacacagctagtaaggaaaagggctgagctcccataatactcaagacccatgtttttctcacttaactatgatgccttccctaatacatatttgtatataatactaacccttccctcaccaccacagcctgatagtcttagaaatctaatatttgatctgtttcagaacacataacaagtttaaaggttctctcagcctgaggaaaaaaaataaagggaagtagagcaggtataagttacatccctagtatgcagcacatgccctatactagagaactgaaatatgcaaaattcccccccaaaattactccaatgatagtgtgatgtgatttaaagccttaataacttccagtctatgaacattttatgtcttttgcaaaggattatggcaaactgataatatagaatcagattggaaataagaccacaagaaggcaaagggaaaatagcaaaaggaagaaagacccacacccacttcttcttcctctcttggcacaacacttccaaaaacaaacacccattaaaaacaacaaacccagtatcaaaatttggtatttttttccccactcaagtgttagagacaaattcagaaaagaaactaagtctacgtatggtaggtagttttatacaaatctcttcagatagtaaccagttgtgagccatccgaacacggaggaattttacactttggccagctaacccagaacccagcactgggagatgtcatgtggatttgtgaaactccctggggcatactgcatccataagccaaagaacagaaattatactgatccatacatgcagctcttcatctgtgccatattgataattactcttcatttgtgaattaaatcctagttataaaaacaactttcagacatttgtcacaaatggcacattttacttaactctttcataacaccatctagccacggtctataggaaatgggagctaccatactcccatataggtcatgatattataggaagaatatgatgtagagaaagagagagagagagagagacagacttgagtttgaatcccaggttttccatttattaacaataaagctgtaggcacatcacttaaatgattctgaaacctcattttcatcacctgtggaataaagaataaaaccacctattttgcaggaacgttgtgaagattagagacatcccagcacaaagaccccctcataaaagggggcattaaatattaattattgtatatttaagaagtctatttgtgtgtgactttctcttgtattaatgatacataaatctgctgggagtaacagaagatgtgaggtactttttatgcttttttaatcaaagacaaactttttggtgatcacatgtgttccatgtaaaagtggaaataaaagcatatcacagtgtaacattttcagtggacgattttaaagcacttaataacccttgactttttgtgattgctggcactctcatttaacagttgggcaaaatggggttcagagatacatcctccaaatcagtaataataataaagaaatcaccagcaggggttagtagaaagtctgtttttaacatctaaatcccacagtgtccagctaaggaataactgctgcaaggtcacagatacaaaaggccacactttccccaaagctctttgagattattcactgaggccaaaacattaggtaatgctgtgtacatctgctgagataacaagggtgagtcagggttaggtcacggtttcaggttagaggggtggggtgaagagtggctttcagatcaaatgacgagagtagtttaatttaagcaaagaacaaaccatacagtattttaagtaagaggggaaaaaaagggggtgcaactacagccaagagaaggtgggtgggaatatagaccctgtgggggtcaaatgggtaactgtggctcaaagaggaaacccacccacattcacacacactgaaaagcgaacaaaaagcccagggtgcagcataaatcctgctatcccaataacacacacagatgttccaccattgttttcttttatgcacattttaattaagagatcagaatcaagcattaaaatgttattaaatggcttgtttacatttttgctatatgtcatttataatgcattttctaaatgtgtgtatatctattcggaaggactatttggaatttttacatcagtgctacaattgtcccactaactcacagtcatttttgctaaccaaatatgtgtcagaaatccttttcagtttaagcaactggacaggagctctcactctttaattctcagtcaagcaattccctacccccaatcacacctcctttaagcatgacaaagtccaccacagtacttcaagacaataggaaggcccaggtacactggcaacctttctgatttttcacaagagtcccagtttcaaatattctcccattgtgctcacaagaaaatagtcttcatatacatgcccgaccctttccctagaacagttttgaaaatgtcgggaactcaaagctaccacatgaaggaccctgacctatgagtgtcccctggaggggacacagtggaagaagcgggaactagtagatttttttttcctccccacaatccatcttctatttgcagtctacaacttatccctatttgcctgggcaggaatttgagttctctatattattctggagttaaaacaggtatgcctttcccgtctctcagattccacagatatcatgactgatgcacacaatccacctgcatatgtggatcacaagtatcctgtagtctgctggcaccatataacttaattacttttaaccacagggcattgtcctagaagcccactatttatattgtaccttatcaatcatggtacttggaattgcaaagtctcagaaagcaggaatcatatctcctccacgttcagttcaatgcctaatgcattgtgagtgttcagttaggacaagcaagagaggtaaggttttttctttctttttgttatttgtttgttatccaggataagcagaatgcttgtacagaacatgcataagaaagaaacgcaatctaatctcactgtcaatttatattctgtaaactgtctcatttgcagcataaatgactacaaaaatgttttggttactctaagtgttaaccttaaggtaagagttaaattaagtctgctataactggtggaccagaaaggactcagagaaaagcaacagcatggctttgaatcaaatcacttttggaagaaaactttaagatgttaccaccgaaaaaataaaactggcaaaatgctctggagggcatcttagcaatatgcatcaaaaatttaaaaaatatatgaagactgttgacccagaaatctcacctctaggaatgtatctaaaggaattactcaaagatctacacaaagatttagaagcaagaatgtttaccatggcattatttataattgtgaaagactggtaaccttgtctgacaatagagagttgattaaataaatgacagtacattcctagacttaaatactatgcagtttaagaaatcatattttagataccacttaattacatgaagaaatgtttttggaatactgttaagtgaaaaggcatataaccaacaatatatgtacaggaaaatatattgtttaagtaaatattgctaagttaaatattgttaacttaaatattgtttaagaagtgatagttgtgtacacacaaagtgcaaaaagaccagaaaacactagaagtgcttgtttctgggtagagaaattataaataatttttgtttatttgaacttttccataataaaagcacatttatttcatagtaaaatattacttaaaatattcatctataccaaccttccttctctaaaggcctaaaagtgaccctctgtaggcactcttttgtctctagaagtcttccttctcctgtttttatagatgtatgtgttgcattctaaaatcttaagtatttgggactatgtagttataaaagataccctaccaattaaacaaataaaaaatcttattaaatctgtggttttaatcttaggttcctgcttagaaaaaataccaatttctctttaagtcctatattttgctttcaattcagcctccatagtattaattagttatattatttaggcctgcagcagaacagtttcatagttcttctcattctcacagttctttgtaagagacaccacccctctcatggttcttactcacccctacacccacaattgaccataggtaattgtgcaagagaccacaaatagaaagaaaatgaaggaagccttaaaaggccaaggtagttccaagttataaaacagagaaaggctgaaaatttaggcagagatgtggagaaaatccgagccatgacacttaagaatgaactggagtaaagatccatgagcacctggtgcagggagagacaactctacctatcaatccagtacatgctactcacacaggactattaattctagtaaataaccacagctttaggaggggcaaatgttctggaataggctgcctgttgaaaatacaagtgctagggcctttccataacctataatcaggacttccagaagtaatatccaggcatcttcattgaaagctccaaatgtgattctgaattatactagaggtgagaaccaatgggctactggggaagttcaaatcccttagctctagccaacttttataaattcatctcccttaacttcacaaacatatacactctgctgatgctagaccggtgtccttgttctccatccttgctccgtcataaagagaaagctagtttatgtctttgtacaatctacttatgactttatatcttgaatgccctgactgctccttactacctgtttaaatcttcactaattccaacaatgggttagagtttcaccttcctatgaattcacattgatttttcctacacattaaactacagaatctgtgtcttcccctatttctactcttacatcaatatgaaacaataatttgtttgtcttacaactcaatatgatcataaaccatatgtgcccttagaaagtgttcacatggttttgttggtacctctttgcaatgtatatcagggaattttaaaaaatagcagactgaattgagaccagtacttgcatgttcatcatcatataatatgggacatgtatatttacctccaaacattctcagagttcattcttcgtaccctgtaggcttatgctgtaaagaaaatacatatgcagaaataaaaacagagtttgaatctccagtcctaatccttcctctgaactcctgtctcatgtatccaactgcctactacatctctttatttggaaaagaatttcaaattcaacattctccaatactaactcataatcatctctttcccaaatctgctcatttctccatatcccctatagctcccaactccatgggatattgccatttatccagtggctggggtgaaatgcctgaaattcatcacacctgatgtctctctcatgtaaaaccacattgagaccctcagcaacttttgtcagccctaccttcaagttatgcagagttgaaccacttttcatcccctccccactgccattgccctttgcataactgggctactatgataactactacatgctcttcctgtatcaccctgaccctgtagactgttctccacagtgtagccctggaactcttttaatatgtaaatgagatcatacatgcttaaaaaaatcctctatagctttctgtcagtctttatcatggcctgtgtgagctggtccctacttatctacatgatcattcttactttggtccacttgagccacacatttcttcttgctcttcctggaaaatttcaagttgttcctactccaaagtctttacaatatccatcccctttccctaaaatgttcttcctgctggtcaccacatgcttaggttcttctaataatttaaatatttgctcaaatatcttccactcggtgagacctttcctacttaccctatttcaaatagcactttctaaattatatatccctattttctacctccttattatgcattattttcttcctagatctgatcattatttaaaatgatttttttttgtttacataattattggctgtctctccttccactataaaataagtttcataggaaactttgtttaatttctcactatattcccagtaattagaacaatgtctgaaacattataggtacttgatagctattaaatgactgaatgaataagtagatgaataaagtgttccagtacttataaatctcatcccagtcacataaactttaaataggaaatctttattctgcatggtgcagcggcttctctggattgtcccagaggcctctattctttccatctgactgcacaggccagtctgggaaaccacctacatgcaatagctcacatgtcttataataaacttcttgggaggagtaagtcaaattagatagttaactaaaaatagtatctctgagtttataaaggagacgttttcccagcccaactggtcctggtaagttagactggcatcaaatgctgacatggcaatcttatgcttgatgaaccctcaatctggagaggagtgagctatacttttatactatttattttgtgaaagttccaagtatagttcatctttgtatccacaatgtcaagaacattgctgagcagagagtagagcttcaataaatgtttattaaacagatgaacaaactaatccatgaagcaaacaacattctaagtgctattcttctatgtctaagctttgacgatgcgctatataaaattcattcttgcaattttccttcatagattagactgaaaaactcatcgtgaaggaccatgtcttatccatcttgtatcccaagttcttagtacagtgctggatgtaaaaggaagaaaaactccaaagcaaaggatagagaagttagaagtcctggcagcgatcagtgagtattaaagaatgccagtatgacgtgattatcagatgttaggtgatgaaaatcatgccagctaacatatggatttctaccctgtttctgtataagacttgagctctaaatttagttcctgaacacaggggatcagagttgaaggtgattatttactatgaaactgctattttccacagtatacatgatcaaagtgctagaaacttaatgcatgaaaatctacacttctttactcaacctctcttacagttatataaaattctttagaaaattaatgttataaaaaagagttcaggccgggcgcggtggctcacacctgtaatcccagcactttgggaggctgaggcgggctgatcacctgaggtcgggagtttgagaccagtctgaccaacacagagaaacctcatctctactaaaaattaaaaaaaattagccgggtgtggtggcgcatgcctgtaatcccagctactcgggaagctgaggcaggagaatcccttgaacccgggaggcggaggttgtggtgagccgagatcgtgccattgcactccagcctgagcaacaagagtgaaactccatctcgaaaaaaaaaaaaaaaaagagttcagtttgttcactaaagggctcaatttgttcactacataaaaggatatagcagtttgttcacgaaatcaaagccttttcaaatataataagcaatagaagaggtgacaaaatatataatgtaactattaaatcagtatgccttacaagtatccatcatggttatagtactaattgccttggtttgtccaagactgaggagggatgtgagcttttccgtgttcaaacagagaaagctccaggctagtcaggacaagttggtcaccctaataatggtataacctgctaagctggttatcagctattccgatgtatctatatgtaggatctataggtacatgtagaatatatgatagataactaggcattactaggttataagatgattaagaattaatcagtctgtactagtataccatatgaagtgcaaatcccttgtttcattttctcttcatttcccctcgatgttggacttcttatgtttttatatcgtatgcttatattgattttattatagtcaaatacattaatttggggtgttaggacaatttcattttcttcagaagaaaaggaaaagtgagtagcagcaatgcagatgggtctcaattgacgcatgagctcatctgttttttacaactccaagtgtggtaattccccgtagaattaaaatttcctaacacagaaattaaaattttcctagctgaaaatgccggctttttacatatcccaaaactgaacacataaagattaaactccaaaagtaaggcaagatctacagaactatcccagccctaattctgccgagatatttattataagacaaactgagacagtcccctgtggtctccttaaggtcctgatggccccctcaaagcatcatctggctttaagagaactccaaaatagtaattggtctttgggcacagaatagccattggaatctggattagagtctgaaaaacactgcattttccaaagagattacaatgccaggctttgaacattgaagggtaatatcttctttctaagtatctctggtcagtctcagtaactagacctacttttgaggctccatttcttttatgtcttttaaatttaatgataaaaaagaaatatctaaatttataatatacacgaaacagtgaaattaggagaaaaaattctatttgatgtgtccatttttttaagctcccatgactaaaaagatcaacagttacctacatttgtaatatttatgcctcccaggctcagtgtaatgagtttcatctctgatcgaatttttataactgactttcacttacctgtgaaataggtaataggaagccttggtaggtgctttccctaaagaatcagatgcaaaagttagacctactgcaaacaatacagaggaaaaaaatgtcactctaatatactactactatatccgtctgctttttgcaggaaaggaaagctatcatcctagacagaaatactgaaataagtgaagtacagacaagtgattaatcaaaatctgaaaatcatagtcttcagctttttcttccatgaaaccatggtgtgtcctcttaactttggccaagtgcccagctaagagaattcttccatgagatgaacatgcttcagggcaaaaccttattctaactgatggttttaaaagcccaactctacattctgctcaaggctttggttacgtaggtaagccaaaacacaggagacatgacttcctccattaaactggctgaagcccaggttacactaattgagcctaaatagaaaacctctgcttttcaatccctttgttctcttggatgtcacagcttcctgctctattcgcttccttttatagtcttctctcaccaagcatttcaggaaaaaaaaaaaaaagctaaataaagatcacagcctgttccattgtgtccccttcttcttcatcatcttcttttccatgtgtgcaatgttgtggcacctattaactaccaatgttttcagaatgacattatacaaggtgcaggctgtaccactgtgccctaaaaatatcaacaactgcattagtctcacaataattaatggcaggcattatgcaaatgacaactttttcgctgcaaaataatgacatttcttcattttgagcagagttatgcaaaacaatgaatttaggatgataaatcacacaggagaattaagaaagccataacgttcctgcccaggcaggcagaaagatagacagaccaacaatttagaagacattgttttgttctcacaccactataaaaaatcatagccagtcggccattaatgtgtgtaggtttttttccttctcccctttaggcaacaatgcataaggggatgctaaattctagcaattggatcattacaagtcacaagcaaatttttctttattaaccttaataagtcattcactcagagactatagtcatcaagcaaataaaaagtatcacatgccattctgctacacattaactaattccttatgcaaacatcacaacatatagcaattactgccgctcaaaaaaacaaagtcattttcaatttattttattgcttttatacttggccatttcctgtagcacattatcgtttctttccctaacaacccgaggtggaatgaagaagaatttcggtagcaatgagccccttcctctagccacctttgtcatacctttttcccctccgggaggcttttaaggaaggttagggataaggtatgtgcacgctccttcacaggaaatgtgcatcaagctcagagaaatggtacattcagctcctattcttgcagcaaagagagtgtggggtaggcagtaagacccaagtctgtctcccacatttgctacaataacactgacagctttcctttattcagtaaaacaaggtaaaagtgtaggcttagacctgtccccaacaggtgaacgttaaagtcaatatatgcaacgttgacctgagagatatagtaatggttaatgagaattatgaggttacttcgtcttgcttcactcagcacataacttgtcccttccagaatgctgaatgaagagcaataataaatactggacactaccccacaacatgcacagtattaaataagatctttgtgtgtgtgtgtttttaattctataacatcctttatccaagactcccaggatgtgaaacaaatgctaaacaaagcttacacattgctaacagattcttttagcccattttacagactgacaaatggattctgagcaactagaggctttacacaaagttggactggaacaggtcagactatctttccaatgttctaacctctgaggcccgtggcctcttataatcatgagcattctttcctgctgataaacaattatgctgtaaacagcctgtacatgtcccttttcacacaacaggatgataatctctctccgttctcctaaatccacaatccattcccccctttttaaggtagaacatttccgaaatacacacgggaaaagctctgttttcagtttctcctcctgaaggtaataacattttgcagttctccttaaataaaatccagcccatgctggatcaataagaatgatgcccatttccctaatggcagccgattgccatttgctattcaaatcagactagataaattacagtacatgccagggaacaggccagtgaattaagacaggcctccagaggaccagcgatattattaatcttttaagacactatcatatttcttcttgacagtgtgcgtagactcacagacacactgcacccagattgaaatatcagctgctgaaaaaaatcaatagtgttagaaacacaataatttttggtctgcagggtctacactaagcaacacttgtacccctcctgtgccatctcttctcccacttcccctttgccatatttgcctcctacctttttgctcttcccttttcattctctggttttaaaagcttgtaagtccaaatgacaagatattatgagaaggtttccactgctaacactggccattgtggttacagcgttgatttttcatgggttgtttgaaatgcaattttactagtctggcaaaatgttttggcgtgggattgtttttcctatgaacttaatatagattttcaacccttatgcacttggttctgtattatgaagaaatgaaaatatttataggggtggccatacctgaaagttctgaggaaagtggaatgcacagaagggaaaataatggaaacctggcccagaaatgaaaaaaagtggggggtattcattgaagatccaggagaataaacaaaacaaaacaaaacaaaacaaaaggctacaggggaggtgtatgtagagcagaacatggtaggaagaatattctacttagattctgaaaacttgaagttgacctctgcctctgctgcctgcacactgtgtggttttgccagttacttacccttgcagagccttggtttccttttccattaaaacaaaacaatctaaccacctacctcatagcattcttgtgagggctaactaacaagatgtgtgtgttttctaaataataaaattgtgaatgatataaactaatttctactagagagaggtttatgaaatgtgtctgcttttttcctttttcatagatacagaataccataaaggaactttagacgttatcaataaataagcaaactgatagccacagaaaggttattgaggttcacattaccagtagctagtagaactttaagtagaccaagatctgttgaatctgagccagtcccttttacattttaccagatggattttaccttttccatgtctctttctactagagatttgaggctttgattcttgtccatgttgcttttccactggggaggcagataaacaaaatgccacataagaaaacaaaaacagaaacaaaacctaccatgtttgtgtatatttatatgctattcttttgatcccaagactccctccagttcaccccccattttgattcttcctttcataacaaaatgtattagaaaaattgtccgtattagttattaccgtatcttcactttctattcttttcttaatctattccaatcaggcttttatccgttccactctaccatatctactgttgccaaatgcaatggtcacattttaattttcatctgactcaacttcttgcaacaatttaacacggataaccgcttcttttcctcctcgaaactgtaatatcttttgggatacccctcttttcaactttctctactatcttacagggcacttaagcctatttaagcctcatcaaatttgaaatctgttactagcaattcattcttatttctgaattgggataaacacagtatatttggaaaaacagtggactgtcagatgttttgatggtctgattttatgactttgatatacaaaaaagagtagaaaatcttattcttggtttggcttgaagcttttttattccacatacctcatggcaaaatttatgaactacttttgaaaattcataagtgatcatttacctagatccacttaattgctccacccagtttcttcaaacacttgttctttgaggtctacatggcaagaagtaaatacgaaaaccatttccaagtgaactaaagtaacctgaatatgttttctgtgttaggttgttccccctacccacagcaaaagcatgaagacttcctttaagaatacaagatatattctaagtctaccagtactccatcttctgatgtcagatggagttaaagttcactttcatctcaagagaaaaaacagtcattcctgacttacaaacatgagtggagggaagtacctgaacacagggattgctttcctcacatctggctctaagatacaaccacgcgctgtgacatataaaaaggtcactgacacgagaaaatatcgcaagatattacaaggataatcaaagccaaaatatatccaaacccacttttggagagaatcccaataacttcttttgaatgtgataataaaaataacatgaataaagatcattttcttaagaaaaaaaaggaacgtttctatcacttgcctgccacttgccacttaggagtagactctggctcccttttccgcttaaattcttccacagagtcagcttgccagactcttaaccaaggtttttcttttatctagactataacaaatactccattttgggtcatgagaacatagtagcaaaattcccagagttaatactttaattatacacatatgtatttattattttgtatgtgtgtgagctgttccactaagttaaactttaaccatattaatccaggaaaaaaatccctgattatcaactaacaattttgtaaacagttatctcacaggttaaatattaactcgaaaaatttaactcaaaactccacacaagcagaaggagccaaaaggccaggaagaagaagtaaagattagctgctttaggaggaacacagccaggaaagtgagcattttggtagctggataatgtgtaggaagtccagggggttgtgcaggggggggaaatagaagcaagaagggagcctggaggacacctgctgcttatcataatatcaaaacataaaacaatgaggtgagaccttaaggaaaagaaaattcatggagatatgaatccattgataatggccacaggaattcaggtgcaataaaggtttgaacctcaatgatatggacatagctaaaagatccaacacaaagctagctggagcggactgcctgcctgccactgaatatcatgaggaacattctggggtccctcttccactagaaataatgggatgaaggctgctctgcctgtcctgtttctgtttcctaacaataaaacaaaactgaagtgtctccctccagtattgggttattaggggcaccgattgcaagttctaagcctttatctaactgtccatcaattctctccctgattaacagaaccatatcacgtaagaaaaagttggaaccagcagtagactaagtcagaaggcttttctgtaccggaattgctgaactacaaatattgttctctggttaggattttgactaaaaaatgtcaagaaaatccacatggccagagaattcgcacaatcttgatatctgaggtacagggtaaagctgatgtattttaatgctgttttaggaaggttagaaactgttaagattcttcctgtcagtatgtcaaatatcagatcagtcctgcttgctgatttttaaggaagtcattaaaaaaatcctcccagtgagtagctttcaaggaagactcccatttgcccggcagatctaaagaaataatgaggccaaataatgcaagtttctcaagagaggtgtaggattgaatgaaaaaagggaagatatagaaatgtaggagaaataattcttacatatataatatatataatgtatatatgtatatattgtgtataatatgtatatattgtttatattcaagaaatatgatatagcttatcatatattacttttgatatttttcttatacatctagtacatgaatacatgcttattggaaaagtacaagtacaaggtgtagtctctattatctaaatatattatttaaatatatatctaaatatattatctaaatatagatgacacctcgtacttgtaaagctttttgcagtttataaaatatttttgcataaaatatcttttgctttcctgacaaccacaaaaagtaaaaagggtgggttctataatttctgttctatagacatgcaagtattactctaccattgacgtaactggtgcagaataaacctgaacagaggaaatagaatccattagtagcctggttatccatatccacatgccaagtaagaaagcagcatgatgactgtggaaatgtaaaggcattataagagtgatttttggagaggattaaggagggagacatcaaaataattcaaaaggaagtttagaaaatcagtagaaataaagggctaaatttggagtaacttttttggaaaaaaagtgtttagaacaaggaaagaaacttccaattcagaccatgtattcatttggcatatactaattgtatatctatgtttgattttctttgatagatgctattgggtaaataatgatgtgtatggagacactgacctgtgcctgacatatttaatatctatttgttgggataatgcccagaaggaattattatgcaataaaattcagatattcagaataggggtttagagagaaaatcatcactgatatgtaggctgacaaaggaaagcttcagtatgatgaacaaatctagttatactttgaaaaacatgtaagatttgggaggtgataagacatttcaagttgtgtgaagggcatgagagaaagcatggaagcagaaaattgagatatgtatttgggagcagcaaataaacaagttagttggaattgtaataggaaacaatgctggaaagatgggttgagtgtggaatgcgaaacggggtccttgaataatgggctgagtagtccactttattctgtgaacacaagaggtctattaaaggcttgtaaagtaggacactggcatggtcacagtgatattctagtataaataattgggaatggtggacagaaaaaactgaaacagggagagcataaaggtaatgagagagaaagagagagagtgcgagcttgtgagagcaagagaatgagaagtgatccactgcaacaacccaggtactatgtgataaatatctgacttcggtagtgtcagcagaaatgtacaggaaataacatgttctagagacattgtggaggaaaaaataacaatatttactaaagttctactctgtgccaggcaccgaactatgtgctttatgtagattaacccattaatctccatgctaaccctaagaggtaagtaactttattgtttccattttacagataaggattaagcaactttttcaaggttatgcagttagtaagtggtgaagcctggattcaaacccaggcaatctgactccagagcctgttctcctaacccccacacttactgtttttcctaggtacaagggatcttttggtggattatatatgacaagatttgatataatttgatgactgactacatatgagcaataaattcgtgggattcttgggattctcaattctgagatttttgggttatattatgaataaaaagaaggaaataaagaagatcttcttgacttcacattgtacatttgttcctaatggtccaattgctttttggacttaaagtatcaatttacaataaaagccacagaagcaactgaaccaccaaaccggaaagctctttgaaaatgattcttctttctagtttcactaatgtatatctggagtatagcacagttcttcgcatataggggatgcccaacaataacatgatgaatgagtcaactggagaagtattaattgtaataagtgagaataagggagtggagggtgtaaaagtcaaaagagtatgacccagagtcagacaaatattggttcatatcctggctcagggccctttctaactacatgacatacagaaagttactttaaacattttgtgtaatatggggtaataattcataggaaagctagctaccttactggattcagtggttttatataaaggcaatgggtgtatgcaaacctagtaaggaatgctcccaaaggctgttacctctgacagaagaaaatctgcaacccctttctctttgtttaacttacaaaaccacatgaagacctaagaaaaaaaatctgccaaataaattccagttacaaaaggaaaataaattattttgaaagtaaaaactataatttcaactgaagaagagattttaattgcagggagatagatcagttgaatggtttaacttggacttgagaaatcagtagcagccagtgggatacatattaaagaaaaaaacaagtttaattacccttaagattttatacagcttggctcttccctcccacacctagtctgcttccatcaggtcagactccttttcaatcacactctcttccatccttttctcagttgctgtcatgacaagccaatgagagaatgacataccgatgaaaacaaggtttgagtaattactgcactgtggctggttgttgtctgggcatcattttatttcttccaatcaaacaggtccttggacttcacagctctgtttcaggtgggggtgatgctgattatattatgacattatagcaaagacaggcagatcagatgaagtgaatttcactcagtaattaaactgcagtttctttcgtctaaagtccagggcaggattaatcgaaacgtagctctttatcattcctattaatgctgggatttgaagagtgagctctgatttgatagctagccctgaatctggctgactggtgtccccaaatctgtctaacttgcaaaaataatatcagatcaagatacatttgcaaggttatacccttcccttttattttacttttttttttgataaggaaatgcaaatagattcaaatatgctgccatttccactaccttgttttctattacaaaaatgtctgtgaaaaaaatcaggtccttccaaaccccacagcattttacaaatggttttccataattccacttaacaccatgctctaatggcttctaattttgtgacttttcattatctgagactcaatatgaatatttggatggcccaagcgacagcttttcagaggctcaaaggttctacttttattttaaaggactcattctgggacttatatagagattttgtttcattcaatcactcttgtaatgcatatgatatcaccaaattctttaacaagtatgagttggatcactgattctcaatcctgggtgtccatagaaggacctgtgaagctctgtaaaaaatcagcctccagcctccactccaggccacactcacagatcggaatctctaggttttagacacaagattttatatattcttgaactccataagtgatttgaatgtgcagctagagttgaggaccagagtcagccacacagtgtattagctgtatttgcaaaatatttattaaaacaagccattgttcagagaaattagcctcacattattgtgagagatctctcaataaaataataaaaagcttattccagtagcctttgcatagaaaaagatatacttgggtttctttccttcttttcttttttttttcttagacggagtctcactcttttgcccaggcaggactgcagtggcgctatcttggctcactacaagctccgcctcccgggttcacgccattctccttcctcagcctcccgagtagctgggactacaggcgcccaccaccgagcccggctaatttttttttttgtatttttagtagagacggggtttcaccgtgttagccaggatggtctcgatctcctgacctcatgatccgcccacctcggcctcccaaagtgctgggattacaggtgtgagccaccgctcggcctcccaaagatatacttgggtttcttaagggaagtagaggaaaaggaagactgtaaaaacagacaggtaactgttgatggggcttccattgttctctctgataacattgaaggtgatggtttactgattgagctcatcacatggtaacactatagctaccaaccatataatttaagatgacagttgactaacatcatagaatctcagagtttggacataaacttggaattagctgtcatctattttaaccccttctctattcagctgcctttttagaaagagaggcagaatttagaagactttatttcaaattctgttttcagttctgtttcagagtttaagaatacacgttctagggtcaaactgaattcaactactagttgggtggcctagatatttacttctctaagccttaattatcccttctttaaaatgcggcccagaatatgtatctcaaagagctatttaggttttatattaattaatttagataattaactagaatgcctggcacacaaaagtatcagaactcaataaattaagtctattgaaggaaattgcaatagtcacttttaaggttgtcactgagactctatgcttaacaactatcagtttggtgactcacagatcagttttctggaagatttgatttgccaaagaaaaagagagtgagtccaaataggaatggctttcacatttaattgagccataaaataaaatacattttattaaataaattttataaaatacaattttattttaatgatcacctggaaatgatcattaaaaatgcaaatttctgggctccaatcccagagattctgattcagtttgtaggagtggagtctaggaaccatccaggtgattctgactcagggtcaagggtcttcactttaataaagacagttataaaggaatataaattagccaagcatttatcccccaaataactacagtgtggcttgacctggaagagaccatgctttctattccttaagtcagaattcagttagatgagtttaaaccatgtgcaaatacaaaatgtttatagagtatatttatgcacacagagttaaaaaatctatttctcttcaattaaatatgccttctcaacaattatcatttagccactaacattatcttcatctcttttcatcactactgggtacatgtaagtatacagacaagggtcagatttgctatcgactcatccattttcttcttacaaaataataaacaggtttcataaaattggtaaattccttgaataaacaaaagcagctatttcctcctctaaatgcattgtagaataaagtattttcaaaacgcattaatcgaaattgataatgaaagtcaatatataattgtgagttgaatattttaaatgcaattgattacttcgctaaaatgaatatactcaacttacacatggagactgttctggatctaaggagaaatttaaacattttcattcccaatcagcgaaatcccagaaatgtgtttagagtttctaatacaatataccaacaaatgtgcattaactctctatattctaaaagttattgtgtaacaaataacaggagaattatggtctctaattgcagttgaacataaaattgagctggggagaaaataaggcatcaacatgagaaaagtttttcagcattatacaacaatataggctagtggccaagtgtaaggctgaaggagaatctttttagtacatactgtgtgaggcagggtaagctaccgaagatctgcaaaagtcaggcacagtaactcactgagggggttgtggtgaccacagtgggtactgaataaatgtaacctattatttattataatagttgacagtttattttagtaacacaagatatatcacagataagactatgtaaccggtaaaaggtgaatggtacaggcactgagagttacagggagccaaaactgagagaatgctggcatgactggtaagggttttgtgaggaagagacatttgaatggataatgcaggagagagaggatttggctagacagaggaacaaagatcattttagacagggtggggtgttttgatatgaatcgcaggtcaaagttaaaaagtgtttaacgactgttaaaaaaaacagtttaggatgaagccataaagataaatttgaagtagaacaacagagggttctggattccaaaaatcacttgtagtttctggtagaatttttaattgtcaaaatattttctcagtggaattcaatatctctttagatcagtggttctcaaattttagtatgcatcagaattacctgaagtgcttgttcaaatacaaattgctgtgttccacctcaaagtttcttattcagtaggggaaagtgaggcctaagaatctgcatttctaacatattcctaggtaatgctaatgctgctggtcacttggagaaccactgctttagaagacagtgagataggccgggcgcggtggctcatgcctgtaatcccagcactttgggaggccaaggtgggcggatcacgaggtcaggaaatcatgatcatcctggctaacatggtgaaaccccgtctctactaaaaatacaaaaatttagccaggcatggtggcaggcacctgtagtccccgctgctcaggaggctgaggcaggataattgcttgaacctgggaggcagaggttatagtgagccgagattgtgccactgcactccagcctgggcaagagagagagactccatcacaaaaaaaaaaaaaaaaaaaaaaaaaaaagtcagtgagataagagaagagttggatgaagagtttcatggataagaaagagttggacgactatttcctaaagtcaccatataatggaatagccctctttatttcctataaaatttcaccctccctttcataccaacacatagagaaacctacatgaagattacctagggatcaaaattcttctttggctttctaatccctctattgggttcaggtccttaactgtgggaatgaagaggcccatgatcaaaaggagcccaggcccaccaacctggaaacttgaagacaacttaatcactattaaggatattcaagaattcaaaataacagacccaagagactaaagaaagaaggtggaatttttattccaaaaagcctctgtcagtttcatgttgaacattttgtacttgggctgcacttaactgcctgccccttaatccacaaactaatatcatctcaccttggttcacctttttcttttcttcaaaaggcagtcagaagcaagcaggggcaatgagaactttctacctaggcatgggccactgtttaagcatctccaccttctgcttcaaaatctttctccaaaacaaacttccactatgtggtaactatactgtaagaaatcatttaaaaggcagaaagaggaaatgaaatgctctgagagactattttctcatgcataacttcgagggcagtatctcacaagtcagtactttatttttgatggcagacaaaaaacatgttgtgtttgaagattcatgtagaaatctttgtgaaaaaaggtcaaaattggatttaaaatgttcaaaactccaaaaatctctaaagaacaggagcttgtttattttctagcaatttatctttccttaaaataagaagctatataattacaaagtataattaataataataacaataattaccacaaatacaacagaaataatgatagtaagcaccatgggcccagatccccatagttacaaaggataagaatttgtctcagtatatttgagaacagacagcagcccaataatacaggaaaaaaaaattggaaaggaaataatctttcttgtgctccctggaaaataccacagaaaaatagacaatcaaatttaatacctgttgttaaatatcttcattgtacagattaggtcaggcaatttaaatagacaacaacatgaggcctctaatgtctcttaggaaacagtttcaatgtaaattcctaggaggtcccaattcaatttctagttaagcatccccatccactcgtaacactcataagaaggagaaatgcatttgtatggtgttttacagtttataaattattctcacaaacgtgttatttgattgtctcaaaaatcctgtggggtaggtaagtagagaaagtattaatagtatacccattagaaggtgaaagaattaaggatcagagaaaaaggacataaattaatctttattaaatatccacattgggtcaaactgtgcagacctggaaagaagtccaaataaagttttacataacatggataggcttggagaatttgttaactgcccaaagtaaaaaaatggaagagctagaacttgaatgcagataatgcagctcaagatgtaatggtctttccatcagaccatagactaaactctcagttgtaaccatcgtctagttacagtaactgcccctctcaagaggaggctatttcattgccaagaaataaaaccgtgaatagtggtcaggttttctgtttttagttagactgaaagaaagcacatactccttgagaagacgtgcatctttttaacatgacttagtctgtcaagagaataagagagagaatgtgttatttcattcatgtagaatactgacttttaaaagtcactcaatttctctaatgatcagtgatgttgagctttttctcttaggtttgttggctgcatgtatgtcttcttttgagaagtgtcttttcatgtcctcaggggagggcagtgtgggggcagagagaatcaagaaaaatagataatgcatgcggagcttaatacctaggtgacaggttgataggtgcagcaaaccaccatggcacatgtttacctctgtaacaaacctgcacatcctgcacatgtgcccaagaacttaaaattaaaaaaataaaaaataaaaaaactgactccagctacccatggacacaagagacaacacggtcccatttgtcaccaaaatagacaacacagtcccatttttcactaacatactctttgcaagaaagataaactaaaagactatccaacattaatagctagattctggcatagtctcagcttaaactattagtttctaaataagaggcaatacatatgcatagtaaaatagagaataacagcaatggatgtattaacaaaatgcattttccattaattgttatgaattaaaaagtctcgaagctatagatcgagactttgaaacttctggaacaaattaacctatctctttttatttttactttatgcatgcatttacttgtgtagttggtgttgctatgttttcttaaatttgtttttaagataattatattctccctctacttttatacatatatcttctgaggcatttaaaggtttgacaaagcagtgtcttctcacaagagacagaggtttcacttagaagccatcttgggaatttgggctgcagaaatcaagggaggtctagtacgtaagtaaatattagtgcaataatattaaatttttgaatactaaaggaaaacatttattgaaagaaaattgctttatatccttaacaactaccttgctatcgaggatttttagagaattgcagaatttcagagttgatgctatatgtaggattttcttttcttttaattttttttttagagacagggtttcactctgtcacccaagctggagtgcggtggcatgaccatagctcactacagcctcaaactcctgggctcaaacaatcctcccatcttagcctcatgagtagctgggatcacacatccggctaattttttttttttttttttttttgtatagacagggttttgcttgggggcccaagcttgtctcaaactcctgtcttcaagtgatcctccctccttggcctcccaaggtgctgggattacaggtgtgagctactgtgtctggccccaaagattttatttttataatgacagaatatcagtgttagcagagtccattaaaattatatatgacaatcatctgtttaacccatttatgccaaatgttgcaattttgtgtgtgtgtgtgtgtgtatgtgtgaaaaatcagaacttggtgatgaccttgagcaacaggatatacataactgccacaagcttagcattccaatagtggaacactaggcataaatgggttatggcttcagtatcctgcaaaatatccctgtaaggtagctgtctatgcttaaacaccttggtcttaggaaactaggatttgtggatattaggcaatgttatgggctgattgtgtcccctaaaatacatagggtgaagccctaagctcctaccaactgtatttggagataaggcctttgaagaagtaattaaggtttaatgaggtcataaggttggcactctaatccactaggactggcgtccttataaggacaggaagagacatcagaggttctcttgagctcacaaagaaaaggctgtgtaaggacacagcagcagaaggctatctgcagccaaagacagaggcctcaggaaaaaccaaacctgatgacacctcagtattggacttctagcctccagagttgtgagaaaccaatttctgtttgctagtccacccaccttgtggtattttgttatggtaggcctacagactgatatggtgcctgtatcagtgcctatatggtgcctatctcatcacaacctgtaaggaaggaattacttaaagccaatttataggtatagaaacagactatggaacattcaagaaatgtcccaagagacaaggattcaataagtggcataactgagatttaatctaggtctatcttccatattattttttaccctcctattttttacctttgaacacagaaggctgctacaaagttagtgtttcatattgacttgagtattttattcttgtaggtttcatcactggctgatggtctatttgttggagtaacagaaagcaacataatttatcttttagatgactgtcattcatatacttgaagatagttattacattccttcctcctgaatttcctgttaatcccggttcccttaaccattgctcatatcacatgtttcagttccctaccattctggccacttatacctgaagatgttcctatctatttaaatttcttgtactgggttggaaagtcatatctctgctacgtcattcatgactagtctttttaaaatataaaggcaatatcttgcatttatccatttagaaaatttcatctgttagatgtagcccataattccagtctttcaatgtctttggaattcgattacttcattcaacaacttttctatgtatctggactcatgtcatctgcaaatctaatgaatatgttttcattccagttattgaaaaaaacttgtgaccaagataaggccgaaaatatccttgcaatatgccacaggaatcccctatattatgatattgagccatttgtttgtacctaatagtgtggtcaatcaaccagttactaatccagctgtacctacattagttactaatccagctgtacctagattagtaactaacccggctgtacctagattagtaactaacccggctgtacctagattagtaactaacccggctgtacctagattagtaactaatccggctgtgcctagattagtaactaatccggctgtgcctagattagtaactaatccggctgtgcctagtttagtaactaatccggctgtgcctagattagtaactaatccggctgtgcctagattagttactaatccggctgtgcctagattagttactaatctggctgtgcctagattagttactaatctgtctatatatctaacccaggagatatcagatcacatattgtagacatcattttactgaagccattctattgtctagcaagcaccacttctttcagtggatcatgatacattgttttatactttattgctttaataatccattctagactgttgctcaggactaacagcaagtagttgcatcatcataaattgcctttctatactttctgtaaatcagaagatttccacatctctagttatctaacattgtttctcttctcctcaaacatggatggtagtaattgactatctcattgacaaatcctctcatgagtatatggttctctatccctatttttaggctcttctccttttcctttttttcctgttatcttccaaggaaagagtcactcatgtttaatcatgaacggtatgttggtcagagatagacctgcaaactggaacaactgagaagatttatacaaagtgttgtcctagagtccctgactgtgcccgtagaggaaaatgtactatgattaggtgaggctttgctctcatctccacacagggctctgcatggcttttctatttcacttctggcagtactcctggggaaggctacatccttttcctattcattctgggtgacttcctttgccaaagattcaagacagctttgtatttttcagtctttaactgagaaaggttgtgatatataatgcctttattttcccatgaagactttctctgaggcatgcacatagccacgacctttacctaatcaagaaaagttgcttgggcagtgggggatggggatgcaggttggactttaaatgcacaaatcagttctaataaaaacactgagattcaggtgcctgaggttagaaatactggagggaattcaattacactaattaatatttaagaagggctagagatcacacactgaatgtgggaaactaggccagtcagacatgagcatatggggagggcaagatcaacagataaaagtaacaaacaaatcatacataaatgctccaacaggaatgaaatagagaatataaaataaatgttccaacagacactgaagaggaggtaaatggtctaccagacataaaagcaaaatgttccaacatacacaagacattttattggtttaatgtaaacacatatattataaaaatgatttttccacataagttagtaggaaatgttacccatttatagaaacagacttacgggttctatgaattcacagcatactatatttgctctcatttcctcactggctcatcatgcaggagtctcaataaggcttgactttcataacaggtagttctccaatgcctaagcctacctggatacccaacgcctgacagaaggctgaaaagctgcagagtgtgcctgcttctgcacaagtttttctagttccggttgctctaatgtgatttggttggtgtcacagctaataccacattctctatttgatctgatttttcatctgtggcccagacagttgattctgatttttggtcattcttttatagacttgaaagttttctagagaaggcactagtggtgccaggactatcttgcttccttctgtcctgtctacactagcatttaattacacttttctacctcttttctacctctatgccctctcaccctccttcatcttgggagcttccaaaactagaagccaagagaattaactaggttgctttataaaaattgtatatatgtagggtaaacatgacattttgatatacattggattgcttttgctatcaacggcatcatgtagaggtagtagtagaagcatggaagggtagaagaaaggactgagactgatatttggactcctctttcaagttttctgatgtacacatagagtaactagatggcctggactgtctatgtacaatacggaattttaggctcctggaggaaacaaaccaaaacaaaaataaaaacaaagtccttttccttcagtagctttagctttagaagaataaatgattcacatataccaaaacccacaagatacggtatccccaaaaagttaaattgtctcttacctaatagaggatcagaaaaagaaaagatagttatttcctaaaaattgtttgaaccaaatttgtggttttcaaactatgcttcatggtccccagacttacaaagagatgattacaaaaagattatcaaatagatataaataaataaaaaaataaatacatatataatatgtagtaaatacatatatatcaatttgcaattgtgataaaaatgacatgcaaatttaaatgtattatataaatttaaaaaacactggagaccaatgtgttattacaagttaattatgtacaataagaataagcagctttcatgcaggcctctaattaaggctctcagattggaatacaagctgttgaaaaaaactgttacaatatgcaactacttatcagtctcatgatttttttgataccatatagtatagtacagaaagtcttcacttattgccatccataggttcttggaaactgtgattttaagtgaaacaacatataatgaaagcaattttaccatagactaattgatataaataagagttaagttcttatggcaaattttgggtcacagaaacatcatcaagtttctaaataaagatcaaaacacttttgatattaaacattgaaataaatgtgagctgtacatgcatttaagaaagattaataaaagcaagaaataaatgtgagctgtacatacatttaagaaagattaataaaagtaagataattatttaatcaataattccagttcagggtcatgagtggatggagcctatctcagcagctcagggactggtaaggtgggaaccaagcctagacaggatgccattctatcttagggggcactcacacacagccacattcactcagacacacccatgagcctaacacgcacatctttgggatgtgggagaaaacccactacccagagaaaacttatgcagatatggggagaaagtgccaactctacacacacagtggctcactgggaatagttcttttttttttttcccatcagcgttatgacaccatgttatttgagtatctgctatattccccatacaaaaatacattgatttttgagccaatacaataatccaatgctgagtttttattcctttgtatatttgccattatattcttattgaatgactttataatattcaatatgataaataatctgaatttgaaaatgagtttatctcaataaaatattactcattattccatatgttaagtttctaataagatttagtttgaaaagaggattctgcttgtttaaaagaaatatgaaaaatgtctggatcaaataatatatatgtatcctgcaactcaaggcagtatgaatctcatatggctccaggctgctcagtttctgaatttatcaacttgctggcttagaccactgtatacagcagatgcattgggcccaaactagattttatatatgggccactattccttcaggcttaagaacagtatttttatactgaggaatagcttatttatcatgaaaccatcatacatcaaaagaagtcacgttgccttaaacttatccagtacatgaaatttatcaccctcaaagttctagattatcagaatttaatatattagtttaaaatataaccagttgataaccaagaaataagtcaatggaaacctctttaattatctaagcagctcatcttgtttataataattgtataacttacagatacatactcatttatttttcaatcaaaatatattatattgaaagacttcagaagatttttttcttaatattaaccaacattacttatagttaggaacagagtgagccaaaaaggattctcaccactacagagaataaaactagcaaacctggggaaagatccattttccaaaacctgaactacactctatgatggtaacgtttcaagtatttataacacttaagtataagtcaagagttgattgaatgaggcctttcatgatgtttatgtagagtagtcaaaccagaattatttatgtatttgtttatttttaaaggctgtcatttgaaagttatcacagtataaaggtaaaggatacaccggagtttccattctagctccacattcctggctgtgtgaccttggataatttagttaaactaaacttcagttttcacttctgtaaaatgaaggaaatagtagaggttctattgtcatgaatttctagcaagaaatcaatgaataaatgaaatgatgaatgaatgttgcttagcatgttgcctggcacataaaaagctctcagtaaatattaactgtaattaaaaaatatctaaaagccggttgctttcttttggttatttttttaatatgacttgattttattcataacttactgactatattttcttcccttctggaatgatgttctattgaggtttctttttcttttattccagaatgttctctgagcaatctcttcatttctgcctcattcatcagataggattgtaggcgttcattttggtagttctgcatttggttttctgtcactgcttatgctgttttcttgttctaactcagtggtttaaaaagtaaaattcaagtaaggactaaacataagagaatttactgggactaatggttatcaaaattgggcataaagggatgttattaaaaataaatcacacagagggagaacagctgatgacagcagctgtgaaatggatgtacatggtgggaatcagtgagccccaaagaaacaaacaaaaaacactggagggccatgaaacttacatgatttacaagggaaacccaagctttatgaacagcctctgaagactacagaggccaagcaagtcacttctggatgaaaatttggataagacagcaatactgaaaggagttatgttccctgatcaaatgggagctacagataagaaaagaatgagaaataaaatgaaaatctttaccgagtttgatttctttattgtataacctgcactgaggggacaccatctctgggtataccactatagatacacttaccaaatgcttagtgattattgcaatagttagaagagaatatattttaagagccaaagttacaaatctatggacaagatgaattaatattagaacccatgttgagatatatagggcccaagtagtctatgacacaaaagtttgtgtttttatttaaatagaactctaaagacttagttgtttgaaatatatttaatgtagagaaacatttttttgaaaatttggtttactgtaaagatgaatggagatgtctaactttttgccttttttttctagatatggacccacctctctattttcaagagcattaaattcagttaaaaactaaaaacaaaaatactgccaagggattgagacggtaaagtaacatcatgcctgatagaataaactatcaagacagcatgaacaaacccaactgaaatggaacaagcaagcttaacacaagtcaaagaagctctctagagtgttaaaatgaaaatacaactaaacagaaccaaaactgctattcatgggaatagcaaatgaagaattttcttcagaatctacacggataacttctatgagattattcaaaatgtggaaatttttttcagaatttttgtttccaaatggaatttaatacatttcatgaaacaaatgaaattttatcagaaataaaacatttaaattaccaaaagcctagcctccttaggaaggctgttttaggaagacatgggtagaaatattttcatcaaagccctgatcatcttccctttttgaggtgaaatcactctactctgctggaaacctacatttagttatttataaaccagtattaaatgtatattgtttcaaatctctatgtaggaaaaatatcccacattcattcccattttactatgaactgtataaacttccaaaatcatcatgaaaagaaaaacatcaccctttctgctaattaagtgttcttgctttttttctagtaatgggtatttgaaaaataacaatatgcaagagtatgatcttacagtgaatatagccactaggtcaatatgataatttaatgtgagactttaaaattgagctttccttttatgctactattctctaaataacttctttatttgctatgattaaaatatcttttcatcaaatttgatataaatatactagatatggtaaatatatttatcatttaaaataacaattgaattgtacaataagcactatatcattgcccaatttttattttgataaaatctttttaagtgatatcatttcatgttaggctttttgtgctgcttaatattataattaataattcatatttttgtctttctcctctctgacaacttttatttttaatcggtgggcatgtgccaaattggtttgttatttatttataatgtaaaatgacaagggaattgaatatgtgaaataagatagattttctttcatatgacaaaaatttcttagtaatggggatgcttcttgcttacccttatagattcaagggttttagagaggttaggtcaaatgtcacacttctcatataacaacatgtggtaagtgcattaaatagactgttcattttttaaaaattcattttagttttgtgaagacatctgggcacatgcataaaaaacaggacaaaacaatatcaaaatttgtaaaagactccctattccgataaatcctatagtgtcaattaagtaaaaattctgaccaaacagatgtatttgtattctttcctaaaaactaaaacaggcaaacgtaataggaataaacagagaacgtttcaaagatacagaatttccattgaaaaaatcaaatgttctgtctgtaggactttatagaacattaaataatcttttcagtactgtccataaccagaaaccacataagctggatgctagactattgactagttatgacaaaaaattcacagtttgatctcaagggcatcagcgatcctgggctcaggtgatcctcccgccttggcctcccaaagtgttgggattacaggtgtgagccatcatgcctggccatcgtgccaacgtattgaagtggaaagaactaatgctgagcagagaatgggccatacctgggtggttttaagaggtgctgctataatgaaaaatcacaggctcacccaagaactaccgtggaatcagaacctctagggatatggccctagaatctgaattttaagccagttcctgaggtgcaattcagtttgagaactacagtcttaaggcaaaacctttctatcataccagagcttccaattgtcaggccctttgaatccaccctttgtgtcaaaccttagataattcaagagacataacaaacgtgatcatgttacatgcttcctcacagatttcagtgtctcccatttcttctattagtttaaaaaacatagtccaccatcacagggccctgtttaagccagctcctcctctgtggctctgcctttgtggtcaacctgtgcaaaactttgaggctgtgacatcacttagtcagtctccaacatttggaacaagagaactttttctaacaatttgatcccaattcctattttaagcttgagcattatgaaggctgtatctgtatataatattgaacacttcaaaacaattttagatcttaattattttgttattaaaatgttgggggtgtttaagttgacattgagtcagatgtaggaactgatatacagtgaagttaaatcctttagggtaaactcattcagtggtagaggctgaactacagagcctaggcattctgacattccaccactgtgcttatcagcttgctccttgagcaaaccttttcctgcctttatgagaatatgcccattttatgggctctgtatctatgagatattttacctatgcttatgtacacatggtgtttatctttcaaagctggactatggaaaagcctaattttacaaacatgttagtaaaagattatgtaatctgaggtgattacgtttaaaatggcaatgataatgatgttaattccagtcctgtgaggtactgtttctgatctggaaagagcagttttcttttttaacagcttattttgtattttcataatccattttaaggtttggtattaatatagacatgagaaataaaatataactgttgccatgccaaatgtatatcaaaaagttgctaatagccatgactgctatttggttaactgtatttcactatttaaataaaatgatggaaaatggtgtgtctaggatctcattcataataatgaaagacaatagaaactattagcataggtatgatgctaatgaatggtaaattttcaatagagatccatcgaccagattgtttgaaaaatgtttcctgtgggtacgaaaaatgcacacaaacaaacacatgcatcaaaatgtccataattaagtttttagggaaaaataacaatatatgttggttaaggactttcacttaaatggcattatagatctttcagaaatgagagttgatttatacttcagtattttggttcccaaaggttgggacagtgggtggtagaggagaagtagagtaaatggaaggtatacatgtatgtgtgtgcatatgggcaactttaagcaccttgaatttaatgaacaaaaaatgtcattattctgtgtttatatatttttgtgtgaaacaagtacctttctctatcactggagtttacatggattttctcatgatatcttttgagaatctctttaaacactaaaatacatttttccaaatgaaaactcccataattctgctttattaatatctgaatgaatatttccattgatttgtccagaagaaggaactgagtactgtttagagagcaatctttttcatgataattggcagcaatgtttccctgctatcagaaagaaaactatagaaatacgaaactttagataaacatggagataaaaataatattatggagtccaactggtatctttgaggtgaggacaggctgagatggactccttggcttccttctgtccaaaaatttcctgtttccctatttcctacggttaccaccatggaacatgttaaaatctcagtagggactctgtttcaacttttcctgtcaaaacacagtgaaaaagcttaatggaaaaaaatgtccttcctatctccatgccaggcacagtgtaagatccacaaacttaaaagccaggaaaatattcttttatgtgccccaaagctgggcaagtgacctagtactacaaaaattcccaaataggcatgtgacctgactaatgtgtgctgtgagatgagtcaagaaaaatggaaccatctgtacttttattggacagtcaaataatttctttctgtccacccaaaaacataatttctatgttaagagtgatacaaggagacttttagaaagtctaatttttaaaatcagagatattaaaatatatgaaaagtataacctattaaacactggtggagataagcaaataggcttatgaaatcattattgctttaaaaatttgttacctactcattgtgtactaaggcttctctacgacatacagaagaggccggtgcggtggctcacgcctgtaatcccagcatttcgagaggctgaggcaggtggatcatgaggtcaggagttcaagaccagcctggccaagatggggaaaccccgtctctactgaaaatacaaaaaaaaaaaaaattagctgggcatggtggtgggcacctgtaatcccagctactctggaggctgaggcagagaactgcttgaaccttggaggcggaggttgcagcaagccaagattgccccactgcactccagcctgggtgacagagcaagactgtaaaaaaaaaaaaaaagaaaagaaaaaaagacatacagaaggaaatcagggaaaatgggaaaatgaagggaattaacaaattgcaataatctttaagaagtagagtatgaacaattttccttttctaggatgaaagctaccaacaactgaactcttagagtgagtgatggcagaaaaaaatagcaatcaagaataggggcatgttagtttttagacatgtttacaaaactctgccttttatttcttaaacccataggtcaaccacccatcatacctacattaccccatatgacaagtggatttgttgtatgtttcaagtttttaatcttggtgggaagggggagggcagagaagtatttattggtaaaatatcataataaaggttgagcctgtcaatgattgtacctaacaataataaatatgtgtaggaagtaagaacggcaaaaatgaagccgggtaggatactgtggatatggtgacagacaagtatctatacgaaatcctgagatatttgtcctccatttcataaattaaagtgccccctcttttgctttacagataaggaaactgaggtgcattataatagcaacagcagctgatgtgtagtagatccataccacaagccaggtacgatgtcaaacatttaaatgtatcatttaatttaattttcatagatctcctacaagacaagtgctattattttcattttacatacgagaaaactaaagctgacagagattaaataacttgtccaaggttgcatagtaactaagtgaaagagccaagatatgaactcagatctgtctgatttcaaaacccaggcccttaaacactaggccagtggttttttaaccctgattgcacattagaagcacctggcaagcttttaaaacctactgatactcagaccctaccccagaacaattaaatcagaatttcttgtacctgggccctgatgtgggtgtttgtttcaaagcctttctgggtgactgtaacatatagcttgggtaaagaagaattgttgggtgtctcccatggaggtcagtatatctgtgccaatatgtgaggtagtacaagactcaagtgtcctcagtctgtctgcagtggtttttcccttgccccatcatgttcactttgacatcttttttttattatgatttttggagaagtaatatacaagtgacaatttttttacaaagcattgtcacagcagaacatggtcataagtccatcaaagagaaacctgttcatatctatgtacaggctatgatgaatgaatacaaagaagactatgtttattactctcatccccaaagggaagtataaagctggccttaaaagctgttcataccaaagctaatcactaaaatttggaatggcttcctcctctcctttcacaaatgcaatagggtagccactggatctaaggggaaaagatccaattaccactctttacaatgctttttcacttaggatctcaagacgactgacagtcattcaaaacataaaagtaaagtgaaaatatctctagtagaagtgaaaagaaaatgtctgtagtaggaagaaggcctaaatttgtgtctatactctgccactttactgcaatgacttgaggccaaaagtaaagtgacagagtatagacacaaatttactgccatgacttgagccttgatttccttttctatatgtacttaagccatatcatccttagggcagtgatccaaaaaatgtggtccccatcagcatcatgtggaaacatatcagaagtgaaattatcagtccctaccctagactctgaatcagaaacttggtgaaggggcagtaatctgtgtcttaccaaacattgcaaataattctgaccacctccagctgactctgatgtatccacctccatggggttgttgtctaagaataaaaggagatggtccataaaattgttattttttttactatctactgaaatcagaaatttcaaaattctctcacagagatattttagagaaataatgttacagcctacattagttagataataacctcatttctgaatttcactttgaatgtgtagacgaggcacaagtcaaccagaggttatgcaattagcttggagtcaaagagaaagcaaggagtagagctgagaaggaaaccccagtgtgaacttgatttttattcaatcaaactgttaaggtaccaaccacgcactttcatctataatcacaatgaaccttttaataaacatgtttctatcctcttagcttaaaaaatataacagtagctttttggattttaaaacagattgacttctatacttctgggctaaaggcagctcaagagtcaataagaatcacaagctttccacagtgagaagaaagtgcaattgcccagtcctctctatctatgaagtgcagacagtattcctcttcctcacctcacactttcgattattgcaatggtggaaaccatgataaataaaagcgcttatctagtggtttggttttcactaaaattacagacttctgtaacattatttggataccataaaacacaaaccaaattttaggagatgctttagggtgttttttcccctgccctcctgtcggaagccctctatctttttactgtaatttatctgatatagctaccaagatgcttgatacttttacatgcaagggtgctgaaaaacaaagagcgagggaatgggttgttaatgaaattctctgattgtaaaaagcactctggaatgatcaggtggtaaataataataagaggaaataacataaagtgcttaggtgctacagcgatagtcaccatataaatgcagaagagatcagacatgaatagaatttgcattttatgcagctgctgtgtgtgtatatagaatatacagtagctaatttttcaataatgctggtaaaatattgttcaaaatctattcttgctgtcttctcactttaaaaggcattatatagaaaaacacccatctgtcctagtgcaatggtgaatgtgtgcaaagagcctagaaaaagagcctctttgcatacgtgaaaaaaaagaactcaaataaaaggagataatgaagaagagacaatagtaacactattagaacagctatgcagacaagcacaaaggtgatctttgaaaaacatcagggataaataactctgttaatgtgtggcagagaaactacagttaagacatacagtaatataccaaaaatatagacatgcttttattttgtctactgggctattgtgatagtgatggttgtttttgaatagaaaggaagaagagagtgggaagtaggatttcgttgtttgttgttactgttgctgctcagtttagaacaacaacatcaactacacaccagacccgtccaacagttccacaaacaatgcttaccatgaatctgccctcaattttcttgttgttattttcccttaatacttattgataacccaatgcccattcattagatatgctaaatcctcgtccatggttactctcctttggaagagactgagaagatgctaagagggagttcctcttacacataagggaagagtctgtttaggaatctgagaaagcagaggccaggataaagagaccactagtcaatcaatactaagcaccgaagactgaatcacccaaagatacaattatctcccttcctttgttctgtctcttagtcaaataaaggattgtttgtagaaccttttctgttcctgatctctaaaaagcaggactggacttgcacatccaactataattcaaaatatctcacacttccaacttgaaagaagacataaactgtttcaaagaaactcagagagagcaaatgcatattcacaaaacttacacttattcctagaataggaaaatggagagagaactaaccacataagaaagggctaatcataataataatagtaataatgatgatatcaatcaatactttggattctagagaatgatttatcacaaaaattcacctgtattaagggagactccaggacaaggaggtcattaagctacatttccatcttcaggattcagccaaactcagactctccggaaagctgtaaatgctctcagaacagactttagtaatgagattggaatgaacactgggcctatggcgtaaaagcatctccctgccccttgttctaaaagttaactattaaaccatgtgcggttcatcctgatttggtttactcaattctagaaacaaggacatgctgatcagattgccctgggcaattgaatacctactgaagcctttgggaagacagtgttcttcccaccacccctacttaaaaggcttctgttaccagactatcaattctgtgttactggtgaaggatagaaagtatcttcttttgaaggacaagtttttcactcactgagttttctgctttgggtatatactcaacatgttaagtgcttaatcttttttcccccattcccctttttctactgtagtgtgttttgtttgtttgttttttgtttttgtttttttttaattatttgaagagtcacttgtctggatgcttcgttctagtagaatttggctgatttttttcccaacaccttttagtggaatgcagtaacagatgcatggagggagaattggtcttaacagtatttttaggtttcatctgtgtcagagagagatctcttccctttattgatttcttgcatacactatccacactacagcttgaaacagctacaacagtgtttgaaaaattggttgttcctcactgttcaaaccatttttcaaaacagtcgttacaagcttcattttactttctgttataaggagggttttgtttgggttggtttcattttccttgtggcgtcatgctagcagagaaacacagtcaggaatatagcttttaaatgtggtatgattgggattataaccatatcagaatctatattgaaaatttattagattgagccatgtgcagttaaaaagaaagaagtcagaagtcttcgatatttttcacaaacatgaacaccatctcatgcaaacgttaaaattcaccaaacaaatgataccccactgttggaaagatattttctcatgtcaacaactcaggaaggagtggggagggaatgggacatatacatgtaaaatttttctctatatttttgataataactctctgtgaatatgttttactacctaggtaatgcttatatttgtaaaaacatatagttatatcagaaagtcaattttgaataaacctgagaatggcaaactataatttttaaaatactaaccttttagaactgttcattttcacttttatttccaggactcactatcttaaagagaagaataaaagttgaagatccttgggattaacagaaagggtggaaatagccaaatgtattcatatttttggccaggcgcagtggcttatgcctgtagtcccagcactttgagaggctgaggcaggcagatcacctaaggtcaggagctcgagaccagcctggccaacatggtgaaaccctctctctactaaaaatataaaaaattagccaggcatggtggtacacacctgtaatcccagttcgggaggctgaggcaggagaattgcttgaacccaggagatggaggttgcagtgagcaaagactgagccactacactccagcctgggtgacagagcaagattctgtctcaataaaataaaataaaatgacgttcatatttttaaaatacagcaatattcatttgtttaaaaaacaagattgaggccgggcgcggtggctcacgcctgtaatcccagcactttgggaggccgaggcgggcggatcacgaggtcaggagatcgagaccatcctggctaacacggtgaaaccccgtctctactaaaaatacaaaaaattagccgggcgaggtggcgggcgcctgtagtcccagctactcgggaggctgaggcaggagaatggcgtgaaccccagggggcggagcctgcagtgagccgagattgcgccactgcactccagcctgggcgacagcgagactccgtctcaaaaaaaaaaaaaaaaaaaaaaaaaaaaaaaaaaccaagattgagagcacagttatatagtgacttttgatacatacacaataaaacttattgaattttcaaaaagtgagaaaaaaactactctgctttaaatttaaagtaataaataataatgaagacatatcaacattggtaactgtcagagtgagaaaaggaaattgaacattcaatgtgaccagaggaagggtgaacatgggagatactgcccaggaaaagtgctcatgatgagtaattcaaagacccagaatcttaacataaattttttatagttttcttttcaagggactatttgaaaaaagatggttctggggtttttgttgtagcttctttctttctttctttctttctttctttctttctttctttctttctttctttcttctttctttctttcttttctctctctctctctctctctctctctttctttcttttggctttgttgtagcttcctctttctctctctctctttctctttctttctagctaaaatttcactctaaattccaggaaattttcacgagatccttttagaggttctgacacaaataaagtaaaagtaaacctgttgtggcaaagttactaactagtctacactaactctcagtccttgctcaaagcaaaataatggagtttggggtgcaatctggtgaactcaatggtccaactgcataaaggcaaagaggaaagccaggcttgggcacttctgtagaaaatgaagattactggtttgaaggccagtcttctcactgcttcactgtatgtggtgactattgttaaattagatatccctattctgatgaaaaggcaatgtgctatttttggggtatacatgtttcaagctgtaaactgcaaagtgctgtataaaagtaaagtggtgttaatgcctcataagataaacatatagattgatgatggaggcatttaaaatgctttaattgcccactttaataaagcactaaataattataataaaaacaattcttcagaaaacttggtgggaaaaaggcctacaggatatgtttgttaagaataattagattttagttttggaggaaaaggtaggacaagtcacaggaggcactcgatgagaagtcaggaatgcctagtacataagccacacatattaagttgtagtttcttcaaaactgacaataacatgtcctccaaaaccaaagggaaaatcaaaggatgttgcctatacttatgtaccttttgctactggagatctagtcaatctatagccttggattcatagttctataacatgacaacatagcaaaatctcaccaacactttgttttaaagaaattggcagctgggtgcggtggctcaagcctgtaatccatgaactttgggaggccaaggtgggcggatcacaaggtcaggaatttgagaccagcctggccaacatagtgaaaccccgtcgctactaaaaatacaaaaaagtagctgggtgtggcggtggatacctgtaatcctggctacttgggaggcagaggcaagagaatcacttgaacccaggaggcggagcttgcagtgagccgagatcgcaccattgcactccaacccaggcaacagtccgtgactccatcaaagaaagaaagaaagaaaaggaaggaaggaaggaaggaaggaaggaaggaaggaaggaaggaaggaaggaataaattggctatgcctccaagtgaattatactataaacttctttcccattaccaataatgtaaatatataaccaggcacaagcatgtggaaatggagaaaggatgaacgttagtcttagaaactttggtttgtatcccatttccaccttttaacaagtcatttagcctctctaggtcaagattttcttacctattaaatgaagataatggtacccatctcacaaaattgttttaagaattaaatgtaaaatgcttggcacagagaggtcactcaatacatggcagccaaatcaccacatgcagtaaaacccagataaaatatattcagccaggactgttgctctgtgagtaggtctggtatccatgctacaaaatctattaagcctaaataatttggtcattttagcaatactctttagagattttttaatgacatttcccaaaggtcaagctagcttatggttatgtggaactgctgcatttataagagagtttagtgggttcataaaataagtcttgctccccaaatccggatcataaagaccttctatcataaaggataagagtgacatttaaaaaaccagtttttaaaaaatgatggtagcaaataaatgcagatgatcaggatgacagcaagtaccaagtcaaagcaacacggagaagaaataggccctagcctgcaggttacactttaaacactgaggagaaatgggagagtaaagagcaacactgagcctcatcggactgtaggtgaaaaaagattcaaaatctgactctaaagcaataggtaaagaaatattttaaaatgcttatctgtaggaagaaaagcagtaaagcagaattcctaggaattgagaaacacttaggaagaaaatgcttaagtagtacgatccaaggtgaggctagctgcagaaaatacaaatatttatgggttaaatcaggactgaggaaaatataaagccaaatatgggcagctctgagggggaaaaaataggcagcttggtactcaactgtcatcacaattcatttgtgtttcacgtcccactgtttgtgacattaacagaattttgaatttagcaatggactatttttgtattgtgaatctctgcagccattttccatatgtagctaccactgtaactagcaataacagccttttgagctttaaaatgcttccaattaataagattcaaaataggggtcacctaagagttttccaagttaattccctttgtctactctttgaagcagagtggtattcctgctattcatttgcattgaggccaaattatttgaccatttcagtaagatatccttaggtagcttttgcttttattgtcattttccaaaggattaagttagttttagatttttgaactgcattttcatttaactaaaataactaaagcaatctttttatgagggtatttaaatagatcaaatttataccaagttcctactgtgtgtcaaacattagcaaagcaatttaaaatgttattatttatatatcaatacatacaaatcatatgtgttatatattaatgagcttatagccattatacacaggacttttatgtgttattattgttgtggttatttctgttgttcgcaggtatcagttatcaagtacctattatgttccaagaactctaccaaggactatacacactcaccatgtaatgaagatattattggtttattttccatttgaagatttagtcacaaaaagtaacttgtccatgagcatataatttgtgcattctcttaaaatcacttaaacttccacgtaacacctggattgacgtatgctttttcttacaaaatatacttcaattcaataaagattctttagtcacctactatgtggcacctgctaggatagttatctttgtttgctattatgctaaatcacagatctgaccattagaatctcttccttcctgaaaataccctctttaggtaaaactgtatttcttatcattttccatcactgattgaataaagaaaggtggcactatctggaaaacataagagcgttggatttacaagtttcttttaataaaacaaaccaagttaatcacaaattgttgcaacaaaatatgtgacatgaagggcatttaaggcacatttagacattatttctatctagaaacagaaatttagtccacataatgtcatttatctactgagctaaatcgtattacaattttcatctataaaatccagattcttaatgtgtgttggaaagataatatctctgacccgctctcagtaagaaatgtgttttgaattgttttgttagtaataataatggagttgtactggacaaaatatattttcagcaagtttctctggtaataaaaataactataatagtagtaataatactagtaatcaccaataaataatagatagcatttattgaactctactatgtgccaggtactgtgattagcactttacatgtattatcttattaatttctcaaaatattacatgaggtaagtaccgtaaatccaatttaacagaaaagcacattgagatatagaaatccaataatttggtaaagatcacacagatagaaaagaggtacaagtcaggattggaacccaaggaatctgactctcgtatctatctactctaggtgggggatatagcaggtgctatggtgtttgttcaagagaatactccatttgtgttgttttatctaccttattagggttggggcccatttggtctgtaagccaaatctgaagacagctgaaatgagttaaggtttgaattagtgctattcacactatctgccaattaaaatgctcccttctgagaagctgtagccagttggcataaccttaggacataatacatgctcaaaaaagtatctgatgaatgttaacaatggtttctctaagtggtgattttactttctttaaaaaatactttttcctattgtctgaaatattttcaacatgggcacattacttaggtgatcaaggggaaattcaggactttacttaaaaaatgtttttgttttgttttacaattaggttgttagtctcagttaaaacataactcctgctgggaagcctttcctgttgctgtactctctgaccttttgaaggacagtactccttactctgtctgcctcagaaccttatgaaggccacatactattgttaattatcagtcttctctgctttatgtgaagtcccttgaagattgaccccattacttatctacctcttagagctctaagcatcttgagtgcctaccactcagttcaatgaaaaaacccagaacacacatacaccagaacaagcacaaaagatgaaaaagaattattttagggttgacaatgcacactcttggtatttgcagatgacttgtttctccccttacattatgtgcaggtccccatggaaagaagtttcccacaagaagtgtcttgaatttactggtctcttctctggaggattttacaaatgcatcaaggaatacacacacacacacatacatacacattatgaaataatatgaggataattagaagtaatggggaacacaggaggcaatttctaaaaaatgaagcatattttttatatatataatgtatatatgtatacctgtatataatgtatatatgtatacctgtatatataatgtatatatgtatacctgtatatataatgtatatatgtatacctgtatatataatgtatatatgtatacattatatataatgtatatataatgtatatacacatacatgtatgtatatatatacacacacgtatatatatatatatatatacacacacacttttttttttgagacagagtttcgctttgttccccaggctggagtgcaatggagcgatctcagctcactgcaacctccgcctcccgagttcaagcgattctcctgcttcagccacccaagtagctttgattacaggcatgtgctaccacgcccagctaattttgcatttttaatagagacggggttttgccatgatggccaggctggtctcaaactcctgacctcaggtgatctgcccgccttggccttccaaagtgctgagattacaggcgtgagctaccacacccagccacatttatattttatattaagtaattttgttcctttcctaccccattataatataaacttcatgaaagtagaaactttattttattcactacagtatccctagtccataaaagaaggcatggcattacatcctcaataaatatatgtcgaaaagaaggaaaaaggtatagatgtttccactgtatttcttatatttttctggaaacaaaggggaaaggtgttcccaaaaggtttccaggaaaacttcaatcaccaatgaaactgcaagctcttgtcatgttcctcagaccactacctaattaattcctttatgtgcaatacatcctttctagcctgttgatactcaatttctggcgctgctgtaacttgtggagcaaagagtgccacgtgagaggtgcttgggccccttcatactgtgcctcacctgcgaactggggaggccactgccatttaggctccagcatcttttacaggccagctgagccaccagaagggaaggggagaaagagacatgcaagttctcagaatgtctggtatattcactcacacacatttctcttctcttctcaaaaaggatcctggcaacaaatcactgattaatgatgagagaaatggaatcaggaggaccccatgataccctctcatcctagttttgggagataaaatctcccactgtggggaggaggaagaccctacagggttttcttatgttttgcagcttccaaattgtagtagggtcctattctataaaattgctaccaacaactgtatacttagtgatataataccatatggaaccttgagttttacttaaagagtagattatgtggcaattcatagttatcctagtatggataagaaaatatcctagtaataacataattattctagttatgagtttttttcagacaagaaactcttttattcatctttttatctctagtgcccagactcaacatatgactttgtatatagtagttcttaataaatgatagcttaaaaattaaataatatttttaaaatggtgagatatggcttaaaggggttcaaacaaattcagagttttgtctaatctaggtgtttctagatttatgagcaggcaatcacatattattgagtatgtattagtgttttagttagtgttaatacagtataataaaccctcattgattgttgtagagaaatcctactattttacactcatatactagaaatgtttaaagtcacaattttaaaatagtggacttcaaactttattatgcacaactaacctgggcagtttcctaaactgcagatccaggctacattctcagagcttctgatttagaaattctggaatggggttcaggaatctccattttaacaggtgctctagataatcctgatataggtaatccctaggtaatcctgatacagttggtccttggactacttaccatggactaggctacaaggtaatataataataaatctatacagttcaccttttcaatacgaagagaagagactagcctattaaatgtgacttaactatcaaaattacccgtgaaaagaataggcaatttgctaagacttctcaaaatgaaccaagggaggacataagggcgagaaatattaaatttcaagccagaaatgactctttttaaaacttcaaagagactgacaatctgcttaaagtaaaagtggaagaagaatggcagcagtacagaagtgttttatgaacaatttaggaaagcaacattgattcaagaggtttatttgataacatgttttaatggttattataaaagtgaatgccttctaatctttgatttgctgctaaaatatatatgtatttatttacatgaaattttttttttaaattccccccttaactccctactttccacacatttttagcttgccaacattactgcgttaatggtgtcctttttttctctctctagaaacacatgccctgggattaaaaggggattactttggtctacttccacatccatgtcccagggaaggtactgcttctgcttccgacctgacctttaggtatctgcagccttcaattctttacagtgggagttgctttagcattgatttcttggaaaactaagagctgttttcaaaagccattttcaagacaaataatgaaaattattttcttatgcttatggatgttacaaactgtgtaacaagcttttctctttaactttgctgcaagaaagtttaaaggcaactgtatagcacttcactgaatatagttttatgctgacctcacttctaactccatttttatatcctttcctttattgttttatttttcttacctatttctaattcatgtattttgctgcaatcatgtatttatgtttattttttcattgtcagccattttaattcccttattggtgcaataaatagtaaataagacaaataaacaaaacaaaaacatatgtatgtatgtgtatttggtatttacatcgcatgtactcaaaataaaaaataaaaactaaccacctaaaataattgacatatttcattattctttgggctatagattcacttgactgcagcacttccatttagggagatataaaattaaaataccaccatgaaaaaatccatatgaaatttgacataggtattttcagccccaggtcattaattcagttctgactgacatctttcagttctgttttaaaatttttgtgttcagtctttcgattacacacacaaaaaagttttggcttaatcagcctaataaagtgtatatttctgaaaacatttttatgtaaacaaatatagaagtatacatgatacatacacatacattttttacttagagtcttcaaaccaaatatttcagtcctttgcttccagtattattttcttttaagtaaatacttttcattaagcaacaaagagtgatagtcatctcaacaccaaaaacttgtattcaggctaagtttagtctactttgcatattttcctctgagaatgatccagccagtctcagtctgattctagtaaaactcaggtaatgtggaagaactctaattgagtattagacattttaacaattatattcatattgatatgtccttatacgaccactctaggtgaaatattactatgcttgggacttaaatatgatttttgttcttttattaatttctgaatctcatatccttccagataccaaaggaatacagtaccacctgggaataatgtcaattttcactttaaaaaaatattttgttgcttttcccctcagcatgggcaaccaatagctgattcatactttcattacatcacagttggattacagaagggctctttagtctggcctccgcatgtctcttgcaactcatttgtagacagcccagaaactagcagctggacttcatttttgttccagcagtcaccattttatagtgtttctctaagtcactgtgagtttcactgatgacaagtctaaaactccacaggtattcatatttagtgggttaaatcagagagaaaggattatgcttaactttctataggttcatgtcactcaactatactttgccattcacttaccatacgtcaaaaaggtggaataatactattcttacatagaggactaataagatatacttagcaaaagtaggtggttgcaaaacatttttttaaaaatcagagtgctgtatttttaaaatcttgcatagaactctggttcaatttttgagtccttccaatttctcataactctgtggtattcataataaagcaggcagatggttaagtctctgaacatatgctttaaatgccccctttgctatttctaaataatggaccaaattttgccctcaaatagtcacaggaaactttaaggaggctgcctcttgaaatctgaggacagaatgtgatccagtgggaattaaacctttaaaaaatatattttctaaactttcttatgagctctattccctataccaagacaaattacattttttaataaaataggatatagtaagagaaaaatcctaaccaatacaatattacttggctcaaggaatagattagaaggcaacatatgttttatttatttatattttaaaattctgattttctaaaacatgagagtcatctgattaatttctgtgtgattaccagattttccatttttattattattcctattactagtatcatgtagatgttatattgttaaaacatcttgcaattattaattagttaatttagtttaaattatgattatgcctttgttttaaatcaatgtttttcatagttattaaaagccaaaagcactatttttccagtcacttactttcatttcaaaaacagtttgttgtcgatgaaagcgcattttccaggttatcacagaatatgcaattcatctgcaatggatatatatattctggtaatgttgctcacataacctagctgtacttgtaagagtatctctgtttcttaatgtctatattttatacatggaattaaccttcatttgcacactcatatttctatgtatttaaatttattcctgaaagacctctgaactagtctctcctgtcttacgatgtccacaaaacttagcagtctgattaacattacagataaaaagaccacacaattgacaataaggacactttagttattatagacgtctgaagtttaagtattccaaaactataatgtccctttagaaattctcaataaggattagcttggtcctaatgaaaacagtgtttacttttaaaaataaatgcaatagttgtacccaaatatgttcgaaacactgtatgacgtgtcataatcaacaatgttgaaaataactaaagatctttaaatcaagtgataattttacacatatatccacaaatatctgaacaaaatttataattactattgggacaaaacattaacatattcttctgctaataaagacaaacaactttgagaaaatcctctctcattctcacgtctctaactttcacaataaatgcagcactgaaactaaatttccaactcagaaatacgctgagctccaataaacaagttgattttaaaaactcaccagactaacagttatgctttttcccttatctttcctttgctttcccttgttctttcactttccatgcacacacaatcacacttacctgcacaagtctgaaacatcagtctatgtattttttttgaaatgtactctgtaccgatgcatttttctgtgtttctttctaaccctcgagaatgttaagaatttaggaagagagccacagcttaagagtgcaattatttgccagtaaatactcaatttgcttgtcctgtgatttttcttctaacttgcatattcaataatccgtccctgactgcgtcacgagcacaaaaagtcttttctccaaaggagaagactttcgccaatcaaccttcagccatgccagggcacagcttgtcagggtgatttgttagctttaattaataattcctcacactggccattttcacaaataatgcagtgaggctgggaggctagattgctatgattcagacagataaaactacagtggaaaggggatggggaggggtgtgggggaattcagatgccgtttataaacacctctaatcatactctttcagtttacaatatagaggacatctcagttgaattaccacgttatgtccaccaatttgtattcagatggaaaccatatgttcctccactttatctgctagggactccctggtgccaacacagtcattgggcagacaacattcacaaaagaggtctctagcctctggattgcaaaagtttactgcagggtgaagttgagaaatcagacatatactgcacttctcagtgagcttgggtaacagtctggaaacacagaagtatgagttatgagtgtcagattttctcttatcctgctatgtgatactgggcatttcatttagccttaaaaaaaaaatctcatacctcatcctcaaatcagtttgcaacaatgactgatttgttcatgcattctatgaacatttattgactcccaaatatatgctacacactgtattaaatgctgagaattttgcttgaaagtaagacttttccatttaactgacaatccatgggcttgaacaaagccaccaaacagatagtgtgcaaataaaaataaggatttctaacagtttctgtgtggctcaaccaaataatcagtaattgacaacacacttgagtccattatgcaaaagtaatgctcggggtaaaaaagaatatacagagattaaaaaatatgtttttcaaagattaaaaaatttccctcaaagtgactagagcactaagaaacatattaatatgttcataaacaatttccaaagattcacaatcactttaggaacatacaaataaaaaaattttattaatgtccttaatcttatataagaatatatgcctgtgtttgagactgcaaatttattaatttattggatacatatttattgagcatctactctatttcaggaactgaataatattggagataagtaaagcacagcctcgttattcaagaagctcacaatttagtcaccagactctaaaagagaaaacacacatctcaactgaaaactgtaatacaatatagccagagcaatgacacaaatatacataaacatgtaggatgggcctcctagaagtgatgcatcaactatttgtaaaggttgggtagaagtaccagtggtgagaagaacattctagggagaggcaaacctttgaaccctttctcaaactgttactagaagcagagcaccagttctagaaaagatgggatttaatacatgacaatttcagataaatgtttcagatggtaaatattgcaggatttaaaaataaacttattaagaaacaaatgttccccaaaactataatgtcttgatatcatcaaaaaagcatgcagcatctctagcactggcacatagtaacatacatgtctttctcactttgtgtgtttcagttctctgaggcaaacatgaaacatgcttgacacacactgcctttctgtgttttcttgcctatttatcttcttttactatgggcaggcttctactgcttctgttttcactgtaccataagataaatcatatttgcatgactgttaaaggaaggggaaaaatctgtgtccattttgtggtcacacatctacttctagtcagatagcacatgctatatgggactaagagtgcaaatgttaaatgagaaaggaaataatactcctaaacccccaaaaagctctttcatagatagtaaatactcctagaaactatacagaattcttggtgttatttaacattttgctttatattatatttaacagtgtaaggcaacagccagaatactatttaccatagttcagtaacatctagccatttaaagaatttacaaagtttattaattcattaaatatgtatgtattgagctcctactatatactgagcacttatcagtaaatgtttgatttttattcccacaatgcttacacataataatagttaacattcattgagtgctgactatatgctagggactaatctaaggactttacatatagtatctcatttaattcccacagtaacattatatgttaggtactattaccacctccatttagtatattatgaaactcacaagtagagaagctagatatacactatgtgaattcattctacacaatgagaccagggcaactaatgtccaccaaaaatcagatttattactttatagttacacagtcacaagtaatgtttatgttgtgaaaattaaagaaaataagtccgggcacggtggctcaagactgtattcccagcactttgggaggctgagctgggtggatcacctgaagtcaggagttcgagaccagcctggccaacatggtgaaatcctgtctctaataaaaatacaaaaactagatggggtggtggcagaaagctgtaatcccatctacttggggggctgaggtaggagaatcgcctgaacctgggagatggaggttccagtgagccgagatcatgccactgcactctggcctgggtgacagagccagactccatctcaaaaaaaaagaaaaaaaaaaaagaaagaaaatgatatgcttaatgtgcatagcacaaaatctagcccagaataggtgtaaaatatatggcatttgaagtattcagagttaaagattaccacatacaactaagacttactgtttctggaccaaatgaccatatattattgaagcctatcttagacaataaatgtaaataaatcttagctaaagcaaattagccttggtagtctgggagggttttcctttgaagatgttaataatatagttgaactggttgtgtttaagaaagcagagctgacagacaaaatagagatagatgacacaggaactcaccagttaataatagaaaaaattcttgtttttccaagtgattaatacaatattacattgtatttaatgtagatgaaaaagcttatttggtactcactggggaagccaccactcagtataatcatatgctcttttcaaataatcccatgctgctaactttacagctaactgccagcatttgccaactccgggcactctgatgccctctccacattctttcttctctcttgacattgactaagtccagccacccataattcttgacctaaactatggcacaaatatccatgaaacagaacatttatttttggtgataaagctggttctagatgaaatggtggtatttctttatggaggagctgcaaggaggctctcttcatttgcttgtgtgtgtaagtaaagtttctgatttgggataaaggactgcctggaccctcaattattggtgtttattctatggatattggctgagatattttgtatgggaaaaccagcagatgagttaatgagcatccgtctgagccatactaacctagtggcacctcctgggaagccagggcgttctagaatctgtttatttctcaaatgaaaatcctaattcatagaagttaaaagtatagaagacaacttcacgtactctttcttcatgatacctggattggttacaacttagtaaaattttagcctgtttggtccctccttccttactggctgtctgagtctctagccttatataggaaaaccttgtcttctaattgaaaatgatgacaaacagaagttatgacagacacatttcaaagtagatgctatttttcccaaataaatttcacatacattctaattcctaaacttatatattttcacatactttatataaatacctgacaccttaaaatgttttacttagtgagacctagataatgaaggaataaaaaggtgacttaatcccagtttttctaaacaagaagtttagaactcacgtattttaaacttgttaagtgatgatcaatataatgggctgtatatttggttgagagttaaaaatctaaagttttctcagagtactttaaggcattgctttctcagtggaaatcttcgaccttcacattctcaaaaggagaaaaatgtttcttgtcagaaaactagtcatggctagtccataagaagaagtccaagattgtatcagcttccctgtgaccttgctatgagatttgctacaagtaatttaatgcttttctatgtctcagtttactttttatctatgatacctcaatgatattattaagataatgtggatcaagtgttttgatcattgcatagaacatatgcatagaacatagaatatagaaatccccaaatataagaatgaaaacttaaattgttagaatgacactaactctgctacaaccttaaatagcatatatagtacctcagtgtctccatttttttcagctataaaatgagaatagtcatctttatgtttttcattaaacagtatattggaataaatagagattattacaaaatctgttgaaagatttcaacaaaatgtcatacatgcaagtgaggtgatgaatatattaattggcttgattaaatatttctaaaatgcatacacagatcaaaatatcacattgtaccccataaaaatacataattatttttcaattaaaaataaataaataaaattaaaatgtaatcaaacctctgaagctgattttcaaatatattagaggaattgattttaaaatatcaaagcgtaagaagtaaatgttttcaagcatattcagacacttatgaaggaagactattaaaagacagggagcaggactgccttttctttgtgtggctggctgcattttatgatggattcaaaaccccagtaatgagaaaatataatcagaaaaagtgatttttagcaggctgttgaatgacacataaaataaaatgtattcattaatgagtcagcaaaaatgttatgcatgagctttcagagccagaatttttaagcagctttttcatacttggtacagccatgttcctgaagtatcctctcacaacccccttctacctctctctctctctctttttttttttttttgtcctgtactgccaggttggaataatgaccaaagggaggggcaaaacaaacagatatgctcactgtggcagaagtcactccaaagatcaaagactcgattcagccgtggctgccaaaatcagaaccacagtgggtgctcatcagcacggtgccctcagaaccacatgggctacccttgataggttagcagcttggggtgcaggccccgcatcctgcttagaaccacctgctgagaactggatgtgcacattaccttacccactcacaacatttgatttcaactcaattctgctctagtattatgtttattgaatgacggaagtctaacagacactgtaaaaatccaatttcacatcttatagtacccaaaagggaactgtgattttcctatatcagtgagcaaaatcttgagcaattagtaaacaagatcaccaatttctagtatttctatgagatatatttctttagttttctgtaaggagaaaataatatattggtaccttagtatccagcaatcttatattcatttatagggttatctcaagttaacatagtcaaaaacccagaagagggaaaatagagcccttgggaaatgaaaagaaatgccataaggtacacgctgttgcccaaatacatcattacttaccaaggagactttaatttggaaccaatttattcttctttaatacacagtaacaccagtaatctggaccctccattcatattacatgggaagaaaacactttcggaagaaagtacaatgatatctgtaagaaatgatggctctatctcagaatgaagaggagacagaggaggtgagggagaaataaaagtatgcaaagctaagaactatgtacagcttgcaaacatctctattattgagtcctgcagaaatcattgtggtaaagctctgcacaaaaaatagtgttcataattattatgggtttaattgtgccctcccaaaattcatatgttaaatttctaaccccaagtatctcagaaaatgaccatatttggaaatagggtccctaattaagatgcagtcgtaatggagtaaggtggttctctactcaagtatgacttatgcctgtagagaaaggggaaatttggacatgggcacacatacactgggagaatgctatattaaagatgaaggcagaaatcagggagatgccttacaggtcaaggaattccaacgattgccataaactccagaaactaagcaagaggcatgaaacagattccctcccacaaccctcataaggaaccatcccttctaatagcttgatctcagacttcttgcttccagaactgtgatccaataaatctctgttgtttaaacaacccaatttatgatattctattatggcagccctaggaaactaatacaataatgattatcaggaaatcatcatgtaaagactaaatcaagttcagaatatattgtttaagaaggttgaaaaatataagattcattgcagaaaacgaatcaatatgcttttgcagaaataaagcattcagtgtttgagtggcacaaatatcgaaacaataaatgatttctttacatggaacatatggttttcaatttttcctaatccaatgagatgttgccatctttactaaaaagacaaactgaaatatactctacagaacacgtcaaagaaagagtccccaacctccaagaagcattttgactaagaaggaagataaatatcaacttatttttatttgtttgtttaaaatacacagcctaatatggatgaaacggttacaaagagaagttctgggtaaagaagaggttgtctacttagaagaaaactactaataaatggggtttgaatctacataaaaattaaaaggcattcatccagatgagaagttaaagagaattctaagtatgaagaatggagaaacatgagaggactgaacaaagcaagagtaagagaaggtaggggcagaaacaacagcagagggaatatgagaaggctagctggtattgagagtgttatcaatctgaaatgggcacagaaacggataaaaaagcctgtagacaggtaagaaagacaagaaacagtaacattcccatatttaaacaagaagttgaaaacatctagtgcaagaattaagctctaatctttaaaacaggtgctcttaaatgcttttgcatgaataagagactgtaccttgatttttcttcaaaaggattcaatagtgggatggaaatgtgtgtgtgtgtgtgtgtgtgtgtgtgtgtgtgtgtgtgtataagctaagctgttactgcaggtaggtcaatgaagaaatacttcatggaacaggaagttatagcgttatacaatgtgttccctggagaagtttaaaaaaacacacacaaaatagccctatgaagtttgtttgctctgttaaatagctttaaaattctacccctactaattgttcttaacattttatttcagccaattatcaatttaatctgggagaagaaagatctacttgactttctgacagccaagtcaatccaactagaaaattcaaaccctacaagaaaactgctttgcaacatttttaactgacaacagaaatccatgataacataatcacctttttctttctttcccaaactcattctctctaaagaaaataaacaatggtacaaagatacttggatgaaatgaaaaagtgaagagagctattccctctttatggtaataggatgttcttgttcaagatggttaaaaatgtaacctgagttctttttcaattctctatagaagttggagatggtcttgtctacatatctaaagtaactgaattatatcagcaaatataagaattacagcttaatttcacccattttctatcttaaataattcataaattaattagtctctttattttattcattggaaaaatgttggcttagatgatgatattcaagtagggacccaaaatgttaaaaacgaagataaggaataggttttgcatagatactaccttttttcccactgatttctatggattttctattacagaaataacttctgcagagcactagtacttctgcagaacagagtaggatattctcaaaactgggatggtgataaaatgaataaaatcagcatcaagtgatgagaagcagatgagtaaaggaatatgccacagcactaaaataaaatgggcccttaattaaaagtccttgattaaattttaccttatgaagagaaatattgaaaagaaaaaggaagaaggagagatgaagggaggaaagatggaaggacagaagaaaggaagtgagggagaaaggaaggaagggaggaaggaaacagaaagggaggagggagggagaaaggagaaaaaagtgagttaaaaagcaagaaagaaggaaagaaaaaaaaggtaaagccattatagaggtattttctcatcctttccccactggctggccctctaatcttccttctctgcttcccaccccaatccaaatgtctgggacacaagtaggatagttgggaaaaaggggaaaaaaggaaaatttctttctccagctgatgctcactttggtaccaatagctctaactcaacagttccaagtgtttttaatctcatgtggtcctttgagaataaatgaaacttatcaaccttctctccaaggaaggggtggggagaaagaaaaagcatatttacaaatacatataaagtatacatttagataaaatataaagtatatttgcatacattttcaaagggcttatataaactctgaaattcatccctgcaccatctaattatccattagcttaatatgaaaaaccattggctctagaatctggaccaagccataataaatggttggggatagggatttggagaaatggaaatgagatacaaaacaaaccgagcaaaaacacacacacattaaaaataaaaaggtgttccttctctccaagtcaacccttaaggatctggctcttcattgttcctggaatttagatcaataaaaaatatgacttgaccaataactatttaattaataaaaatagataaaattatatagcaatatatataatattgtagcaattcttcatgttttaatcattaattctacattactccctgttaactgtctttgatagtgcactaatatataatactgccctgattttgaacattagtctaatacttacaataacattgaaaaccaacaccatttaatattgtgattagcaactcatcagacatataggaaattacaaggagactctgcaacagatacaacaaagcaaataaacaataataaactaatttcaatgttttaatggctatatgtaagaggaaacagaccttgccttaactgtactaatgggaattgtttatatttgtttaaaacataataatgtttcgcatagtaattcataatcttcaaatgccttaaagtatatttagctcatctgatgtgactatcaactctggaaagtaaataggagagatatcattatccttttttcataagcgagggaagagaggctacaaacgattaaatgacttcattaatatcacaaatctaacatgtggtagagcaaaggctagaactcacaggttctgatacccagtaattttgctaccatgctacacagtactcaaaaagtattcattacacatagcttgcttaggcacatgtgttgtcttactttggaaatgaggacaatagaatacaccctcaaatgagttgatacccatagcacttattctttcacgataaaattttattttggcacacagtaaaacagaaagtatattagctatttaacaggtgcaaatagatatttttgaacgtgtactgcatatcttatggatgatgtttgcatgtagtacgtgtccatgtgtggggactagtgtacgtttaatcattttgttagaaaaataataccgttgagttaagcctgtgttttattgttaatcatgcatttagtaacagcacaagttgacaaatcacttataattgctacatattatagcagcacaattcacaattgcaaaatcatggagccaacccaaatgcccatcaatcaatgagtggataaagaaactgtggtgtgcatatatatattatatacacacactatcatacatatatactatatacatactattccatcatatatatatgcatatatctgatgcatatgtatctatttgcacctggtaaatagataatatactttcaaatatatctatttgcacctgttaaatagctaatatactttgttttactgtgtgccaaaatgcatatatatatatatatatatatatatatatatatatatatatataatggaatactatgcagccataaaaaggaatgaattaacagcatttgcagtgacctggatgagattggagactattattctaagtgaagtaactccagaatggaaaaccaaaaattgtatgttctcctgatatgtgggagctaagctatgagggtgcaaaggcataggaatgatgcaatgggctaggcatggtggctcagacctgtaatcccagaactttgggaggacgaggtgggtggatcacttgaggtcaggagtttgagaccagcctggcccacatggtgaaaccctgtctctaataaaaatacaaaaattagctgggcatggtggtgtgcacccgtaatcctaggtgctccagaggctgaggcaggagaatcactttaacctggaaggcagaggctgcagtgagctgagatcatgacactgcactccagcctgggcaacagagcaagactccatctcaaaaaaacaagaatgatgcaatggactttggggtcttggaggaaagagtgggaaaggggcgagggatagaagactgcaaatatggtgcagtgtatgctgcttgggtgatgggtacaccaaaactcacaaatcgccactaaagaacttactcgtatagatcacctgaggtcaggagttcaagaccagcctggccaacatggtgaaaccctgtctgtagtaaaaatacaaaaaattagctgggtttggtggtgggtgcctgtaatcccacctactcaggaggctgaggcaggaaaatcacttgaacccaggaggcagtagctgcagtgagctcagtgagctgagattatgccattgcactccagcctgggcaacaagagcaaaactccatcttaaaaaaaaaaaaaggaacttattcatgtaaccaaataccacctgtaccccaataacttatggaaaaaaaaaagaatccacttcatgtagtaatatatgataagcacttagtaaatgccaattgttatgttcttgcctgggcaacttttggttgtcaactgagtagaaaaaagcgccatcttttagaaatctgtaattccttcttatctgtatgttaccttcattttcataaaaggtaagcagtaaagtgtattgtatcatacagtgatgaattttggaaattatgcataacattttaattatagcttgaatatcctttatctacaatatctgggagcagaagtatttaggagtttaggcttttttcggattttggaatatttgcattatatacttaccagttgagtacccctaatccaagagtctgaaatctgaaatactacaatgagcatttcctttgctcatcatgtccatgttcaaaacatttcagattttggagcatttcagatttcagattttcggattagggatgctcagcctgtattttaaatatgaaagacatgcacttgttaaggacttttgcagagattttactttgcaattatgagtcagcccatatatgacttctgttacgcaattgcatatttctcagaactctattttttttcatttgtattacttaaatgtttacttaactgggaaatagaagatttgttttttgttaaagtgcaaataaatgacaaaacaaacctaaataaaaaattagttgatttaaatactcaaaaaacccaaaatgcttcatgaataacatagtagaacatactttgagaaaaaaatataaacatacatatatctgacttcaactatcttgttagttgatttgtgattacttaattagatttattaaataactaaaaactgacttacaaatttataagcatatattcaggtttctgttgtaattaaagtaaaaaaaatagttaaaaatttacaatcttattgtccttatctttcctgtttttacttgggaaattatccttcttacttaaaaattttacttcctgtttttatctctgaaatatatagtctaatatgaaaatacacaagatggcagattgcaggggtgagctcatttcttccttaaggaaatgatataatagaaattataatctagtggatttacctgtactatatttctctcttaatattcaaagcaacccttccatcccaaataccagagccaaccttgaacagaattccaaagtgtggatgaaatttacctccagttcctcttccttatcccctctttgtccacgtttccttttgaccttttggcccttcctttgaccttatctaaagatgtatttctggtgttagaaagtgttagaactttcctcttcattttcagcttaaactgaagtctttatttaacttggattcctaactattgcatccttagcccatattaccaacctatgaattgaaatgttgccatctatctgaccaacctaataatgtcttgcatcctgctctcaataggtcacactctcttagataccagtgaaagacttgagatttttctgtttcctgcatttatctcagccttccatgtgaatcacctgtattaaaattttagtaatccccactttcggaggctgaggcaggcagattgcctgaggtcaggagttcgtgaccagcctggccaacatggtgaaaccccgtctctactaaaaatacaaaaaagtaaccgggcatggtggcacacacctgtagtcccagctacctgggaggctgaggcaggagaatcgcttgaacctgggagatggaggtgcagtgagccgagattaggccactgcaccccagcctgggtaacagagtgagactccgtctcaaaaaaataaaataaaataaaaaataaattagtaatctcatttctgattcacttgatctgggcttacttccttttcccagctgggctctctctatggttctagtatgctttgtagtgattaaaaggattaggataaataaaaccactgccataaaccaaaaaatttctggtctacctcaagccctaatggtcaacttggttttccctcgcccctagttattctgtttatcaaacagaaaataaatactctttaccaagtttcataacatatatattaaaaaaatctactaatagcatttagaaggtgagaattcatactgaatcttctacttctagatcaaaagcactagaatactcagagtactctagaaatgtatgatggaggtaggtgactcattcttttagaattcatctgtgggaggcaaaataattgcaccccaaaatgcccactgcctaaagcccagaacctgtggtacatggcaaaatgttatgttacatgaaaaagcgactctgtaaatgtaatgaaggttgttaacactaaaacagggagagtatcctagattatccaagctggcccagtctaatcatcttaaaagcagagaacttttttggctggaatttggaaaagaggtgtggtagaaggggaaatttgaaagatgtcaagtgtaataatgattcaaggtgctgctgctggctctgacatatagggacagcacacatgcaaggatctaaagatggttcccagctgatagcaaggaaatggagatcttagtcccacaaccatgaggaactgaataagcatgaaagtggattttttttcagagtttcctccagttaagaatccagccgacaccttgattttggccttgtaaagcctacagcagagaaactggtagagccaatctaaacttctgatctgcagaactgtcaaataataaatttgtattgtcataagctgctaagtttgtggttggtacaacagcaacagaaaacaaatatattatccaacatactatcccagtccaaaggccaacagacacattagtttaaaatcatagagtaaagaattgggacaggaaccactactatgaaaaaagaaagttcttaacactataaatacattttccccgatattccttcttttagtcatatcctcagagaaagtaaaatacctcgagactaaaggaaaaagaacacagggagtgtatatctactcaagtgcaaattgtcctcaccaaggaacttcacaaatgtgctcttcctcacaggcaagaatactatactaacagtgcaacattactcaaaccaactaaatccactctcttcaacaggaaaaatctgaaaagagcttgaaagtttataaaggcatgaagataatgaacatttaagaaacaatgaaaaaaagagaaagaaagtccaggcaaatgtacccaaaattcacagatcacatgcctactggggtatgttttgcctactatacaagttgtcttataatcatacctttaaaggaaattatcttcaaaaactatgattatttatttttatatgtcatcaccaaagctagtttttaaaatttatcttccaaaatgaattttctttcttactcatattttttacacagctagcttctggtcttaactgaacaaaggaatattggaagaaaggcagttatttccaatgattttcggcattgaagatttagaaaagttaacctttgaaaatttactcaacttcagaacctaaaactttttgaggtataactaccaacaacatgctgaaaacaaatacttttgcaatcgactagaaataattttcacagtaaaaggtaaattctcagcacgctgcacatattctactttataattatatcacagtatgaaataatatgaaagaaaataaggggaacaaaccaatataatgatttaaaattcttatagaaacaggataaatgaagttaattttatttttctgttgagatagaaaatatactgagctaaaaattactaataccacactttgaatcttcccttttgtcttccatggaggccacacatggaaggatagctccaatgacctgggtaagggcaatgcaggatagaaatggccacgtgagaaaatgtacacacattcctttcttttgaataccacattctgcttcctagaggtccctgtaaacttattaaaaacttcagtcattttgtaaggagataccataatttcaaggggctttgaggctcatttatagcaaattaatccccattttatgtctgtccccatttaatatttctaaagggggtggataacaaatctcgccaactctctttttaagggctattcagatactaaataaaccaggaacatttaaaaatacaatctcacaaaaatctgctttgcttaaccttctctccttctttaaaaaataagaaaggcatgatgttctttttttgttaattaattcattttagacaattccttaaattttcattttaataaatttttgtgtgggtgcattaattactctcaaagatgctttacaactgttacctattaaaagcctttgttagtgaataaaaaaaaagaaaagaaaagaaaaaacttccagcatgctcccttccttctctattctgagcaggtccttgctatcaactgctggagtatgcttgctttgcacctagagctataattattttgctttaattttacaaaaccttttgttccattcccacgagcccacctgatccttatattacactcgctctattaaaacactcatgcagaacaaagcatggctgtactgattcataagtaactttttttttttcctcagtaaaatgccactggctaggcttcgggacacagtcctgggcttcaccatcctatgccaattttcatatgttagaacaaaaaaaatatgttgtatcagagtgttgtactcttccccaagatccttcctttgccccacttgttttttgtgtttttaaacatattttatcttatacttaactttactctggggcaatatacatgacagaatgttgaggatggtggatatattaaaagattgtaatcatgttgatatttcttttattcatgtggttaaaattcttaaaaatgacttctgttgccttatttaattttttttttctttctccttactccacctcttttccttgagatcttgcaatacatgtgggcttttggcaaaaaaaaaaaaaaattgcagtgactcatcaagaaaactgtttgtttgctctgaggagcaccctgaggaccctctgggctgcacacggagccctttgatcctaggaaatttatttcttccagatgttttcccgacagccacctttctgcaatgtccctcttcattatgtagcataagaatactcaagacccactgctatggtacagttttcctgaatggagtgtgacagggagttgacatttgattgagctgttggattcttcttgccttaggcacaatgatggaggaaggttaacactgaggaaaggcagaactgggtctgttcaggtacagtgtctttaggattaggatggaaattatgtgaaccaggccaaagaaattatgtaaaatctacaaatctgcagaccattgatcatggacctagttttcttcaaccctgtaaaatcttgatgcctggatctgccatgttgttactcctccaattttttttctttttttttttttttttactaacatacaaagtgcggacaggaaagttaagcctttggacaactcttgttttttcttggcctggctgacagtgctagcggaaaggagaagggagaacaagggaagaatgcagagcaggtacaaaggtaaacatggtgtggtgggctgaataatgacatctcaaaatgtgtccacgttctaactcttggagtctgaatattaatttaaatgaaaaaaaaaaaagactttgcaggtataattaaattaagaattttgacatatggagcttatcctggattatctagatgggccctaactacaattctatgtatccttgtaacaggaagattccacatggacagaagaggccaacttaatgtgaccagagaagctgagattgcagtgatgtggccacaagccaaaaaacggtagtggtcagcagaagctgaggaaggcaaagaaaaggattctcccctagagcatccagaaggaatgcagccctgctgacatcttgcttctcgcccaatgataccgattttggacttttggcttccagaactgtgagagaatagatttctgatggtttaagtcaccaggcttgtggtagtttgttatagcagccacaggaaactaatacaaatggtaaccatttcaaaactccattgttcagagcatttgtgaaatcactgaagtctcaggttgaaggcacagtggaaaacaggatgccaaggcttgaagacaaaattctctgtggagatactggagatattaagggcacttataatctacagcaagtagggaactaaaacagggcaaagagagtgcacaagggcattcaacagaagattaaacagattatgaatgtaaatgttctaattttctaatgctggtttgcattttttatgaagtaggacaaatctatagtattttccatttaagttaatgcttacacacataatgtattaccagccattttccccctaaatcaattatcagtatcattaactttagtgacatttgatttggcaaatataaactatatttggcacatatatactgtattataaaaataaagatcctctatctgcacttgaggtaactttcctttagctattcaaagaaaaatctatttttaaggtttaacccaaagataatatggaacctaaacccaagaattcttaaatagatatattaaaacaataacttggctgggcatggtggctcacacctgtaatcccagcactttgggaggccgagggaggtcaggacttcaagaccagcctgactaacatggagaaatgctgtctctactaaaaatacaaaattagccgggcatggtggtgcatgcctgtaatcccagctactcgggaggctgaggcaggagaatctcttgaacccaagaggcagaggttgcagtgagccaagatcacaccattgcatgcagccaaaaaacacatgaaaaaatgctcatcatcatgggccatcagagaaatgcaaatcaaaaccacagtgagataccatctcacaccagttagaatggcgatcattaaaaagtcaggaaacaacagatgctggagaggatgtggataaataggaacacttttacactgttggtgggactgtaaactagttcaaccattgtggaagtcggtgtggcgattccgcaggggtctagaactagaaataccatttgactcaaccatcccattactgggtatatacccaaaggattataaatcatgctgctataaagacacatgcacatgtatgtttattgcggcactattcacaatagcaaagacttggaaccaacccaaacgtccaacaatgatagattggattaagaaaatgtggcacatatacaccatggaatactatgcagccataaaaaatgatgagttcatgtcctttgtagggacatggatgaagctggaaaccatcattctcagcaaactatcgcaaagacaaaaaaccaaacactgcatgttctcactcataggtgggaattgaacaatgagaacacatggacacaggaaggggaacatcacacactggggactgttgtggggtggggggaagggggagggatagcattaggagatatacctaatgctaaatgacgagttaatgggtgcagcacaccaacatggcacatgtgtacatatgtaacaaacctgcacgttgtgcacatgtaccctaaaacttaaagtatgttaataataataataataataataataataataataatacacattcaaaaaaaaaagatcacaccgttgcactccagcctcggcaacaagagcaaaactccatctcaaaacaaaacagcaacaacaacaaaaaacccaataacttaaaattggaaaagtccaatagcaaaattattgtgaccaaaccacccagtttatccctttctctagttcatcgttaaaaacacttggtagcagcattattaataaagaactaaaaatacacctgaactctatgattcttcttagctatatggcttttcaacaaccaaaccattaatcttcgtaatcaccatgaagctaatagatgtagactacagatacagataaagaaataagattatggaaagcttaaagagattctagatcaatcagcaaatgagaagaactgagaaaatcaagtagaaatgctggctgcgttctctagtacctttgaaaagctactagagatagaatccttcttttggagaaaatagtccaatgacagaacatgtaaaagatggacagagtcatttattttttgctactttcatattaacacagagtattcatttggcagtagttttcaaaacaagaagaacagtctatttttaaataaaattaaaaaaagtaactgatgattaacataactactgtaccaaaagaaagataacataagtcattcaaagtaccaggaggctaaagaaattctaatagttatccctatacaccttcatttcaataaacatgaaaaatgggaatctcaatgtgttgtcttttcaatttcctaataataccagggggactcaaggcagttcaaatctcaggacttcagaggccactgagttccactatctggggtgctgagcagtcgatatgaattccaacttcatactctccttgtctccttgttctatttgctttaacactatgtacacctaacttatctttagaaggacaggatgcatatcctttctataaaaaaactatgcagattttcatagtgccatataattacaggtactctttatttgtttatgaacccttccaacaacccaataggcaattgttaacattcccatttatcactatctcacctatttctgagttcctagagggttgagaacattcttttcctgttactatcttctcttagttctatcacccctggtaagaagttaagtagtaactagttgacatagaactcacggcaccgaagaatgggtggccaggatcagtgcagattggttcatttgggtttgtaacctttgtgataaattattgagtgctatagagataaaatataaaataatttttaaaaatcctactacaaaactaccttaacccttttagcacagattatgatcctgaaagctaataatctgtactgtgctataacaaatataagaggatgcctttagtatgataaagtttgctgtgatggagaaatggttgagataaatgggactttaaaatcaagagtcaagaacatttggaaagatatgagatacacttaggaatcttacaaatgaacaaggacttgtctctagtttcttagtcataatgtttctaagacacaaattaatcaaaatcccaggttatcagttacttaatataaattttccaataaacaccccttgattacacacttaggtcttcaaagtgggtagatttatacaattcccctctacacaggcaaattacatacacaaaaattatgaagttatttttttctttgaagtagtttagtgaatttttaaaaatctgtaatgaataaaaccagactttaaatcctgaataaaaccagactttaaatcctgaataaaaatgttctgtatcaatgattgtcatgatatgtgtcttggtaatagattattgcataatttttttcttaataaaatggtatctccatcaaacatgtagatcatggagtcttcccatagggacttttaagatcatgtaatccaatccttcattttacagatgaagaaacaatatgtgagtgttttaataaagcctactttaagtttttcattaagacaaaaatggttgttatatgaagagaaaaggagaaaaagaattaatagtagaaagttggaagtgaagagtgaggaaaaacagaaaggctttttcattggtgcagagcactaagcagagatgcattctctaatatatatccatgtcattgctagagactagcttaaatagtacaaagttggtaacatccttctcttttcttttttttgagacggagtctcgttctgttgccaggctggagtgcagtggtgcgatctcggctcactgcaacctccacctcccgggttcaagcgattctcctgcctcagcctcctgagtagctggaacaacagacatgcaccaccatgcccagctaatttttgtatttttagtatagatggggtttcaccatgttggccaggatggtctcgatctcttgatctcatgatcagcccaccttggcctcccaaagtgctgggattacaagcgtgagccaccacgcctggcccgtagtatccatttttaaaataatcacttagattataaacacgtaaacaatttagacaggtttacctctagggaatcatatgacttaccataaataagcaaacatattctgtattaccaacatgctaactgttcattcatttacactgtatattacctctcacttccccagaatatgcaagttgaaggaaacataacaaccattgtaaaactctatcttaaaataaatattattctataaagaaaaaacaaacatttttaagagtcatataaaggcaaattttaatttgaagacttgatactaaggaataaatatatatacctaatatgtattcacaaaagttaaaaactaatttttttaatgtaggctgtggaatcagactccctgggactgaattttgattttgccccatccttgaccttgggcaaattttttctctctgtgcctcagtttcctcaccagtaaaattaggataacaacagtgactatttacaagagttgttgtgaggatggaatgccataaatttacatataaatcttttagaacagggactggcacatagtaattaataaatgttagctgttacttctaatatgtacaagcctgttaaacattttgcaggggggagataaggtgtttctcattaatgggacttgttaaggcattttgtctttcaaatggctgcctaacttaattcataccaatattttatttcagtaggattaatgaaatagtatgaggaaaagccttagtgtggtttctttagacatgtttgagacagatattctcatccttttaaggggagtaatctaaaatgctacacccatttgtggcttaaagtaactgagaagtgactctcacaagatgacatgatttagctgtgtccccatccagatctcatcttgaattgtagctcccataattcccacatattgtgggaggaacccagtgggagataactgaatcatgggggcggtttcccccatactgttctcgtggtagtgaataagtctcatgagatctggtgattttataaggggtttcccctttcgcttggctctttccttctctcttccctgctgccatgtaagatgtgactttcaccttccgccatgattgtgaggtctacccagccacgtgaaactgtgagtccattaaacctttttttctttataaattacccagtcttgcatgtctttattgtgagaacagactaatacacaaggcaaaggagaaaatgggggagcagaagaggcttagcaggatgcatacatcttctgatatggagaacatgaaagcactcactgaggaaagtggaggtgctggctcttcagcaagcaaatgctccacctatatgctcccacagtatcttatacatgtctcaaagcctttaacctgctgctttgtaatgatttgtttacatatacttttttttgttattatatggtcttctacttgaagacaaaaactgtcccattcacttttgctcagtagttgctcagtggcatatttctggattgaatgacttagttaattaataacagttactacaatgggggaggctattgattttaaagcgagagctaagactcacaggttctatccaatggaggggcgtgttgaagtagaagtagctagctattatggtactgacaatggatctctgatctctgtgctggggataaatgctctaagtgagcatgaaatatttttgaagtttatacatgtgtaagttttttttccccttaaccataataactttcttttttaaaaatgcatgaatatttgagtaactaagtgcaatgttaatgttgggtgcaaatataatctgcctaataaaccatggaaaaagcctgaaaataaattcaataaatagagtcctagataatgtgttgtgggagatgagagaataagcaattaattatagatggtggaattaaggtaattttagtagagaaggtaatatttgagcaggatcttgatgcaaatactaaatctaaatctgtgaaaatagagcttatatccttaatgtagaaactggctgatatgcagagataagttgaaagtcctgtgaataggtgacataaacatcaaaggtattcctaattcccaatatacttgaaaaattggctattatttgatgcatatatccctgtatggcaatcagtccagtaaataaaataataataatgtcctttaaaaaattcatttattcatgaatattcattcatccattcactctttcaacctaatgtgataatctactgaatatcaaattccgaactgtgctgagtacattggaaaccacggtggtcaagacagaataaagtctctgcataagaagtaggttcagacaattaaattaataattataatgcaatacatattatgttaggtaaagtactacatgttatggaaatatgtaattataagcaatttatacttaaactcattacataaatatggcagaactatatttggataaagtgctggtggtttttattgaccttgaatttcttctgatttggtcttgtttacctacagagtagactgccacatctgggtcttacttatactgtttgctattcaaaatcttgcctcttgaactacctatttaattatggattcatgaagcacaaatcaatttattttcttaaattccttaagactaaacatggcagcatttttcctactccagtgtttctcttctgttaagatacatcttttggccaggcacggtggctcatgcctgtaatcccagcactttgggaggctgaggcgggtggatcacgaggtcacgagatcgagaccagcttgaccaacatggtgaaaccccgtatctactaaaaatagaaaaattagctgggctggtgacacgtgcctgtaatcccagctactcaggaggctgaggcagaagaattgcttgaatctgggaagcagaggttgcagtgagctgagatcgcgccactgcactccagcctggtgacggagcaagactctgcctcaaaaaaaaaaaaaaaaatacatcctcaggaagatgatggtgatgatgtatgaaactgaaaaaaatatgcttagttttgtgagattagatctacagggctgagaagagtaaaatcttgtttggactagtatattgaacaaaaaccacataggagtcacagtggaaacaattataggcaataccaattcttatcattttaatgaggagaagttaaagttggtcttttcgttgtggttcttaaatgcaaggtataacctatagtccataacaaatttttctttagaaattatcaagtacacagtgggttttctttagaaaccacaattctagattttttaaagcagaaaatatgctgtcctccttcattttaattcttttggaggaatagaactttttttttctttctatagttaactagagttgccacaggcaagaggactaacagagtaaaatactaactgatccaatatatactgcatttatctaactggatttcatctagctcaacatcatggctttgtagtctaagcagtagatgaacagaaacaataaactgggcaagtaatgttttgtgtgaataacagaaaagagtgaacagaaatataacacttcaccattgcacaaaatacaattaaatatgatttttaaaaacccagccactgatccactgcccaatcataaaagaattgtaatcagttcaagtagtcttaaatatagtgaaaatgtcctcaagatacacagcatgagagaacaaagagttttcactatcatctgctggactcagggaaggtgtgctatgtggttatcatttgagtgctctgtgtttaagttaatcaatattataaattatgcatgtattttagaagttcataatttctattaacttgtaaagttattgaaaagaaggatgaataaaccatactacaaaaataagaatgtgaataaatgccagtttttcctcagattacagatgatataacatcgctgctattttaagaaaatgagactggatcagatgtgaacatttatcccttctctttaggatagcctatgaattcaacacattgacactaattataacaatagctaacagttaactggagtactaaccatgtgcaaagcacactgtaattatttcacatatattatctcatttaatgctaacaacaatactatattataaacaaggaaactgaggcaaagggaagtcatttgctctagatcaccagggtagtaacgggtggatgtaggattcaaaccagacatactccagaatccatacaatatcagaatagtctgaccccaaaagacacacacacacaaaatggatctaaccaataccttgggaacatcatctaacttttctgggctttagatccttcagctgaaataggagttgacaaaccttttccaaaaaggataaaatcttaaatattttaggctttgtgggtcaagaggcaaaatcagagatgtcatgctatttaggtaattatataattggagagaaaacttgctgtatctcagccagttagatgaaaaacacataatacaacaggaaaggataatcttcaaactattaaattatattctctttgtacgtctaatgtggagacaaattatattaagaacacggtagctgaaataaaattatttcagattagcacatcaggtgttgaatgttatcagtggttatcttagggggtgacagaagaagattttagggacagagggaagttttttcacttccagttaaaatttattttttaagtggtggaattgattgttatttattattattatattttactttgtgttttggagtagttttcagtattttttcctggttttattgaggtaaaactgacaataattttacacatttaatatgtacaatgtgatggttatcaaatacacattaccacggtcaagattattaacatatccatcacctcatatagttaccattgtgcatgtgtgtgagtatgtgtgtgtgctgagaatacttcagatcttactctctgcgtaaatttaatggatgcaagtcagtattattaactatagtcactatgctgtatatttgatcaccataagttattcatcttataattgaaagtgtgtaccctttgacgaacttctcctgatatccctgtccccagctcctggcaatcaccattttattctttacacttttgaaatctactttttttttcttaatttaattttaagttctgggatacatgtacaggacgtgcaggtttgttacataggcaaacgtgtgccatggtagtgaacagccatgttttcaatacatcacaagccatagtagtgagaaacaccatttctttttttttcttttttaattattattatactttaagttctgggatacatgtgcagaactttcaggtttgttacataggtatacacgtgccatggtggtttgctgcacccatcaacctgtcatctacatcaggtatttctcctaatgctatcccttccccagacccccactccccaacaggccccagtgtgtgatgttccccttcctgtgtccatgtgttctcattgttcagcttccacttatgagtgagaacatgcggtgtttggtcttctgttcttgtgttagtttgctgagaatgatggttttcagcttctttttaaaaagattccacataaaagtgaaatcacacaaaaaaaggaatttcagaaaaactaaaaaattgaattaatatactgtcataggaaaaaacagaatttccaagaggagtgggggaaaataatagtatcagaaatataataataatagatctttttcctgtggaaaatagtacatagaaatagaaagtactgaaaaggagaatcagaaaagattatggctccagaatcacattatcttctacagtttgaagaaaaaaaaatgtggctaaaagaaaaaaagtatttccattacacaccttttataatgactagaataaaaaaatactaatatcaagtattgacaaggatattgacaaggatatggagctactgaaactcttatacattgccagtgggaatgcaaaactggaaattacccaaatgtctttcagtgaattaatggtaaatgatcttctgtatatccatacaaaggaacactacttagcaataaaaaagaaacaaatcgtgaaacatgcaatgatatgaaagaatattttattttatttttttaaagacagggtctcactctattgcccagactaaagtgcatgatcatggttcactgcagtctcaacctccctggctgaagtgatcctcctgcctcagcctcccaagtagctggaaccacaggtgcacatcaccatgcctagtcaattaaaaattttttttccttagagacagggtctccctgtgttgtccaggctggtttcgaattcctgggctcaagcattcctcctcccttggcctcccaaactgctggaactccaggcatgagctaaccatacccagccatgaatgagtcttaatgcatcaagctgagtgaaagaagccagtcttaaaaggttatatatatatatatatatatatatatatatatatatacacacacacacacacacacacacatatatatacatatatatacgtgtgtacacatatatacacgtatatacacatatatatacacatatatacatatatatccatttatatgacacgtatacatatatatccatttatatgacaactcttggaaagacaaaactataatgataaaaagatctgtggttgccatgagttagtggtgagaggatggataaaggaagaagttcttcagtgtgatggaactctttcatattctgatagtggtggtggtgcttgttacataaatctatatatatgttaaaattcatagaactgtataccaagaagtttattaatgtcagtaaaaatattcaacattttcagaggaaaaaagggagtaactgattacatattgaattattggaaaatacaggctcaaataaagccatggtttctcctactaataagataatttggtaagagataacactgttgatgaaaaagaaacctgcagttctacctccctgccattagttgaccaaaatgagaatgtctaacatagctacaaatttaaataattctctgcttgtttaaaacatagtctctaatagttcattacagtcattactgcctgttaatcaaggataacactagtatttgaattttgtaagtatgacagcaaggtaaagactgttacttaagccaataaattaccatatttcataaaaatctaatgattctgtgaacagactatgtagttcaatttttcttctaaaccctgtaactgcaatgtattttcactgatatttttaaagagttttcaaaggtacatttttttattgtggtaaaatatatattaaaaattgaccattttaaccatttttaagtgtacagttcagtggcattatgtatactcacactgttatgcaagtatcaaaaccacctccatctctagaacattttaacttttccatattcaaactgtgtaaccattacataataatcccatttccccttcctcctagcccctggtaacctctattctactttctgtctctaggaatttgactatactaggtacttactcggcacaatgcattaaagttttatccatgctatagcatatgtcagaattttatttctttttaaggaggaataatattccattctatgtatggaccacattttgttaatccatttgtccattcatggacatttggattgttttcaccttttggctatcaactgtgcattccttttgacattattgtcagccaccagttttttcctcactagtcagactcaagtcatattctgacactctttaggaatataggacatttcatttacaatagttaggtttaaacaggatgtattcatttgctctcacactactaataaagatgtacccaagactgggtaattatttaaaaaagaggtttaatggactcacagttccacatggctggtgaggcctcacaatcatggcagaaagtgaaggaggagcaaagacatgtcttatatggaggcaggcgagagagtgtgtgtgtaggggaactactctttataaaaccatcagatctcatgagacttattcactatcatgagaacagcacaggaaaaaccgcccctgtgattcaagtacctcccactgggtgcctcacacaacacacgaagattatgggagctacacttcaagatgagatttgggtagggacagagccaaaccatatcaggggacctttcaagtttggtcacaaggtctaattaattattttcatgcataggatctaaagagcaattgtatatttatcaacttatgtgttcaaatttggtcattagcttaacatatgtgtttgtatgcatgtcacatgcatatctgtgtgatgatacatagagctgtattatgcataatgttaaagctttattattgtctggttagagaagcagtcactatccagaaaaatggtttccaatgtgaagaagcatgttaaatttgacttcactgaattgaaaattttaagatgaaacaggagttgggttcctataagcggttagcgtgcaactagactccatcttttaacaaccaaagcagaacatctgggtgggtccaatgcattaacattttaaaaaaactttataggttttaatatgcagctagaattaggaacctctgagacaaaatgatcctgagttgggggagctaagagtaaacaagtgaaggtaattttaaaagccggttagggcctggagcatactgagatgaagggaagagaaatttagaattataaatagcaaaagatccactcaagctagaaaagattaagtatccttttagagttaagagtagaagaggcatcagttacaaggataattaatatctagattataaggatctgctattataaaacttatactagaacaaaagtcatgaaaatggtctgcggaagtcatgaggtgagaagaagataaacaggtaaatatttaagcagattatagagttctggaaatgtcatcaagtctcttgattgtgtatatttttgttccatttaaacacttgtcctgaggtttataagtgaaacatgatgtaatttatcatctaagtaaacatttatcttatacaccaaagcacggtgaatacacacacacaaacacacacacactcatacacacagacattttcattaacaagaactagtaccaactacagctcaggaaatatttgttgattaaatgaatcagtctgcttacagtatgcattttcttttgtgctgcagaagttgcaatacaaatgaaactaaaacttctgtgtgctgattacttttctcagtctgcttatctgagaattaaagaatttttaaaacaattttatgtattaatttgcaaacttctttaataatagatgttcattgtaactggtgaaacaataaaagctatttaaagaaaaaattaataatctttcctgattcctttttttgttcccaactctgtgaaataaccaatgtgaagaatatggtatgaattattttctatagctttcttcatgttcatataaacatacgcaacatatttattcataaatactcattaccctgaaaattatggtcattcttccaggttaacagctatagatataattcattcttttcctaatggctgcattatcttcaataacatggatgaatcatctgtccatatcatatgatatgcatgtagtccaattcaagaaatcagtatactttttttttttttttttacaaattttactaaaagtattactaaatttttacacaggatgctcaacaaacactgaagacctatctggtaccagctttggtgaccaagaaagaaaatcagtgaggtactcctggttttttgccctccagaaagtcactgactatcataggggagacataacagtaagttttttttttttttaatttgagagaaacttctcagagaatttatagtaacaaatgcttttaaagcaactatttaaaagaagtaatatatcactagcaattcattcttcattgtttccaatgcatgatcagtatttagtagcaacagaagacttccctatatgatgactcaaaaacaaatttccaaccactaagaactcagataaaggaccttactcttgagacctcaaagtgatttacatttccactagtacttctattgtaatatatgatatttataaactagccttattccatggaactctaaatatttaatgcttcacatatatcatttgacttttctgcatgtgtcattaagataggagaaagtgtcccctacagataaggaaaatgatgttaagacaaaactgacaacacctgaatcaagtctccagatagccccatactctttccttccaattatacttgctgccttgctagtggtaagcaatgataacgtagacagtattatgtcatcaattagagagtctcacttagcttgatataatcagtttttatttaaaaatgagagctttccatgcaaactgtttttctatcttctaaaaggcttgtgactaaaacttcactgacaagtttttcaggtgagatgagtgtaggttaactactgagcagccagagtctagtcaggcccctcacactttccagtgctacaagaagatgagcagatgtggggttagatgtggaacccaggttcatagctgtacctgccaaccctaacctagagaagggaagagaacactgatggtaaccatggcaacagtaacaatgctacacatctatcacttattgattatctaacaaagtcttaaaatatcaagtaatgtaagcaaagaacaattcagtgaaattttagcaaaggttaggcaaattttatatggtcaagatagtacatttgcaaacaagtagaagaccttgtcaaaaatctaaatcttctaatatccagtaactctcttgtctgagccaatttattttcctacatctttgaagacattttattaaaaaaggttataactgagaattcgacagtaatcagaagagtgatcttcattctgtattcagtgtctcttgaccccctgaaagaatctcagctcagcatggcttcctcccttttccagttgactcagagaacggtgctttcaaattgccttttgggatacatgaaggggtgcatttagagccaacctgaagtgtaacactctttattgttcctgagaaacgtgtgcccaattccctagaaatttactgtttcaaagagtcacaagctcctgattgcttctcatcagtcttgaagagattagataagcttcctccctcttacaaaagctttttcttcattcaaaattcctttgagaacaaaacattgaaccagaattggatttttaacaaaatattataagattgttgaaaacatttttttttctcctgaggagaccaaacaattcaaaagatatattaatgcacattctgatttagggctactagcaacatattgcaaagagtaaggtggtgccaaagaacaaagtcccttctgctaagcaggaaagatattttttaactgccttactttagaagatttcaatggactgctaagggctttcacacagataatctcagaagtcaaagctcaagaagtagggggaagaaacaactactggaggaccctaacaggtagcattgcttctaattaccgtaaaattgttatgtatactgatgccccacatcccattcccagactcagataattattctacagtaagagttggctttagaatacttgttcaagtgtgtcagtaatagaaaatgacctcttcagaaatgggggtgtttacatgcagtgctcctaaagttggcacacatggaaggtaattcagggttatgtttgcagtggcacccatcatcagcaatgtttcaacccccgtccatctctctgtcctggttttaccaagggattcacttcaaatgtattcctcactggtctttagaaaacagtgctagcaattcataagtatgtttgaattttcaaagtttttctttttctttttctttttttttttttttttgagatggagtcttgctttgttgcccaggctggagtgcaatggtgcgatctcagctcactgcaacctccgcctcctgggtttaagtgattctcctgcctcagcctcccaagtagctgggatttcaggaacctgccaccatccccagctaattttttttatattttttagtagagacagagtttcaccatgttggtcaggctggtctcgaattcctaacttcaagtgatccatacgcctcagcctcccaaagtgacgggattacaggcatgagccaccgtgcctggccccaaagttttgcattttgatagcagcaataaggctgagtaccttcataggcctttacctctgatcacactataaggctttaattaagttagtcttaagaagaaaaatgtacaccaaaccccaattattaaacattggaattattccttcttattggtctaataattacaattttttacttctcattcatttttcaaaggtttttttcagtagatctaggttattggaacgattatatgtgatatgatggggtattgggcacagacacagtaaatcaagatgatgcagaaatgaaagtctaatgctaaagatcttaccaatcttcccagatccccatttttcaaaggaggaaatgtatagaggacattacatttatttccagccattatgatataattataaagccaacctctcaacgcactctctctttttgggaagtctatgacagcaggtattacaattctactttgccagatgaggtgcgtaaaccatagaaaactaactagcatccaagagaagaacagacttggatgtgggtagaataataggaagaacacttacagtcagatatatcagagtatgaatgcaggctcaagcttttttccactaaaatgtatacagcaatgtaatctcactgagcctcagtttctgatactgtgaactaaagattatgacatcaatctacagtcaatgctgtgagaattaaatgtgaagagttttatggagagggcatctgctaaatgtaactatttttcttaccctcctaaattttttcagtcttttagacatttgggctattagagaactaatgacctctgtgaccacactagcttaggctataactaaatgcaacagatttaaaaacaccaagcaggagatagcacagagtttgaatcagtgaggtctaatagtaatacaaacctcacttactggctttgcaattttagatgctacttaatcgttctggggctcagttttttcattataaaatgggaatggttcctactttgctgggtagttgctgagtgtggtagcaaggattacagacaactctttatacagtatctggtatattaggtaaatggattgtaatatatattgttcagattttttattaattaaggtttgtacatagactcatctcctgcacttaatatttctttttctacacaagaccttgaaagggttatgataggggctttgatcacatattagctggtttggctgtggtaatttagctcctgagtattgggattacagtaccagcccctgccattgactatttaactatgacttggataggaattctaggcctgaattttgttcgtctccaaaatgaagaggttagaataaataattcctaagattccctgtcgctataacattttctggttccagggtctttttactgagctatagcagataaatcctcatatctttagagcttaagctacttctctatggtttaatttccacattccctctactctatttcttctttaattgcaaaaggggataatttccatcactttgcaaacaaaccaatatctctattctggcttagtggcataccatgttattaatgcatcatacttaaaaaaagcctggattgttcttcaatccagaaatccagtcatgttgtaggtagtaataatgagaataatgatgatttattttcaaggttttctatgcctccaggtgcccggtcattgcacatgataaaatacaccaaaattaaaaatgagattaaggtttaacagataaaaaatacattctaggaacaaaacacatttttggtatgcatctctacattacacaacagccacttaaaaataaacaaaaacaagaaatccgttaaccaacaacagaattttaataattattaactagaaagaaaataaaattaacttgaccttatcttagaaggttgtcagagatctactctgtttatgcaagtgagaaatatgttttgaattataagacctctatttcagaagtccaagctctcctcaaactcagaggtaaaccttcaggaaggatttaaaataaatgtatggattttgttagcatgtgtatattatttacctttgaattaattttgatcttgtcctattcttgagctatccttcaattggtatttttgtgtgtatctactatgtgctttcccactgcattcagaataaaattaaaattcctcactctggcatttctctgaccacacctccagccattctgctttgctcactttgctctggccactctgaagtccttttagttctttgaatacagaaagtctgattcaaagctttgcatttgaatacaggattttgtatatgcagtttctgtctggagctttctcccctcccatactccgttctctaccccaaattcttcacctggctgatattattttctgtccttcaatgttcaaatcaaaggacactctctctgagaattctgtcctgaacacccaaaggacagtataagagatttcccccactcaatgttgtcttgcatacataacactttatgtggaccacagcttgtaatgttgtaattatgtttgcacttattacatgtctaatttccttaggagactatcaatttcatgatgaaggtctaagggatcatttctatatttctactattaaatatagttgaataatgaatcaatgattctattgtggtagactcagtagggctaagaaatgttaattaaatatggactattcccttaaaattttgttttctagtaaaggaataaggcatacacataaagtgctataaaatatagaaagtaattcctgtctcaataaaagtgtagatgagtattgcattagtttcttagagctgttgtgacaagctaccacaagcttgttggcttataaataatacccaatatttattatctcacagttttggaggctacaagtccaaaatcaagttgtcagcagggtcactacaggtggtaagtaaatttgatagttaggggagagtggattgtttctgtccaggtcaaggaaagaaggattcatgaaattcataacattggaaatgaacttggtaggatgggttggatttgcatatgaaaaaattgaatgatggacattccagatgctggaacaatatgaataaaggtgagtaagagaactcggcctgagtttatagtacatacaacccggtaggtgacaattaactaagaaatgggatcagagttagattttaggatgtcatgtatattgattagggattgttatacacagaattattgaaagttttatctgaacaaaggcgacataatcttagtactcctatattaggaaagttaatggggcagcagtgtttaggataaactgatctccctgctccatctctttcaattaggagatttttgtaagcaagagaagataaaatcctgactggaacaggtatcaaagaaagagaataaatgagacttggccacttactggacatctaggatgtattaagaggaggaaagaatgatatattttgagtaaagatgtcctagagaattggagttagagaagctaggatagtcaaaagcaggatggtttttaagtagaagaataaattaagttttgatatgctgactcagagaaactagtgtgatttctagttgaagatttaaataaggatgttggaaatataggactaaagttctgaagacatatcaggactggagatataaatttctgagttatccatagtgaaataattgaagtcatgtaactctgagaagctgtgtcaagtcatgagaagagtatgaatgtggagtatgacagatgtgatcacatcctgtgtctactatttacctgttgtatatcctggggcaaattgcttaactccaccattttctcatatataaggaagaaaataattttatcccttaattaggattacatgagttaaatatttaaaagctctgtcatgtttaagctgcttttatattttggtgcataattctcataagaaatacacttattttgccatctagtatcttaaaaatatgtgatgtgctttaaaaaatatttattttcctgtgattctagtatatgtgatcttttaaactttcatgacctactaatgcgttgcaacccacactttggaaaactgatcctcccatacattatggttctcatccaattcctcctctagtcactgtccccaacaagcattctatgttgaaatcacaccaatactatcaatgttctcctgactttcatttattactccctcttcataggcttcttgctagtatcacattattccttcatggcctagaaaaaaatgataaccatttacttcctctgctattccatataatgttttgtctataagaaagatgcgattttcccagataaattatgaattccttaataacagaaaatatgtgttatttatctgtgtatcttggtaaaatattttgttataggaggcacagaacattaattcattattataaaggaaagggagaagaggtttgaagagagaactttgttgaacatctacatctaggaccctgctctggtatcaccatgtctcgattcctccttctctatatgccaaagcttccatggaatttttaaagggcagaactattgtctctttgtctttgaggcacaaagacttaaggccactaactttcagtacatggtggagagagggaagacctggatgggttaaaataaaggaagaaactagaaaatgtccagaatttagctttgggtaaaataacaggtttttaccgtagcctctttggattggtaaatgacagaatccaatgaaagcaatgtgaaacaaatgaccagagcaagtaattcattttaaaatattaaagcttatttctttttttttctgactctggaaaacttttctctgatggaaatgacccctggcaacagtgacattctgacaccatgcgtcgtacacacccttgggaagtttgaattccacaccactatggttctgttcagattactggtttcatcatgtctgtaagcccaattaaactactgaagttctaatggtcttatgtccactttgtaaatcatcataaagaatattaagtcaaccaaataaatttgcctctacaggactcgttgctcaaccaaaggcatgatactaggaacaaaattaaaaaacaaaaaaacaaaaaaaaacacacaaaaaaacctcttttgataacaaccaatgttttcaggatactcctttatatatgaatttgagattctgatgaaggggactacaattcaacaagtctcaaaaaatgagcccaaggcaatttgctcctcaggaaacattgcttagaccctgattgtagtggaaagattgaagcctcagattgtaaattcagatagactatcacgtctaggtctctaaggatgatctgcgatggtggtcaatatggtttgtgtaacctttgtgccctaccctgtgcctcaatttgcttatttaaaaatgaagtcactagactttgtttcttacatcctttcccactataatgtttggtgatgctctgcccttacatttgcctaaacttttcaatcttaaaatatataaaatgtttttataaaattcttttatgtccttaaatgttattgaacatgataacagtagaattcactaagcctaaatttcatcattttaatattgcctcagaggtcaagttttatgagagccttaatttgcatcaccagaagctcatttaataaaaatgaaagaatcccttttggaaataaattttaaaaactgatggtggggaagaggggcagataaatgtatgtaaaaaagaaaaaaaaacaacttagaaggtgtcaaatggttctgagttctaaagaatattgtggtcatattagtgttgaaaagttggtcctagctttttatgcactaaaagtacattctgctaatggttccttcccaaatccctggcctcttgacccaatacttattgtaccacttgtcccatttccctgaaacaaaatctataatatggcaagacgaactgaggtatcagagcatcatctaccctggaattgggcatatttatttgtggagttgattctagtgtgtgggatataaaacacacaacttaagtggaaaaatgctgaagaccatttcataggtgaaaaggatgtggtatgaatggtcaattctcactttggtcaggaaaaagaagtgtaaagtcaatgaggtaaggggctgggagatggatacctcgtatgatatgataagcagaaaggttgtgtttggcaaattcctttatcatcttcttcctgactgtcaaaaactgtattcaacctgtgtttacaataaatattctctgacagaatgaaccctggatttctgacttttaaaaagttttgaaattaaactaatagcagctatttcatgattacctattattgtgccaagggttagaaattacaaaaatgagtaagaaagagagagcccctgctcttagagaccttactgtctgtgggtttgaactgttgtagttatgacaacaataacaataactatcatttattcactcataccagccaggcaccatgctcagtgggcaacatacacaaagtgccaaagtctccttcatttcaccagatgcaatcacagtaaggtaaccttgctctgtccgtgcatcatcgcttaacaaaaatgaacttagcaggaattcagaccataggcagagacatataagcaactccagaactgtctactgtcaacacacaagaactacagtcaataaagagtgcaatgaactacagtgaaaatggaagcaattgtctgaatcacctttagtgtactctgttgactgggggctgtgacactctaaaaaccacgatacagtagactccacatctggcattccaacaatagaagggtaagtgttttaagactcttagcgaaagaacttgcaatacattaaactgtaaaactgaggaagacatcataagcttctggattttattaccaaaatgtacattttgatctaaaattaaaaataaaaacagattgactttccttgtagtatttcacaacctttgagtgcagcattaaaaatgcttttcttttttttcttcaccaactataagcttctgttttcttaccctgggcgtctgaatcttttatatgcttgggttctattcactgcctgttattcagacgttgaaatcccaaatgttaattgttcttccaagtacattgacaaaacagcagctaaataagggtagaccagactgtggtagactctgacatgcatttatggaacaatggggctctgagagacagccttgtagctcacgggaagacataagatgtgctattttgactgcttcgtagcagaatggggaacacacgcacacaagggaattatgcattttacttagttttgcccaaagtcctcaaggcaacagaatcttgtgatgtcatcatgaactttctttctctccatttccattgacacaaaggctaaaaatttctaatgacatcacaaaggaaaatgaaatctactttgattccaaaagaaatcttttaccttcagtgagactagtaaaaataaaataaaataaaataaaataaaataaaataaaataaaataaaaaagcaagaatctttccagacagggtgtgtgtcactgtgctcatgcacagtgggtgacaccctccctaatgaaattcaaaccagccaaaagaaaggattcacaatttaggttggataaaaaagacatactgaatattgagaccaacaactttttttttttaagaagaaaatcatttaaacatatatttcttcagggacattcaaatttttactcatgtctggttactatgttaccaatgtttttgtccttttttgggttggtcacagaaacacagaagaaggtacagaaagctttgacttacaggaatacagtgcagctcaatcttttgtttttaaggtgcagtgatttcagtctctaaatgtaacttcaggcagtctgaaaagaaacaggttaaaatctctttcagttataattggtatttcagatttaattaaaaattaaactttcataatgtttcaccatccaaagcaatgcattatcagtcaagcgtggcttttctttttttcttttttttttttttttctgttaaggaaaaaaaaaaaaaagaaaaaaccctcttcccagagtagttttttaatgaaaagaaaaggatctaaagaggagaaaaaaagcaattctgaaaaacaaaatacgcctccatgttaaggacttcataatgatatgactagaaactcaatgtttctgaattttagctatattctgattaaaaaaaaactcctaaacaatttctacagcctaaagattacagaaaatattaagttcagggaataaagaagaaaatctatgggtctgaatacacatattaaagggaaattatgacttcaaatggaattgtaagaaatgctagatctcctactttccagtgactgaattgctggtgaggtagatggtgaagaagggctaaataaacatatttaacaacacaaaatggccattgaaatgtactgtattatgggtttagcgtgccccatttcacatcatattgtacatcttgtcacatgcagccactgctgtttgaagcagcacaggaagaccaagagagtctgaacaacactccctggtttaagtaactgtaagcatgttgcttattttttaaatatgtacttataattccaaattaagtaacagtccaggcattaagagctccaagtatataataaatattaggcttaaaatattatactattttttgaatcatttctttcttcaaacaacaccatctataaataatagtattttttaaattaaaaaaatcacatcacacactagaattaaatcatccttacttttagctttgaaaaactgatacaatgggatttagaaaaatttagtttttaaaatataaaatgaggtaatataattcgctttcattcactttacagcgtggcagaatactttctatatatttataacactaaatgtcatatgtttacatccaatttcacattagtgcaaggtaatattttaatatttccccatatgagagcataatcacaaatcaccccttaaattgtactattattagaaagcatatgtagttcttacttgggattcctgttttctttttctcttgaaatgtatagaggaatattttgggtaattggtctatttgatgtacatagattttaagcgtaaacatgctcaggttcacagtaaattcactcatgaatgagattagatttaaaaaaaatcactgacattgactaactaaacttttccccctcctctcacatgcctgaattaggctaaaaatgaaccagcgtaaaggcagaaattatggaggcgtcaccagggacaactgaatgagaggaggggagtgcacattatttccttataaggcagcaaaatattcataaaagaaactgacaaaaataacttgtgctcagaaattatgagatataatataaatatattgaataacaataatctctgaaaaatgattcagaaatttaaaactgcccacctctggataaatctaattcaccaactggcattgttctactcaccaacaaaatatggttagcgaaacaaattcattctctagtttagacgtgaaaaggtgatagaaactaggctgaatatttacatataaacatataactaacaactagtaattcaattcattcagtcaggtttccttctcctcaatttgccagatgttgaatgaattgaactatcagctcaaaataattaaatcaattatatgaatagatggtcagtgtaccaattttcattccccccccatgccatttctccttctcctctttgatctttttcttctatttctgcttgtttcttctccactttcactttctttcttattcctttttccttcttttttttttttctcttggtgagggtaatgaggctcaaaaataacatcttgtatcctgttgagggaaacttggtcacaactatccttccagatgacaaactcattcttaaatgtctgtttcccaatccaaagaaaacagagcaattgaaaaaatagagactcaacatcacttacaactaccaacaccagccctcttaattcccatgctgtactactcatcacgaggagaactgaaatttatttacattatacctaacctcaaataggaccacaaataagactaataacaggaccattttgtggcactcaggcaaacggctgggcaaaacagatggatcttactttgcgccaggactcaaaaaatatagtcgccaactcactgttggcgactacatatcttggcccaaagatggacctggaagtaggaccagttgtctttgatatgaatagtgctcctcttcttatctcctcatggaacaaatcagtaactctgtcactatatagtggggttatcaggtagaattgcttaaaagactggtcatcaaggatgtaaaatattctgagggaatgtcaggtgagatgaaggaacagaaagtcaggacaaataccttatttttggcacttttgtctattttcaactttctgtttttttttttttttttaattcaaattcactactgtacactgaacccacctttaaaatagatttcagagtatgtgtcatcaataagaaaacttgtttctcacatttcaggttccaaaatctgttaaaattttaagtcacatagatcaatctcagtcattattaaaattgaccaccagtgtcagacttctttaattggaagaaaactatgtaaggctttatagattacagtcaacatccaatgatgcactgagcaacagctccgtaatcaatgcaatatacaaaatccggaagaatgcttctctggcagagaccctttagcaaaagagttgtacattctgcactccttaaagattctgaatggctttccagagaagtagcaaatgcattatattgcagtaacctatcttgtaagtcacaaggccacaaacaaagcctctagtcaataaaaaaacaaaacaaaacaaaacctgaaggggggtgagaactacagatcttaccattgactacgaacaaagggctgcttctgaccacattctactttctaaaatcctcacacagaaggagttttagatatcaccaggtcacagaacttcaaggaaagaacaacaaagcattccagcttaggaggtctatgttaattcaggcacttctcttattgctcttccaactattcagtactgactgtatcttgctcagattgcttttgagagttcactcatctctctataatttatttattcagacattgtgcagatttgatttttaagagacagccctgtttgtggtcagcatagaaggctaattataatactttaattatttattttagtatttttttctttccactatttaaaaactttttattataaaatatttcaaatatatgagagagggcagaatacagaaaaatgaactctccagtacccatcacccatagtcaattgtttttccaattatactttcacctactttttcttccaccagagcatctgaaagacaatcccagatagcttattattttatgcatgaatactttactatgtgttactgaaagatgacaatcataactaatatcattccacatcaaaaataatagtaattctttaatgtcattaaatatcctgtccatgttaaatgattgacttttaaatggtcttttctttttataactggttagtttgaatcaggatctaaataagatgtacacattatattcaaacgataattatcctttaatctataaattctccatttgctttttaaaattttaactttgtattttggaacaattttagaattatggaaaagttgcaatgatagtacagagagtacccatatttccttcactagtttttcctaatgttactatcttacataaccatggtaaatttgacaaaattaagaaattaatattgacacaatactattaactaaactacagactttattcagatgtcaccaatttttccattaatatgttttttctgttccaaaaatccaatccaggataccatactgcattttaattgccatgtctcctcagtctcttctgatctgtgataacttcttggtcattccatgtttttcatgactgataattgtgaagactagtggtcagatattttgtgaaaccttttacaactttgatttgtccaatcccgtaactagattcggattataggttttagagaagaatacaaaagaggtgatgtgcccttcttataacatcaaaggtatatgatatctcggggtatgttaaccttggtcgcttgcttaggagaatgtctgccaggtttctctatacttagttttaataaacataacagtttattgagatataacttatataacatacaatccactcttgttatgtgtataactcaatgacattaagtaaatttagagttgtataaccatcacctcaattcatttttagaatatttttgtcaccctacaaagatccttcatacccttagggagtcaatccctagacccagacaacaaatattttctctctctataaatttgccctttttggatatttttattaatgcaatcaaataatatgtgatctctttcatgtagctttttcacttatcataattcatttttaagattcttttatgttgtggcatgtagcagtagtctattcccttttactgatgaatactattccactgcatggatataacaccacattttatttatccatgcatcagccaatggacatctgaattgtttccagttttttactgttacgaataatgctgccatgaacattcacataaaatacgtctctgtgtggacatattttttttcctcttagatacctcaaagtggtattgctggatcataagggtaagtttattttaacttttaagaaacttccaaaccactttccaaagtgactatactcttacatctcccctggtaatataggaggcttctaatttgtctttatcttccaacacttgttactatctgtctttattacagccattctagcgggtgtgaagtagtcttttacggttttaatttacttttccctggaaataataatgttgaccatgttttcaagtgcttattaggcatgacttcatcttctttggtgaataacttcggtgaattgtcaaatattttgcccagtttttagctgggttgcttgtctttttattattgaagaattctttatatattatgcgtaaaaattcttatcagattatgatttgcaaatcgcaatcttgcaaatattttcgcctgtctttggtttgtcatttcatttctttaatgggtcttttgaagtgcaaaagttttaaattttgttgacatcctaattaccaaggattttattgaatcaagcttttggtgtgatagctaagaactttttctaacccaaagtcatgaagattttctcctgttttcttctagaaattttataattttagctctcacatttaggcccatgattaaatttttgtgcaggatatgaaataagaactaaaatatgttttttacagtcctaggttcgtgaatattcatttatatcgcatataatcctagcatcaattacagagcactgcttattgaaaagactatcccttcccatgacaaattgccttggcacctttgtcaaatttaattgatcaaaaatatgatgaattttctgaactttcaattccattccattgatctgtatgccaatatcatactctataaagtaagttttaaaaccagaaattgtacgttatctaattttgttttcctttttcaaaagtattttcactattttggatcttttgcatattcgtgtaaattttaggattagcttgtcaatttctgtaaaaacgcctttattctttttgacaggattgtgaattgaactgttttcttaatttcattgtttgttgctagtatacagaaatataattgatttctgtacaatatctcttcttatattcagttaacttgttgaattcctttattagttcgtgtgtgtggtgggggaggtgtatgtacattgcttagaattttctatgtacaagattatattgccggcaaataaatagttttactttttaatttccaatctgtatgccactgattgtttctttctgctggtctgtctaacccttctctttcccttcccctccccctcccctgcagctgctgctgcttcttttttttttcctctaatttgcttctctctctctttcttacatgtatttatcattctgcactggattgaatctcctgtacaatgttgaacagaagacataagaactgacaaccttgcctcttttccgatcctaggagtgtatcggtcaggttttcatcattacatacattataagttcttcatagatgccctttgtcaggttacagaagttctcttctattccttttgttgaaagattatatcacaaatggatactggattttctcaaatgtttctgtacatctattgaaatggtcatgtgttttctcttttattctattaatatgctatattgcattaattaattattggatgttaagtgaaactcacattcctgggataaatcctctgtggtcagcactgtataatgcttttctactttgccacatttggtttgtgaatattttgttgagttttggtgtctatattcatgagggaatctggtctgcagttttctttcattgtgatgtctttgtctggctttgctctcagtgtaatattgtacaaataattgaaagatgacctttcttgctctatttctagaaaagtttgtgaaatactggtattggatagaattcaccagtggagtcatctacatctaggattttctcctaactataaattgtataaattgtatgtctttttattacgagtctgttcatattttctatttcctcttgagtcagttttggtaatttgcgcatttctaagatagtccattttatccagctaattgctaacaattgtccagttgctaacaattgtctaattgttaagcaatgacaattgaggtcaaccaatgatcagtcacaggttgtatttctaactatcaagcaatgaaaaggattatgaggttataatatttgttcatagtatagtatgagatcaggaatgagagagaaggtatcaccaccaaccccatagaaatgagaatgattatgaggttatactatttgtttataatatagtattaactataactatacctcataatccttttcatttctgtggggttggtggtgataccttctctctgattcctcattttggtaatctgtcatcttctctcctttttccttgatcagtctagcaaaagaaaaactaagttttggttgatcttttcaaaaaactaagttttggtttcattaattttctctattattttcattatctatttcattgatttctgttcttatctttgttatatccttccttctgttcaaacagaatttagttttatgtttatatcatgtctatacttacctaaataatgacgtgatgaggtccttttgtttaggtgaattttagatacatttttatcatttcatttccacttaaaggatttccttcagtatttctggtaaggcaggtctactagcaacaaattgtctcagtctttgtttatttgggatatctttattttatatttatttttgaagaacaattttgctaaatataaaattcctaaatgacattttccctttttttccttcagcacactgaatacgtcatccctctacctcctggctttgtttctaatgagaagtaagctgttaatcgtagtgttgttttcctgtatgtaacagtcttttttttcttgttactgtcaaaattttctctttttcattcaaaagtttgactataatgtgtctatgtacagattttttttgtgtttatccaacatggagtttttgtgcttctcaaatgtgtagattaatgttattcatcacatttgggaagtttttggctattatttcttcaaatatttttgagccctttctttctttcctcctcttctctaccattacacatatgttagtatgcttgatggtctctcacaggtctccgaagctctgctcattttttcattgttcttttctcttcaaattagaccatttctattaattgatcttcaatctcattgtgtctttattctgccatcttaaatattctgttgagattctcttgcaattttttaatttccattataatattttttaactccagaatttttgttccttttaaaataacacttatgtttatattgatactctctatttaaagggtaattatagtaatactttaattatttaacatgatttcctattattttgaacatatttataatagtgctttcaactctttgtttgctaagtttaacatctgctatctccacttcaacccaaatataatttctttttttttcttcagacactttcttttaaccacttcttaaattgggtatgagtcacactcctgtttattacatgtctcatttttttcttgaaaattgacattttatatagcatattacagcaactctggcttctgacttttccctgttgagggttgttgctgttattgctgtgtttgtttatttaggacttgcctaacataactctgtgcagcctctcttccccatgctgtgccgctgctgatgtttctgctcagtttgtgtaatttccattttcgtttttgagctgggactttcccctgtgttaacacagtttagtggtcagccaacgatcagtcacaggttgtacttaaacacctagggccactatgctaacgcctctaattgatatatacgtgtgtgtgggttgtagaatgcactcaaagttcaggcagtttacaagtgtttttttgatttttactttccatttgttctctcttatcttctctctgtgtgtccaaagccttaggtcttccccagagtatgtgtgcagcctttcagacctctaggaatatgtggtagcttaccaaagttcactatgatagtatccttttccaattctccctgctaaatttctggccaatctgccagttcttttctactctgaattgtaacttcaggctacatatgatgtttattctccctgcttgtttgcccctgagattgtcactgttttgaccacacctaagggcatggggtttttctatgttctgctccatcaaattatcgaatcaccccctttcagcagtgaagttgtgggttttcatgacttgtcctgccctggcagaactactgatacaatggaactgtggggacggataataggaggaagcactcccggctaaaacactgtgggctcctaactgtgctagttgtcccaacataacttttaatttggccactttcactcccaaaagtatccagcttctgtgatatgatttatgaccttttaatctatagtgggcataaacgacttatgccatatgccatttcttcagcgaatgaccactgcctaattcttttcttagtaatgcaggaatcaggggcctagctgcaggtatccatgcatgtggggtggcgggggggaagtctaactgccattgaatgaacgttttcataatggttacatgtgtatagaaaatcttcaactgcccctcctactacatctctagaaagtttaaaggtttgggggggattaagaatttctagggaagtgtatgggatatagggataaggttaccaaaattctcccatgggagataaatagttttgcctcactctatagagtttggagaaaccactcagcgagaaggactagaattactttggttaataatgagttgctatgaactttggagctggactaacctattctaagcaattgtaaagaatatgtcatttagacttaatcttatacaaaacaataatagctcagagatctaagcaggtccaaatacttacttggatcaggttagtatttgccagcttattttctcacagattcctgggctcactcaggttatacttccttgggaacacacaaagggaataagctccttttggaactcaaataacttgtaaatcagaaagttcccatatggatatagagaataatatttactatataataatttttcctttacatgatgatccacaataaagttcccttgagaatacacttccctagagcatttaaattatgaacggatttacaaaataactcctatcacatgaaaagagataaacatatagtatctgcttctaggaattatctaaactcattttccttcagagacttaaatagatgaaaaaaatcagcaaactttgtttaggaaaaattcagaatgtataaagcattaattgtgaatatcttactgatatctttggatcaacataatacttcacttttacaacatgttgaggaaatcaaagtattcaccaaacttcatctcattaaagtgtcataacctttaatctaggaacccgtaatagtaaagattactgtttctgtctggaaaacaagaaatctaatccatgaaacaaaatcctgaaacatcacatacattgcttaaagatgtaagtctgaggatggagaatgtgatggaactccgtcaccttgttgtataagtgtgtccggaattggtgggttcttggtctcactgacttcaagaatgaagccgcggaccctcccggtgagtgttacagttcttaaaggcggcgtctccgcagtttgttccttctgatgttcggatgtgttcggagtttctgccttctggtgggtttgtggtctcgctggctcaggagtgaagctgcagacctttgcggtgagtgttacagctcataaaggcagtgtggacccaaagagtgagcagtagcaagatttattgcaaagagtgaaagaacaaagcttccacagtgtggaagtggaccccagccggttgccactgctggctccggcagcctgctttcattctcttatctggcgccacccacatcctgctgattggtagagctgagtggtctgttttgacagggtgctgattggtgcgtttacaatccctgagctagacacaaaggttctccacatccccaccagattagctggatacagagtgtccacacaaaggttctccaagtccccaccagagtagctagatacagagtgtcgactggtgcattcacaaaccctgagctagacacagggtgctgattggtgtgtttacaaaccttgagctagatacagagtgccgattggtgtatttacaatccctgagctagacatagtttctccaagtccccaccagagtagccagatatagagtgtcgattggtgtacttacaatcccttagctagacataaaggctctccacgtccccaccagacttaggagcccagctggcttcacccagtggatcccgcacccgggctgcaggtggagctgcctgccagtccgtcgccgtgggcccgcactcctcagcccttgggtggtcgatgggactgggcgccgtggagcagagggcggtgctcctaggggaggctcgggccgcacaggagcccacgtaggtcgggggaggctcaggcatggcgggctgcaggtcccgagccctgccccgcgggaaggcagctaaggcccggcgagaaattgagcacagcagctgctggcccaggtgctaagcccctcactgcccggggccggtggggcaggccggccgctccgagtgcggggtccgtctagcccacgcccacccgggactcgcgcttgcccgcaagcaccgcgcgcagccccggttcccgcccgcacctctccctccacacctcctcgcaagctgagggagccggctccggccttggccagcccagaaaggggctctcacagtgcagcggcgggccgaagggctcctaaagtgccgccaaagtgggagcccaggcagaggaggcgcccagagcagccaggactgtgaggactgccagcacgctgtcacctcttataaggttatcaatagggcaatatccaggctacaatgaaaaagaaacttgaagtctcgaacacctattgtgtatacattagagtggattcaaaataaatatttaaacagatttctgttcctgtggaatggtatttttccagcaaacctctccagcgattgtttttattaggctttgcaatttctataaaaggatatcaaccctgtcccaacttcattactatttctgctattaattaacaataaaaaaaataggctaggcatggtggctcacatctgtaatcctagcattttgcaaggctgagatgggtagatcacttgagtccaggagtttgagaccagcctgggcaacacagaaaaatcctgtctgtacagaaaatgcaaaaattagctgcgcatggtggcgcatacctgtagtcccagctacttgggaggctgaggcaggaggatagcttgagcctgggaggcggaggttgcagtgagtcaagatggcaccactgcactccagcctgggtgacagagtgaaaccccatctcaaataataacaataacaaaaaatagttgtatttcaagtaatataatctagataatctaatataatataatctagataatctagaattcactgtcattcaatgaattatatctgtgtgaagtgttctctatttggtccaaatcttttaaaaatgggaatactaaagttcacagtaataagatgttgtcagtctacattgaggactacaaagaagcatttctataaaatatcctttgttgctaatgaaagttaatatttatcttgatatttacattataatacagtgatccctatacatactgaagagcatcctagaaaattgatttttcttagtataagcattgtatttctttaaaatatataatcagagcccaatctgtaaatgtaggtaagatcctttataggatgctttttaaatgtaggtcaaattcttgcctccttctcatgtttttccactgtttacccattttattttttatttacttaatttatattatatatttcacttactgtcatttatatttatataaatatatttatacataaatatatttatattgtacatgtatgtatcatttaagctatctcaatttctttttgtaacaaagagatatctatctgtctctactgtatatttgtctatctacccttccatgtaacaattcatctaaatttactatatgataccccaacatttcagatgcaatctgaaaatagcaaccttagatcctctataaactcatctatgtttttgtggtgactttagttttcttctaccttcgaagctattcaaatcagaatagcctcaaatctgccttaaacttgtctgagacaaagtaacatatttgtatcatcagagctcagtattaacttaaagcttaactaaccacctctttgctaagtcacctgaagatgattcttgcctttctgtgcacgaataaaataatttgggacctatggaacaacaccaaccattttcaaataactaataaggcatataacatagagcagacacaactgattatatagtttgtaccctgtccaaggcacctagtccaggagtgtgtttcactcaataacccacgttccctagcccaagctgcatctgcttgagcaaagggtttcttttaataatttgcacaaaggtgtccgaacaggcagcttttttctaagttgtattgaaactccatatgagataagaaaggccctctataacatgtttctatagtacttctaacagaatataattaattgtattaatattagctggctctctagctgttacatgtaacataaatattcaggtaacttcctagtaatgactaacctcatgagcttaggtctccatgacttgcactaaagaatgctttaaaaatagaatgttaacaagttcggagacatggattatttgtacaataaaatacttttcttttaaatttagcttctggctcccattccttcaggcagattttatatattagtagttaagtcttaatgaattatctacaggtaggctatacataacacatttttacattaacttttcgtgactatgacatgaatacatgcccattgcaaaaacaaaataaaacagtacactgaaaatatagaaaatatgaggaaagattacgagcatcaatagtctgatgacacagagacaataaaccactactggaccttcaggatttcattccaacgtgacacattttaatcccaatttggcttacccattttcccctgcacacaacgagtagcctcctatttttactatttggtattgtgcttaagcaacggaaatatttcaagtatttctatagcaattgttttctataaaattaatttagtaattgatcaagtactatcatatttaatagccctgcaattgatcattattcatgatactactcattgttattgcttattacttcatgaatttggttttattcaatcatgtcatatggagattttatacacacacacaaaacacgcacacgcacacacgaccggctactacataaatattaaaccatttctccgaaataatatggaggttagaagtagcttctagatgaacaaaatgaaatggcaaatttgatgcttaaaagtcaaaaatttcatatcaatgccaaagatacattattttagataacactctttttctttatttttatttttactatctttgctacaacactacaacattaatatgaagaactgagagtcagctacgcctataaaggtaaagtgccataaaagccccaatgcatctctctcaagagtctaatcttattctatctgaggagctatcctctttctgtgaactctgtcatgtagaattacatcatctcccatggctcagattatctccaatttataaaatgctttaacaaaaactgttacaaagtgggctctgttatatattcatataacttcctcttcactttggttaatacggaaatacacaatacatcaatatgtttcattaaaacgattgttttgatatagtaataagctgggcaaatagaggaagtatgctgggtgcaatttatttacattttaataagacctcaaacaaatgataccacacaggaagctcagaattaggttaaggagaaatggtggctaaaaaatgccttgaagtttggaagctgtaagtattatctaatcaatagtattacttttgaattaagatagaataaccattccacagggacaggtattgtggtctgtgacaaacattattcaatgcagacattaaaaatttaggggagatagaaattttcaaaatttgataaaattttaagactaaaccttagaatatatgccaaatgctaaagtttaaaatgaatgggcctatgaaataaaaatctcatgaaagcccaaagtatgggagttttcttccttaatataccaaagcttactgctaaaatccccatttaatagagatgataacttcgccattcacattttgggtttctcctactatgcatgttaactctttgtgaatagttctaaaaatcaagacaagtatgtactttaatcaaataggagattcagaaagcaatgatttcagtctacaattatagtagcctgcactattcctatttccaaactctgagcaggttcacctttgtttgagacaaattatcactgataatatcttacagattaatgtgcatgacatttgtctatccagtgtagtttccaagacaataaaaaaaattgcagaagtaaatatattatttaagctgcaagtgaagaaacaattataaaagtacaataatgataggaaaagcatgaagaggacagggtgaggtaaatatacaaaaggaatcttgtaagaactgacacatttgctaaaagaacaagaatatgactccgtgtgtgtgtgtataaatctctctctatattaagtctatatgaaatatatttatacaacttatacacacacacacacacacacacacacacacacacacacataataaattgggcgtggtggcttacgcctgtaatcccagcactttgggaggctgaggtgggtggatcacctgaggtcaggagtttaagaccagcctgaccaacatggagaaaccccgtctctactaaaaatacaaaattagccaggcatggtggcacatgcctgtaatccgagctactcaggaagctgaggcaggagaatcacttgaacctgggaggcggaggttgcggtgagctgagatcacactattgcactatagcctgggcaaaaagagagaaactctgtctcaaaaataaataaataaataaataaataaataaataaataaataaatatctctctatatatacacacatgcagaggcatacatatatgcctctataaaaataaatatttcattaggagttttgcaatttccttatttgtatctatccatgaactagaaagtaagttccttgaaagtatgacttatgttttctgtgttgtaattcataataactagcatgatactgagcagaaaattggttctcaataaatatttgtgtgaaatacaaaaaatctaatttcattcatgcacactatgtaaaagaacaaaattaaagaattcccaaaaataagacaaatgataccattacatggggaaagcaagttagattatgctacactacactaagccaataaaattaataccaaaaaaacccttcaagtgaaaataaatctatgtaaatacatgctgaaatcctcagatgattcagactccagagaaatgaaaccccaatgacagcatcatgaaaatgagttgccccaatatcacatatcgtttttgtcatactctacaagaagtggtcaggtgtgattagaaattccaatttcctaatcttacagaatataaacaatctatattacataagtctatgaattttctgaggcattataaacttttatggacattttttattagaatctgaacacaatggtgtttcaatataaaaactcataatttcaattgtgaatcaccattttacatttaaacaattttaaaaattcacattgtgacatgttataccattaggttattaaaaaaactctgaaagttttcttaataagatcataaagttttttctagttatgcaagagcaatttgatagtggaaaatcaattatgctaagtcctttgctgaactgtcacatttcaaattatcctataatgttttaaagggaaagggctatgcatcttaatcccaatgtctagtgaacaatttctggcatatagtaagtgctaaataaaatgtatgatgaattaatttgagttgaaaaatacatctcaagaaaagtctatgtccatgagttacaattggacaatatttaccagaaaaaaaagattaataaaagtcaacgtccattcctaataatcaaataaggattcagaaaatagtatgttaatccactttaccaatatatcaaataatatctgtcttaaatcaacaaccaatatctgccttaaatatgaaaaaaaactagagataataccacataataaaaaacaagaaatatgccctctaccacaacgattacttaactgttttggaaattatagtcaatgaaataggatattaaacaggaataagaaaggaaatagacagtcatctttgttaggagataatttaataactttgaaaccccaaaagaacttaaaagaaattattaaaactattaagagagttgaataaaataactagataataaatacagatagtccccaacttacagtggttcagcttaagattttccagttttacagtgggtttatcagaatggaaccccacataagttgaggatcatgtggattataaataggaagtggcttttctaccaaagaattataaatgaaatataggcaattaaggacactaacaagaacatagcatgcctatacctaaatatatgaaggaatttggggatctatatgaataaaaagatacaatctatttatgtatgaaaacatactatgcttctgaatgggaagactgaatattgcaaagatactaatactgatttataggtttaatacaattccaacaaatattccaatgaaacatttttatgaactcaacaaactaaacaaatcctgactagtaagtaggtgacaaaagccaaagcatttttgaaaaaagaaagataaggaaggattttacctaaaagatacacaaacttattttgaagctctaatggaagcaatatagaaccggtgaaagaactgaaaaagcagatagtccagaaatagatcctaatgttgataaaaattagtaggcaatcaagatgatgtcaaaatcagtggggaaatgattctggaacaattgattaaccattaagaacaaaagtaagtaagatgtttacatcataacatgctaaaataaattctgggagaaacacaattaaaaatataaaacagaaccatgatcatactagaaaaaatggtgaatatttactaaatttcaagctatttaaaaaagaagataaaagtaatgaacatagtcacagagaaaaaaatacacaagaaattgaccatacaaatatttaacattttctcacataaaatcttacaaatcagtaaaactacatgagtaaagaccacaagcaaacaatttataaaaataagaaaacaatgacaaacatgtaaaaaacattctagttccttattaaatcactgcaaattaaaactatgtaaactagttattttgcctgcaatttgtcatatatttatataatgctgctattcaaaacagttaagaatgtagttagaaaagcacttttacatacaattggagaagaattctcaaaggaaccttgagaattttacatcctctagcccagaaatcaactttctaaggatgtatgctaaaaacataatccaagatgcagataaaaatttatatataaaaatgatcctcagagtaggagaaataatagtggaaaatgacctaaatgtcaaacatgaaggagttaattaaaattttttggtacataattaagatataatattacacagctaatgaaaatgagtattttatgactcagaattaataaaattaatgctaagtgaagagatcactatacagactatacaatccaaaatgttgtttagaaatatgcaaacaaacacatatatataaacacctgtacactttagaaacacccatacacttggaaagaggcagagcaaatacttagaattgtttatccatgattggtggtgtcaagtgatttaaatttattcgttatatatattttctattttgacacatcctttcaacaagtgtacattaccttttaatctggaaaaaaaagttattttaagcctaaaatgaatttatgtgggttagaaattcacttaagggaaaaaaatcagataccgataaaaatcactttcatatacatgtagaattactgtgctctttaatctgtgaatctccatacttttgtgcataaagaacatctattgagatattgagatacttgacttttttttagtgctgaagaacacaataattttcctgaattaaaacccaaagaaaataaagtcactcataaataccatatttgactacagcattcacccaatgctctgatggcctttcccgttgttgacttattgataaaatttacctacattgctaatattaataattgttttggtaccaatttcaggaataatcaatctgagaatgtttacttggcccatttagacaataccaaggaaaacacccccaagtaactgtaaccagcatagtgaacagtgtatttgcgttttcacatttcttttccatggaataccaaccttgcctagtattttgcgaataacaatggatggaacttggattttcaacagtgcttaaaaaatagctgccaaagtcaagacatgtaataaccttctaagtaagtttgctggctccatattgtgtttgaaggcacaccccctccaaacgtctgcagtcaccatctgctactcaactgcagaataatgcactgaagtctggtgttgtttggcatgggcaaagacagccaatgtccaactccattcagacatgtgcaccatatcaggaaccttatgacacagtcctcaacatcaatgcagcactttcaagccctgctgcacatcaatcaagtatgtatgacagtcaagctgatagataaaatctaagccaactctaaatacctactgtgcatggatctctctagtttgcctgcagctcaccttctattaagatgatagctttggcctagtcttccatgccaaaataagtgcatggagtcactctggcaagaagaagcgtctacatcaatgtcaacaaacaagttccttgcgcccgaccctaccatctgtcctcctgcttcccacctaccgtactttatgtggaccttgatgaatgagattctaatagtccaagactctagtttagccagcctttgcagatggggtcaacatgactgccctctggccaaatacccagggtgacatagctgatgggttacctggaaagtgcctttttgcaaatttaatgtcagaaataaagcaaatgaaggcgttcctacaggttctgagtttcgggtttatggaaaaaagtgatgcattcaatgcttaaagtgaagataatttttcttttaaattatttgaaaatcttataatgctaaagcattgataaattccatttcaacactacgggtaagggaaataaaatgaatgaataaaagtaaaactggggctattctaatgtatttacaaagtaggtttgagagaaagacttgaaaaaaatctcagaaatatgtagaaataagacttgatagtgtaacattaatatagaagcagattatttcattctgcgttagatgcaacaatattagagcatattgcacatgctaaatggggaataatagatttcatacctattctacagaagttgtatggcacttgcagatttcaaggtagagcagtaaaatttaatataatcttaagtatgagatataaatagtttctggaaaaatctaattgtttttgccttaaaaagatattacatgaaatatgataaatcagtattgtcataaaagtagtaaataaaattattttgttttttgaacatgttgacaaaccatttcaattaggtcattaaaaaaacacttaaaatggagcctgagggcatatgaaacaaacagaaatttcaggaaatgccgctagttccaatccaactcaatttaataggatgatacaatgataagaccttatttttccttcaaggaaagctaaatgtatttctagaatggtctctggacacatcaaaaatagaacaagcaaaaacaaaacaaacattctacctaggaaacaacatcatctgaaactctagacaatttaagtaataataagaaagtgaatcttcaccaaatgagaaaatgaatgtgaaaatatgttacatactataaagcaccatacacagaattattcagagcatctattaaagtgctttgtacatagtaagcatttactaaatgtttgtagaattgactagaatttaattgaaaagagaagtataatgagacttctacaagtagaatcagatccttttaataccatgggaaaaagtttcagtcaaattatatgactaggtacatccgttgtctttgatgttatgaatcaagatgagatcctattatatcaaaagaaaaaatattgttgaatttctctttggagaaatcacagtaaaatgaaaaggatgattatttttaatttctaaatatctccaaattttatagcattcttcggtcaactaagataatgctatagaaatcctacataaaacttgaacttacaatgtcctggcctaatcatctggctaatctctttgagttttcctgaaatatgttcacatcccattttctatgggaattctcccactgattaacacagagaatgagaatttggcctgtgctctataggcaccattgaaatgtggccacctgaggcatgtagggagggcatccagctggcacaccacatgttgccctggagtagtgtacaatgagagggatattttggctaagaatacctggatgatctctataaaggtcctgattatgaaaaggacttcagcattatcattgtctcatgggcataatatgagccagggaaacttctgtttctaagttcatatattttccaaagaaaggacttataagaatataagaaaaaatcaaagaactctatgaaagagaaacactgggccattgatactagattttatgtactatccatatcactagaagaaacttttttgagagctccatgcattttaaaacttatgctaaagcacactatagacttgaccatcaaataaaacataatgaaatctgtaaaataaaggatgcaaaaacatagcgtgaaaatttatgcctgcagtgcagttgttgtactatattttataaaaatcaattaagttcacatactactcacttaagaaatatctgctgattttatttttattttacgcaacttgtgaggaagaaaatccatgcatttgaactgtagtgccaataaaacaattttgtcaattttgagtctatttttttcaaaacaccatacgtgattaaaacacataatgcactagtatttttgccaaattttgtttttaaaccaaagctgtttttgaattacataagcacaaaatcagaatttcaaaaccagcaaacatatttaggggtgaattttaaaataagcccacttgattcattgttagacaaactttgagtgccagggacatttttgtgaaattccactggggtaaatagggtagctaggaaacgctcctcaaagtgaaaaataagtatatgcattattttcaataagttttgtttagcattttcaccctcatactaagtggttctggtgatatttacaatacaacatgagcataaatcttaaggaatttatgatgtcatcaaatgctaagagacaattacagctgggttttacatttgtgtttatatgttattttgcatatagatcccaaaaaccaatgaagagaaactttgatacaaaacatatcctgaaactaaaagacagcttctatctatcaatataaccagttgatagtatttctaagacagagtttgacagtaagtgaaacaaacaaacataatgttttaaatatgccacttcagccactccagctgtcactcaagaggctttttttaatatcattaattcaatgccacacaaacaggaattcggtctttccaataaattttggtgacaacttgttggcagaaaggaaactaatatatatgtggaaacttttattttgtcatcatgtatgtttgtttgaacttgcttaaaatattgtaattgtgggcctaatttacaccttttttcctaaaagctcaaacaaatcacaatgatcacagtgtccctaagactaatgagtcccaatttataccacagaaaatagaagctcagagagctaaagagtactggcagaatattatactgcaagaatagcaatatagcaagtatactcacttgaaatcctaataaaaccataaaaactaccactttgtatttttcattagcttatatttttacttaatgcaaaatattttgcagaaaagttttctagctagctttattgctagtaagagaataacttttattaattgaattaatttttgtaatttgtgaccaatgaggtttgactcacatcgcacattttctttaggaactcagatacttcatagatcttaataccctgatgaaaatttaagtcctaaaaggccaggaaatactgagattcaagttggctcctctaccatctttactgacagaaattcagagtgccaaaagtcagcactgctggttgctgatcatcatatctaaacattgattcttctaattgtgtattttgagacttgcttgattttagaattacaggtggaaagtcacttctctttgatataaattgcatgcaataaagaaggaggcagtcctacacaataaatatgtaaggaatggttttccacctctgcatgctgcagaaaatcccactgagttaagtagggttctaccaaggccacttaaacatattagcctattatgctccacatttctttattgttctcaaaaagctaatgaaatgttccagtgtaatgttaatgctggagtacttttaaaggcattttagaagtgatgtttctctcataactccagaagggggttccacttcctaaaaacatttaggaggccatggggagaccatgcagcctctttactcagactgtttagactcatagctggagaagaaaatccttaaagataatcacttaagagtttcggtgtgagctatagcatcatcgcaaagcgacaggaattaaaaggcagtgtaccgtactactgaatagataggtttaaaatactgtgtactgtctattcacagataacattgatttacgttggtaaatctattggttcagcacatcagtgcagtattaaggaatcaattgtttctccagagtcaattatttttagaaaaataaggaaatgtgacctatcactgaaagtcagtatgtagaattaaacttggccagttttcttcctcgctggggtcttaattttttcaactgtaagataaatgaatcagacttgtcagtatctatgatcacttctagcattaaagttttctagttttaagattctaaataccaacactgtatgttgaggaatagcaaagtaggaaaagaactgggaataaaactatcactgaattattaactttccaacaatcaaaattctgtaattttgcctttagttgccataaacaaccacctcaccttctgaatatcaacaataatatgaatgaaggaaaggttgtatactaaggtcacaggtggtatggttgagattaaagccaagactgagagtatagtaatgaattgagaaatgaatcatacacttttgacctaatatgtaatatgtcttcccaaatcgtcatttttatacattcattttcaatggaaaacaacaacttgaatatcttagaggttttttcccccaagaaagacatcaggctgtaatctccccccacaaaatttaatacagttcatagctcatacccctaccggataatccccaaaatgtcttgttcctttttcaaattagacatcagcattcagtataacaattaatcaatgccaacaatgttccatatgctttattagcattcattcaccgaatccttccatgaacactaggaagtaggtactaataaaaacagaaacaattttgaagtacagaatctcagaggtggttatcagtaattctagaatatcagtctgacatatgggtccctccactttttttcagtgcacaacgtgaacactgtgtggcacagtgtttcaagaattaatgtttgatttatatcaaagcattatgttttttacttcatcttaatagtaatcacaagagtgacttaagcctcctacatgaaagcagagatagaaaaaagatgaccttggaagttacatattttcttttcctgtaagtatgaagacatgtctataagttattagaaccataaaaaaccaaaaaactaataagaataaaattgtgaaagaatattgaaacctccttaataagcaggttcttgtaggatattgaacaaggtatgtatgttgtagccctgatgctatatttgtgtcatgctgagcaagctacttaacatttaggtgcgtaagggtttttttccctaaagtgggaggatttagatctctaaattccttaccaatcataattttagagcaaattatctataaagtcaattaataatttgccttgcttcatgtattacataatagttgctaatcaaaatgaatagtattatactcacagctttaactaacttatagctaagatcaggcttgctttgtaaacatctctctaaaaactcagaagtccatgaatactaagactttttactcctcctgtaatttttgacctctactggaaatctcacctgctacccctgacctcgaatattgcaagtattaatacagtttctgtatatagtgtacttaagccaaaagtcagaggcatgagaaaggtaaaggccgggacaaaggtactacaattcagctacacacttgtaatgcttcccattagttcgttagttatattagttccagaaactattttaacacggtaggctgatactgcaagcaaaaacaaaaatcatgagaacaatgaaatagtaggtcttagcgcttaagcatatctactagtagtaatacttgacaagcagcccaccttctttgtgatctggaaatgatttgatgataaagccaaattctagaaatataactgctatcttttgggagatcaaaggtcatgtgagggggagagctaaggtcaagagcaagccccttaagcctactccagaaatttcactagagggtgctcttgggctttcatgacttctcagttcttcaataagaaccaagtattgcttagataatatattctgcctagtataacttggactccatcatggatcccatatccaatacttcaatatagaattaaaagatatctccagcagaccctgggcctggttttttattttcctgtgtaatttccttgtttctactgatagtacacttgtgagtttcacaaatttaagacaggtaagagatcttaagaggtctccaaaagtctacattctattaaacaaccacagaaacttcctaatacatcaaagtaagattaaatggggattaactgataaatctatttttgcaaatatatgttttacaaacatattttaatcttataataggttcataatttatatacctattggaagaattattattccataagatctgtagagaaagtctgattgtcaaatagaataaatttcaattatttatatatgtattattcatatgtctcatgacatcaaatattgagcaccaagtaagtactgaataaatatttcttgaccctttattgcacatacatatttttataacacgttccaacaggatgacatataattaaattttaatctctacaccatatgtttgaaattttttctataaatgcagtttcacctttctggaattcacgtttaatgacttattctgtttatttctaatgataatcgctttttatatactttccatttttgctacgtttttaagagaaaatgaaacatggaaattgttttgttatgtgattaactttttaatgtttctatttgtttattagaagattaagaaggttatttatttctacattaaaatattggcaatggcatatatcaatgcatagtgattttcttaagaattgcaatgagtgactcagtaaaattcttcttcactttcaggatgtaaagaattatggctactagccattatgcagggtgatgttcttatcacacataattgaaaactcaatagttttagcatctttagggttgacagtaaaattctgaggttgactatggaatgctaagtctttgaaggcacttccaatttggctaaacttacagtttcattattccttaattgaattaagtttaagtttctcttaaaatcagcttgaggcttttgacaaattagaaatttgggtcctgaatagtagccctttacaatatatgaatctgcataaagatgtgttttaaatgcctatttgataaaaagataagcctggtcacttatggattctagctcctttcaacatcctgcatggattgcaaccagtgtgaaaaattggggatctttaaagtggtctcagatctcttataaagcagtcacctgggctcttaaactgtatggtgcttctcaaaaagggctccttaagtatcctatctgatgtatgttattccccaattcaacttgcaaaggacagagtcaccagcatatattcaaactgtatttcatccaagtgggttgtcaataagcttaaatcactctatgaagaactggcaaaattcccatggatactgtgaaaataaagggaatcaatgaagagatataattattttagtctcagatttaattaatttgtgggagaggtcattttctctcaaatatattcaagtttcttcaaacacaggtcaatgtttgccagctgataggaaaaaagaaaacatttagtctgagtttcccacgtttatattaatctctgtatcacagctaaataaaatgtttcataaatcttcatataggcaaaagagagttcaagctaaggcagagtaacaagtattgccaatagaaaataacctcttaagtactgtttctactatttcctgttctaatttttctattggagagaatgaaacaaagtaatttcacacctggttttatgaatcagctcactaaagattctaggtagaagttacacgggagatgcaagtataacttcattattttacaattagaacactaagacaaagaaagaataaaagtggcgtgctatcccatgccatgcagttagcatatggcaggtcttactcagagtccccagttcctaatctagtgttctttctactgcaaaggtttccagtgctgcttggtttttcataaaggatctgtatatcatgtcaaaatttcatgttgactttccttgaaatttcagagaaaaagaaggcagtataagaaaaattactcttcattgtctaactcttcaagtcagacagcattcctatgtgcaatgatcctcgatacagtctaggtcaactgatctctatgagttttcatactcattaaaatgtatgcatcacaaagtacaattaatgttctcactgactttagggaccttgcatgtttcatccgttccctaacctatgccatcctgaatccaagaggcaccctgtatttctctgaaagtcagcccagcatgaaaatactgaaataagagtgcaggtgtactctttgctttaagaagacacaataagccaaattctgaacttaccaaacagacaaattatggggtgattattcacattttaaaaggattcaccacaggatgcttttaaatcataagctgctctattgcattttaaataagttgatttataaagcttcctttacaaggacttttcactatccagggttcatggttccttatccaaaggcaatgagagcttggtgagcataaagtcctattacctgctaagccaagcttcctttcccaaataagagaataattaggactgtagttcatttttgaaaaattaatgagtctctcactcctgaaaaatttaatataccctgagcacttattatgtgcctggcacagtgctaggcattttagataatgatcttatttactcctcctcaccacaactctaggagattagtacaattatcccaatcatggatgaggaaactgggactcagagaagttagagttaagtaacttgactaaattcttgcagcaaataagtgatcgtgccaggattcaaagtcagatctgtctggagctcttgcccttacatattttacaatataatttcagatgaaatttaatgacgtctcttacctctgacctaactgagcataattgcgctccaaatgtactattccagtgcagcaatcctgtctgtagcaatagggaccagtcacacagcctgaatacaaaaagatagggggctcactaacaaggttgcctattctggtcactgcactgccatattaagcccggatttatctcctgcaattcctacctattggatctaactttgctctacagtcattgagaacaattaaaatcccttccccccatacctatcatatttctcttatggtttctttcttctttttttttttttttttttttttttttagtatccagtgcctccaacctttttaaaatataatgggtttatccgctatttacatatattttattctttcttgaaactggttcttctggagcacagagaacttataaatgctatttctaagcgtttatgcaactaaaaattattggaacaatacacagtatagtggataagggcgcaagctcagaaacccagactgcctgggttcaaatccaggctttaccaattaatggctcgatttccttggtgaatatatttaaagtctctgtgcttcagtttcctccttcaactatgaaatgaggacaacagtacctagttaatgtggctcttgtgaagatttaaaagaggggcaatattaagcaaaaggcaatataaggaaaattactctacagtgtctaactcttcacgtcaggcaacattcatacagcaatattcatatagcgcttacagcctgctaggcagcaattagggtactgcctaggttgtaagctttatataaatgtttgtcattattattgatggtataggagtgaatgaatacttaactgccttggaaaaatatgacctatatcattgtatgagattgattttattatccagatataaagaagtcaagctcaactagaaaaggcacttgactggagaccagagatgtgcttctagtcccaactctttcaaacactccagatgaaagatcttggactttatctacctcatctttttaaacagaggaatgggactgtacctctgcctctaaaatgatatgtttttattctaggattctaggatcctattccacctggaccctgcttaaatttcattactcattatgtttgaaaactaccattacatactaacattttatctgcatgtttatatctgttgacatttcaatcagcttatctgcattgttttcacgaaacagaataagcctctgagagtctatagacaggtctgaaaaaacaaaaggtgttgtgatagcacagagaggaatttaatgtcactttggaggaaataacctaaagtcctactctgccaagccagtaaaatcctgtcctctgcctgcaacacctggcccagtccatgctatcttgctgaatttcagtgcagctctttggataaactcaaattcaggtttggatggaataccaggttgatacaacagtcattttttttcaacagaagtgcaggttggactaccttttacctaccaaaatcacctcattctttgatatatagaacatttagctaattttattatgacttagtatgccagtactcctcatatactttattgtccatccccagatctagtgaaggcatggtgactggtatcagtatcaaggcaattgtcttcaaagaatgtggcaatctattctaacaaagtaaattccacaagggaacaaggggacagccactctaaattcactaatgacaaaaactttgatattttgtaattaagcacaatgcattattctataaataaaaatgatgtccttgtaaatctaaaagctatgaaacgttatattttctatttctaaaattctctaggctcaaagtcaatatgtaagtctaatttttttaaatgcacaaaaagctatgatatttcaaatcttagatactaaatttgtgaattgagtgaacctggcttctcccgcttagacgtgaacattcctgttagtacataaatattaacgaatattttaggccaaaattttgtgtttggtgattgacttatggaatcagtctaagtaggtgtgaaggtgactagacttattttggaacatgtacaatttcataacagtaacacggccgttaaataattctctttaaatgatatttaactctcattttaactgttagcccttgcattatgaagcagcttgatgctgaagtaaagctaagatttcagtaaaaagaataagagctttatattctagaaggtagaaatcctagaaaaatcaaagaaattaaaattttggaagtttttgattcatttcttatattttaaataggattctaaaataacatatctcttctatacataagaaaatagtctggttcacatattttgatttattgaaaagttattacagtacaactcaggttgccgaatactaacattgctataccagcgttgttttggtaaatgtttgcattataactctggttgtattacagcaaaacactcagaagaaagagagtaacttttacacatattacatagcatctgtacagtcatcccttaaaatgcaacaatacaactgcaacactttaaatactttaaaatacaaatgcctttgaagaacataacttatatactatttattaataggattaaatcaacatttttatggctctctaagcttatcccagaaactcttccattatttcagtgagtaacaagagaattttttttattgtttatttttttttagatatggtttcactctatcacctaggctggagtgcaatggtgtgatcttggtacactacagtctctacctcctggactcaagtaatcctcctgccccagccttctgagtagctgggaccacagatgcataccactacacctagctaatttttttttttttttttttttgagatacaggttctcactatgttgtcagactggtcttaaacttctgagctcaagcaatcctctccttggtctcccaagtactgtgattacaggcataagccactgcacctggccgagggtcttatagataggtaatattaacaccattttgcaaaattttaaaaataaggcaaggaaaggttaaaataagttgtacaagttcaacaagtagtaagtgaaattcagccagactttgaacatagacatcctgttttagaatctcaatgttctttctatttttcccaaagcaatctcactaactaatgtacgtattagattgcactgatatagtaaggacaaagaaaacccattttctgtgtatattgctattgccttagaaaatacaaatagctactgaaaagaccaatgctatgaagcagtttggtaatacctattaaaaattttaaatctctgctacactgtattaatattttatatcttaaaaagttaaagaataatagagcctaacttagatccttccaaatttgtaactcttcaaaatctaaaatgaatttctaattcatggcttataactgctcaagtaggaaacttatgacaaaaccagagacaagcccttccaacagtgcctatgacatcacagatatacaaatctgccccattttacagtacccaaagaagaccggaattcagctgttatcagacaataataaacttcttctggtaagttcgtctcttagtcttagatttacattcccactgtcagcaagaatttttaagttaaacatttttgaaaagtaaaaattcaataaatagcatttacattatccacagaatgtattttcattgctttggtgctaaaatattttattttaggctgttcttttttctcttttccatccacctcttagctcctttgctccaatccttgcacctttccacccttgttctctctctccctgaagcctcagggaagagggctgcaaactgtctggatgcctggaccctcacgctcctgagattaaacccagacccgcccatggcaagagtcccgttctttgtctgaagcaagtgtctgattgagttagatatggagtcgttatcacattgaaaagaaagcctggattttttttatctttggtattaaaatatgttatatttgtattaaaatattcatctaataaactctcccaaagaaaacagtttcattatattttcaccgtattttctcattccattcttaaagccacagtgaaaggaaagttgttgtggtcaccccaaaatactctttcccacttctaatcaaggtctggttaggacaaagctaaacaataatttctactttgtatttaaggacaccagctactgtttacccactgatgttatttatactaatagggggtctctgaagtgacacctaaagcttgctaaaggtttcaggagggcttttgtaaagtcaattttctcccagtatcgctttatccccacagagtaagcagatgggagagttctttttccctcaaaataaggcttatagcattgactagggaatttaaatgtatctttacaattctcaacttgatctcccaggaagagcttttatagatttggatttttttttgtcataaagtattctatttatttcccagcagctggtgtcaaaaaagttgtttttttaatattccttttaaataaataaaatctgttttcatattgtgtaaaattagttttgcctgctgtgagtttgtggcattatgaagtgatcatttcttcccatgaattatttaaagtgaggatatcaaaatctgatggaacaatacaatgaactatacaatacaatttaattttataatacgccagttcataatagtatctcaaaatgcacagtagttgcaatacattggttcagaattagcagatcaagtataagcccctcagtttcatattttagtatttgagaatcagttctaaattttctagtggactagagaatcatgcatatttggtagtccatagatacctaaagacctttttgctaattcctcatgccaggcactgatgtttgcccagcctagatgacattttttttctttttttgtaaatctttaagacattgagtttgacagctgttaaccctttcattacaaaacaatattggtattaatagcatttcccctggagttctctgatcactttgtcttagggaacaaatgcacctatgtagccacaattattcttactacttattctcactgcagagtttctagaagaagggaaacaacgatccattcaaatgccccactgcacttataagacttacagcaaagctgctaaaacttaaattttaaggtgagtgaggtggcataagggaaatgaatgagctgctaatgaatagggcaagacatgattagaagctataacaaagtctgactcaaggaaaggccaaaggttatcttgtatttgatatgtgtgttttaataaattataatcaaaatactacactgactttttcctcagtggattttctagcattctataagagatattttgtctgattaacttgctatattgaaaagtgggagtcagtatatattacttacaaattctcaaatagcctctgaaaaaattccaccacaaagattttaaaaaatggaagtatatggaaacaagatgctacaagatgttggaaatggttttccaaagcaagaactggcttaaaacatagaatagcaataatgagcacttttcttgttagttctacatactgtaaactaatttatgccccaaacagaactctggtttccctattatccatgttgccacttcctcctctaatctaactgtacttctctcgtctcagtgaaaggtgccaccatctgccctgacagttgatcaggccaaacatcagcaactctttttgcctcacccaccacatctaatccatcaataagccgcattaacccaaacacaaaagtacatcccaaacccgaccattcctcactatctctgctatcacgaacaaaaatcacaattatctcttatctggtctcctaactgatttctctgcttccactgttgcaccttataatccattatctaaacagaagctagaattcttgaaatgcaggaaagatgatatcattcctttggtaaaattctacaagttatatatagtgcaataagaagaaattaaaattcaaaaccatgaccagtaagtctctccattatctgttcatgaccatctttctgttctcatcttctaacatttttcctttgttcaccgtgcttctttgcctattctgtctctaaaacaagccaatcttattcctattagccctggtctagctatattgcctctgcccagactgctctgttcctacatctctgcatgactgatttcttcactcgtagctcaaatattatctccacagaaaggtctttccttgtgtggccaagatagccaaagcatccccaattcattctaccctgctttacttttctcttagaactaattactagtatcttccttatttacatcctgtatgtatgtgagtatgcacatgtacctgtatgttcataatctctattacagtataaattccatgaggatgaggttcttggatgtgttagttatctattacagcataacaacttacccccaaacttagtaacttaaaaaagcaaacaccattccacagtttctgtgggtcaggaatctgggctcagtataggtaggtgcctatgggtcaaagtttctcatgaggttgtgatcaaactgtcagctagagctgtggtttcatctgaattctcgactgaagaggaggagacttgccatgtgggggtcttcacatgtgaaggtcttcacacaggggtcttcacacagggctacttcatgacttggactttgctttttctcagggagagcaatccgggagagagtgatagagggactcaagagaaaaaccacaagctttttaaaaacttaaccttggaagtgacatcctatcacttctgtcctttattaaaaatgagtcactaagtccagccaatactaaaggagaggaaattagacaagcaggtgaaaatagaggatgtggagatcaggtggggccatcttagaagctgcctattataattgcttaccagtacattcttagtgttcagaaaaatttcggactttcagtaaacaaattaatttaaaaaatgactctctcatgaattagttccattggacattttgccaatgatcaagaaaaagtagtgaataaaatctcactcaagtagtgacattcaaaccaaaagagatcaccccagtaggaaggtttcattaggatgtgtaagcagaaagtagcagtacagcctcagtttcttcatctgtaaaatataaagagtagttgtaccatactgtcggagacctaatgaggcaattcgtgagggcctcatgaatcaaaggcagtggatagatgttagctattatctattcttaataagtataaatgcaagggaagcatttttagggaaaataacacaaatcatgtttttataatgatggtatttgatacatcaggtttaactcaaaaaagaatttaagaaccactttcaattgtttcctaattatattagcttaaatatgagactgtaaccaaaaagactaataaaattttggaactcatcaagtgtactgaaaataggctagaaagctttccatatatttatgtaaagttttgacatcttcgaatggacataatgatgcatttgcaatctccacaatcatgagggcctaaagggagagagatgtgtagagccctggaattgaagatccatggtgtgactggggggggaaagtctctgaaaagttaaaagaagacagggcactgaaccctgatctaatatgtaatggggttatgaaatttaggcagagggtagtcatagaattattcatgaaatcctagaatagtaatactagaggtcaaacttcatattcagaaaagtacaaatagggtcaggtaataaagcactattccatatttttttttaatgcctgccttggaaggtagcaaaacttaagtaagaagttggagaaattcatagaagatataccaaaatagactgtagtggatgtatggattggagtttgccatcagagaggcaaacaaggatgtctttaaacttatttactgatgtttccatttacaaccaaatggggtagatgcatcccacatttaaagaagccattccaaaagcaggaacagcacccctataagatgttatcattcctgttctattaattacagtgtcactcactcttttactgatagccctgatggagaatcagcatgaaccagccattttcctccctgtatatacattagcaaaactttgaccattaaatagttcaaagataggcttgcctcgctgtctcatgcctataatcccagcactttgggaggccaaagtgggcagattgtttgagctcaagagttcaagaccagctttggcaatgtgccaaaaccccatttcgacaaaaaatacaaaactgtgcttggtgtgttggtgtgcgcctatggtcccagctacttgggaggctgaagtgggaggatcacttgcgtgcaggaggtcaaggctgcagcaagctgagatcacaccactgcactccaccctgcagcctgggtgacagagtgagagcctgtctgaaagaaagaaagaaagaaagaaagaaagaaagaaagaaagaaagaaagaaagaaagaaagagagagagaaagaaagagaaagaaagggagagagaaagaaaggaaatctcagatatatctataatagaggaatctctcaaaacaatttctgcaatatccagtgtggtggatctaatggtgaccttccaaaagaaacgcccacattctaacccctgaaacctgagaatgtgaccttatttggaaaaaggatctgtgcagatgtaatgaggttaaggatttctagatgaggtaatcctggattgcccagggaagccgtaaatccaataacattttcttataagagaaaaaagagaagacagagagagcagaaggccatgtgaagacagaggcacaaactggagttacatagccacaagccaaggaacctctggagccaccagaagctggaaaagcaaggaatgattccccctcacttagagtcttctgagaaagtgtagccctgccaacaccttgatttcagacttctggcttccaattctgggaaagactaaatttaagctgttttaggccatcaagtttgtgctaatttctaatggcaaccctagtaaattaatacacccagaacaagtaattatgttttccagagaggtaatgcaatgtagtaaaaaaaaacattttgagtgagacagatttaggtttagacctggggtttctctatactaattgtgtgtctttgaacaagttactttatatctctatcttcaggttcttctttagtaaaatgatggtaagtttcccttgcagggtcgctgtgtgatatgttatttctgctcaattcagtactcaattaacctgttaatgataaattcacgcatgtgcaacatgtctacagacgttaaaaactgttgttttccttgaaaatcaacatacattttagcaaggtattaattagaacatatgggattgattaatgtggaaactagttgtacaataccaaatgttttaacaaacctttattacaacctgactattcatgtcatttcaaataactttcctggttgtcagtggaaccatattcagtctgttcttttactgtctcatctgtaatatcttccatagtttctaatagagaaataatgaaaaagccagagtattagtagaaaatgtttgcgtctagcttgagcttaagtcagatatagagtcaaaattgtgatcacagaattctcctaaatgttagtctcagaaaattgacaagggcataataatttctaggacagagtagtcaaattcatacccaccattgataccttcctatccctgacattaaaacagacaaaaaaaagtagttctcacaataattttatagaggaagaatataggaatcatgcagtttaggtatctcttattctggaataactccttaatactaaattgaggctctagtgagagctattcaaaatgcataaatgaaagtaaaataaattttcaagaaccgatctttcttacttttctagcaacaaacttttgaaaaaaattaaaaattttaaaaagtaaaatatgtaataaattagctataatatcatttgtagctattgtaatttattttttattcattcactcaacaagcattattaaatgcctagtaaatgtcaggcattgtgttaggcactaaagacgcagccttgaataagacatactactccctaccttaaggataatttaggcaaaacaatcaatgataataaagtgcacattacaggaatgcaatgtaaggcaattataattagggaatcggggaaggcattccatagaaaataagctttaaattgagacttgcaagattggttttatgtcagtggaggtgagcacatgggggaagaaaagagtaatgaagagtattcaaaacaaagagtagaacatatgcaaagaccagaaatgagagtgagcatggtgcaccgaaggcatgaaaacacgtttagtatgactagagcatagaatgctagggggaaaggggcatgaatcagtctagaaaatgagacaggagccaggctggaagattaatattaaggaagtcagaatactgttgcaataacttaggtgagataagatggtaccctggatgagagtagtagttctgatatgaagaagattgaacagattaaggacattcttaggaggaagatcaaaagtaccaggtgattgactgcatgtggaacagtacaggatatggaaaaggtaatgtcaagtttctaatgtcggcaattatgtagcaatactggaggtgagagcatgtttggggcaaagaggtgagtttagaacatgttgagtatgaggtgtctgtgagtcatccaagagaagaggtctagaaggcagtgctcagagagaagcctgagctggagaaatatgtggtggtcattcagatgcagatgctaatgaaacctatgggagaaaatgagattgcctgggaggactgcccaatgtgaggagagagcctaagagagagttcagagaacatcaactttagtactgcaaaggttaagtaagactagcaaggctgcctctaatgagactttatacaacccccttcatagtaagttctcactttctacagcaattcagggctcacacttctcttctctcttttgactctcaaacaaaattataagataagcagggtgggcaacaggacttcttgaagataaaaataatctaggtttcaagaggttaggcttgaggtcatggatctctttatttccagattagttttctttccatgccattactctactcccaaggattagctccttatagcttcttctttgttgttagcctggactgttgcctaggtgtcattttagaggggtgaagtttttttgcattatattatattaaaaattttctccatctggaactgatgaaaggacagaagggctaacctgaggcaaaactcgagagtggcagaactgtttcttagagcttccaacctccctcatctctaccttaccccttctttaaaaacttttgttcatttactcaataattagttattaagataatttgtggatatggaaattaacaagccacaccaagtctctaccttcacggagcttacacagtagtaaaatggcagacataagaaccaatgcactaaaagttaagaaagaggagtgtagaaccaggagacaccaagggcatacctaacctacactgaagaggttaaggaacacttcttagaataagtaatatttcaactaagatctaaaaaatggttgaagttgactgtcttggccactgttgcaaggaggaaaactgattcaaccaacgaatttagaaaattgtaatggaaacgtataggttagtgtgccatcctcttgtatttttcaaaaaagaaatcccagaatttgcaacatttgatccaaaaagaatgaatctcctcaaactgtggaattcctgcactagtactgatatggtttggctctgtgtccccaaccaaatcttaccttgaattgtaatcccagggacctggtggaaggtgattggagcaaggggggcgattttccccatgctcttctgtgatagtaagtgaggtctcataagatttgatgcttttaaagttatttggcagtctctctcttctctctctttttctgtccttctgccgccatgtaagacgtgccttgcttccccttcaccttctgccatgattataagtttcctgaggcctccccagctgtgcagaactgtgagtcaattaagcctcttttctttataaattgcccagtctcaggtagttctttatagcagtgtcaaaatagactaatacaagtactatccaagtataagagaaaacattactctcacctatctcaactcataccatgtaggcaggcccttaatctatctccccctgagtccagatttgaaggcaaggaaagaactataagtaccttgtcttatttatttttcaggactctaagttatattatctccattatacagtagagaaaaatcatctgaaaaattacgcaaatctgcccaagatttcaagccagtaaatggggagctaggtcttcattctggtcagttggctccaaagcatctatttattctaccttgaatatatatacacgtatacatatattttacagatggtgtttcactatgttgcccaggttggcctcaaattcctggcctcaagtgatcctcccacctcagcctcctaaagctctgggattacaggcataagcccccatggccagccaagcatatatatatatatttttttttgagacggagtctcactctgtcgcccaggctggagtgtagtggcacaatcttggctcactgcaacctctgcctcccaggttcaagtgattctcctgcctcagcctcctgagtatctgggactacaggtgcctgccatcacacccggctaatttttttttttttttgtattttgagtagagacaaggtttcaccgtgttagccaggctggtcttgaactcctaacctcaggtgatccaccccccttggcctcccaaagtgctgggattacaggcgtgagccaccgcacatggccatatttttataaagacttgtgcacagatgctcattgctactttatttgtattgctaaaaattgtaaacagtctaaatgcccatccttaagtgaatggataaacaaattatagtatgtctatacagtggaatactatgcagcgaaaaaaatggtgaattattgatacatgctatgacataaatggatctcaaagtcaatatactgagtgaaagaaggacaaaacaagtacagaagattctatttttataatagaattcaaatttttataaaattctaggaaatgtaagctactgtgtagtgatggaaaatagatctatggttgcataagaaaattactggagtaaatatatatatatatatatatatatatatatatatatatatattagctgagagtggtggtgcatacctacagtcccagctactgggaaggctgaggcaggaggatcacttgagcccaggagtttgaggttacagtgagctatgatcatgccactgcactccaggctggttgacagagcaagtccctgtctcaaaaaaaaaaaaaaaaaaaaaaaaaaaaaaaactttcatttctcttgtgtaaacatgtaggcatgaaatggctggataacatggtaaacatacatttaactttttaaaaactgtcagactgtctctaaagtggctgtaccattttactttactgccagcaacttatgaggcttccagtttctccatatcctcaaaaatcttgctatgctcagtcttttaaatgtcagtcattctaaaggatgtgtaatagtgtctcatgattttaatttgccttcttctaacaatgattgatattgagcatcatttcatgtgctcatcatataccatctttttctttttcttttttttttttttttggtgaagtgcctgatcaaatctttgcccatttaaataatatgttgtatattattgagttttcgaagttctttgtattttctggatataagttctttatcagatatattctttgcaaatattttcttacagtctgtggcttaccttttcattttcttaataatgttttcaaagtgcagaattttttaattttcatgaaatctaatttatcaacttattcttttatgggtcattcataaatgaattgtgcactaatcatctcctaacatactacatgagttacttatcttttcactgatggatcccaagtggctagtaaagtactgaatacacattaggtatcaataaacatctgatggataaattaaaatttcaaatagtgaaagcaaaattatagaaacttagttcattggcagcacagaaaataaaatagcctctagtgcaaagccatattcaattttttgttatctgatctagtatgaagtttgatcgatacaaggacccaaatttattaaatcttgttaaagaacctgatgctctctctctagagacaatcctttcttccccaaaatagaaatgtgaaattccatagaacttaaatgtaaagcagtaagtcccctacccacctctgtgcctcacctcgcccgtgactcaagtgctatatgaacccctgcaaataaatcaaggctgctgaattctcaaaagctctaattgtgccaattgtaaataagcctcaggatgaatttcaaccagcagtgtccccaaaaccattatctgcaactataatccattacttttctttcataattaatttttctaataggtcagtactatttgttttgtttaagcgctattccagcaatcccattttaccaacaaccaatgtcaattgtaattatatacatattttctattatatacaacaaatacattcttatattatgcgaaacactaaattgggcagtgattttttaatgagtaataaggtaatatgctacattggtgctcaactgcacttgtcttgaccatatgaattaagagtctagtggaaatttataagcaccttgaggacttccaggtatgtgggtgcttaaataggtactcaaaagatgctgcttattttcatagattttaatgtctaaatcactgggaacaatgacaattaccagagatatagataggtggttagataaacacacaagagatatgtatgttagagacatacacattatagagagtataatagggttgtatacacacctacatatacctatataatgtgtgtgtctgtgtgtttgtatgcatgtgtatgaaatcaaaatgcaattcactggaacactgaagacaaagcggtcaagcagctgagagaattcaccatactgatgagctttcctcctcagagagcttgctcctcaggccctcactcaaaggctctttattctttttagatacaattctaaagagtttgatatctacttttccatccacaacagactaaatgctgaaaactcgagagcataggtgagcttgtgtttgatgctagctgcaagcagcctgacacagggagaaatgagagctctcctagagccaatctggggagtgtcctggtgagggcactgagacctgctagttaggaggaggcctagtgcaaacaggcaaaattgcttggatgaagggtaatcaatctgagcctagttcttttggatgaaacctttgagaactcaatgacaagaggatatggatccaacaggagactagtagagaatacaaattcattattttgctatacaatgctagttgcattttaaacaattgtttctctatgaattttactaccaggcttttctgaaccattctgtgtgaattcaatactgcctggatttttaaaaccacttctgacactataaaccagagaaatctttcttaaaagataataagaagatggggccttgcatttctcataaaaggaaaatgactccaccataagtgtattcattacacactgttgaggcatgaattcagggaaaattagactgaatatgagattaccatcctaactttctgaaacactcccagcgctgtcaccagagttcttacttcaaatatttactcttgatctaaaaatatcttagtccaagaaacggaatgattactccacagttaaagtatatttagtgatctgagagaggagaagtttcatttcactcaagcaaatggttttagtaccacaaccaattaatagcttcatcatgtgtgagccatgattataaaggaatcggactaattttttaaacaaatctataggcttctcacaagggctatttttcacaatggtcaccttggaagaaagtcactccagggataccgtcattacttcagatttgggaccttacctttagaattggttcatgagaaaaaaaaaaaaagaaacactacatgcttcatagttaccctccccacctaacactacatatccctgatcaccaactttgaatatgcctcatttacactgatcaaccaaaagcctcctggaaatggtaacacggcctatttatcctgggctttactgggagggtgggggatgaagagggtttataggaattaagagagtctatttttaattatttcatctgtgaaacatatgaaattcctttggccaaaaatgcaatataaaactcagattatcaagggccttttcgtgggaccagtgaaatggagaaaaaagtctccatgacaaaatagaggacttttgggaatccttttttttctgaggtttgcatgtgtgtgtttctagcttggctctcacctgaactgctctttcataatctactgtagtcattgggtacctggaatctgggaaaactccaaccttactccagcacttgtgcaataacacagtaaggcacatggagtcaagtttaagcacttagtccagggttctttgcaccctgtgggccttcagtaagcacttgttgattgactgaatgcgtggctcactatcaatgtgaattaactatatacatactgcattaaaatccaacaacccaaatactttctagctttcaggaagtaatgcatctaattgacagaaccactcttatgcctcctaatccccacttcctacaaaccagctcaaaggaagagagagaatttgaagaaacaaaaatgaacataagaaaaacaattagctgatgcactctgcaaagcctgtaatattatctagaatgacagcatagccattgttcgtgctgccagagccccgcgtgtttgctagctcacccgaggtcctgagagaataataaactaagcagattagatgtagactgatgcctccatgccaccaccaactcacacaacacacacactgttctgagtgtctgaacacatgcgggcaggtaaacccagaaaatgggcactccatgttggcaggaggggaagaggctgccaacaaacagggcctgtttattatttaacagttggtactgctagaggcctggcaccgctatagagcactctctgtttcagtgcaagtcagcctgattatgagagcgtgtgagccaaatcatgtttaccatagtctgtgagaacctctgtgcccccaacagacatggaaattcttacaatagctctcgtccaaacagagaaaaatcactcctgagatggaggtaaagggccccacgtgcttaaattttgtctgatcagctggctcagtgtctctacatgtagttgttttttccctgctcaagacaagtcattcctctctaatgatacagtttctaatcctctgcctttggttactttactttgggacctaaatcaaccaaatactatgtcaatcacccatctactaatattgcttatgctgtcctgcacgctttggcttttcagcaaaagaatctgctgcccagggcggctacctcctgcttctccttcgccagggctgcctctgcagtaagtctcctctctgccaatgtgggccacaggtggatgccttcctacaaatccaatcagcaggataatgtgctactatcacaagagtggaccttaatgacaaagagccctgcttagatggtcaccccattaactttgatttgattattctgccccagcagaacacttggcttcacaaccacagatggcaacagtccaacataaaacctgtagacagagtagtcatgttgggttcatacattttcaaaatattaaatttcatgtaaaaatataaacatggtaagtattgagagagtccctggttccctaggaaagcactgttttcttttcttttttcttttttttaacaaaccaaggtcagagcactgagacaattgtgctaactaggcaacagggataatctaatcatttcttttgaaattcaacataaatcaacatttcttttaagtgtaagaacctggcttttatcttccatatacaaccaaggcaatctttgatactttatgtgactctattctatacaactgtttttaaattcaagataaaattggctctatataagctagttcaatattttgaaatttaattgtaacttggatacacttcctctgtgaccatgagtaaatcattaaaatgctttctaccaatgagaataaaggcatagcaaactataagtcttacctgaaactgtatgcagtgattgttttgtgttttgttttctaattgacagttgatatttatacactaaattatcaaactactatttgtttttaattaattcctcaactttgccactcaaggaaaatgatatatgctttgtattgttaagtaaatacataattttatacttatcatgttattatggttttcaaagaaagtagttgtccctaggtcacagattatatacacatgcatagcaaaaagactttacaaaaacaaggaaaatatgaaaaaataattgcctagcttggatcaagttaacccctggtttaatttaatcatctcctctactgaggatctgataagagattcttaataacagccccaaattaaggcaatagaatcaggaaatctttttttttttttttttttgagatggagtcttgctctgctgcccaggttggagtgcaatggcgcaatctcggctcactgcaacctccacctcctggattcaagctgttttcctgcctcagcctcctgagtagctgggactacaggtgcccgccaccacgcctggctaatttttgtatttttagtagagacgaggtttcaccatgttggccaggctggtgttgaattcctgacctcgagtgatccgcctgcctcagcctcccaaagtgctgggattacaggtgtgagccactgcgcccggccaaaatcaggaaatctttcccaaaacatcctgtatatagcaacactcataactactactttatggcagaataatggacccgattacaggttcacatggaaaaagttgatatttcagccacgaccaaaatataaacaggatttttcatagggagtagatggtgtgttcatagcgagataggtggtgtgttcatctctgtgctgagatacttcatcttaactagtaagaaacatagtaatccctcacattcattaagaggtatgctgtaagagcttaatatgtatacacccatttaaccttcataacaacctttattttttagtgactactatttacagtgattactattattttctccattttacagacgaggaaactaaagcacagagtggttaagtaacttacccaaggccctgcattatgtaaataaaggggctaaaatttgaactaaggtggtctggctccagagtcaaagtgtaatcactgtgttctgcttctcataataacgatcactctttctgaagcttgtgttcaatttaaaactgtatattccctgaggctgtagaatgttagagctgaagtaatttaaaatgatctaacccatggcctaaagctccaggtggagagaggatgtttgggaagactgtgtagcctcaaaattttgtggataggcacacttttctgggaaaagaaatgagccactcatctagtctaaatgtctcagttgagggattaaaaaaaataaagccacaaagcaatggctgtaaatgctgcatattttaaggaagcaatataaaaagaaccaagcccagaaaccagggctgttttcattatcctgtctacccaaactctcttaggtggctcccttaaagccagaagaaatctgtgtgagggatgccgagtcagcctgtttctctacttggctccacatgactcagtaaagcaaatcaatgagacaagatatctactcatgcaagaaaaaacagaaatctagtgtgatgttttcttgactattcaatgctaatggaaaaaagttggtaacacatttaagaggtaagaagaaataaaattgtctctttacaaagttgactgatttattcatttagtagatacacacacaggtatacacacatacacacaatttatttattttagtggtagcccagaaactttctgaatttcttttgtatttctcttgagtcttttcctgtaatttatatttacttaaaatttatcccttatgttcaaatttttcacatatatatataaagtattcattataatcattttaatttcctccatttctctggttatttccccattgtatttccaattttgtgcatttgtgggatttctcatttagtaattaaatcatgtgatattggtttgtttattgttctgttattctctttgaaaaaaccaactctttgatttattagtgtgtctcttttttattttctaattccttaacttctgactttatttttttaatcaattccttgtttctactttgcagatttgttttttgttcttttaaccaacttcatgagatgaatggtaatacgtttataattattttctttcctgtaatagtcatgtttaaagatatggatattcctccgaacactgttttatctatatctatacatacttattttctgtaaattctgtaatgcctcttaagcaaaaaattaattttaaaaagttattggtcttttttcttatcaattcgcaggagctcttattttttggagatactatttttgtctgagatacgagttgccaatcaaaatgatcactttttcatatcatgtaaaaactgttttttaaatttttatttgcttgatttttcttattcacaattgtggtaatatcagtagaagttcttctccttcctctcccagctttttgcttcctatatggtttttggtcccattagagttttattttcttcttctacttccttcttgttctctcacagacaattttatttctccttatttgtcttatcacttattcaatcctgtttatctagtttttgaactttcattttattttattttattttatttattttattttttgagacagagtcttgctctgttgccctagctggagtgcagtggtacaatctcggctcactgcaacctccacctcccagcttcaagtgattctcctgcctcagtctaccgagtggctgggattacaggcgcccaccaccatgcccggctaatttttgtatttttagtagagagggggtttcaccatgctggccaggctggtctcaaactcccgacctcagctgatccacccgccgcagcctcccaaactgctgagattacaggtgtgagccacaccgtacctggccttgaccttttattttaaggaggccacaatgtcttctatttatttgctagtatggaaaatagatattattttcttgtataattcttcttgtggtatatgttttgatctggtttctttgtattgcttttgtttttgtttaaagctattagctttgcttagctgatagctaaatctgggtccaatgcaggttcctttctgattagttttcatttttcactgagttaattctatcagctgtttgctgcaggaaagaggctggcacagtaaactgaggacttcagggagtttctttttggtaccatatttcctgttatgttttacctttctcaccaactcgaccgtgcacattgttcaagagatatggatctgcttagtgttctcagtgtcttgtcttccccatttagattagcgggagttccaaagggcttgcacaaagtcctgcctgatacattttccaagtcatgatctaatatttccttatttctcttctcctgaaggtgatcaacagtggcaaaggctggtgtggtttatcttctccaccttgccacccatgcatcctgcttttggcacatgtggcaggctggtgtcattcctcattcactgccacctcctctgttatcatctgttgtagaacaagccttagcaacccttctgcagaccacctatagcctcacactttcctgttgcatgtaagtaactggagcatgtgtccatcaacttttggatgttctacctgctgcctatatttaaaatactctcgacattgtccctgttctaaatttcgaaatatcccatggtttctgatttgagagtgtacctgccttctgtaagaaaaggcttttttatatgcatctcattttctatttaattgtttgttgcacagcaacatatgcgacagtgttgcatttagtttttcatctgtggcctcctaaatggcaaaaacaaaacttcacttattagctcctctccaatccttctctcaatcaagtgcttgcccgtccttgtccttaaacccctggactaatcccttgtaaggtgtcctgttgtaaggtgtcaactacagcattcacattcattgaccatttatatttcccctcataagcatatttgcatttaaataggagattttaaaaatctaaactaaactttagactaccagatgaagttataaattaaaactttgattgtagaatgacaaataacatggtatatgtggaaaagaagttagaggaccccaattagtatctgtaaaatgacctcatgtgagtagcaaagttatgtgtgagttgctttaatctttaaaattagcttctgcaatgcttcattgttttctataatagaagagtaataggaaaatgaggcatttgttgtaagtaaattttctagttacctgtttaagcagttttcttttaaactttaagatgaaaatctttacaatgagttcctattttctgaaacaaataagtgacttgatatggtagaaatgtactggagtgagtagttccagattcttaagttctttctgttacttattattaataaagttttgacacatcatttagcccacccaagcctcagttctcccatctgtaaaacaggaatagcaatacttcctttcttgcaatataagttttctgtgagtggaaaatgacataatatgtgtcaaaatactttgtatactaacaactagaaaatgataagagccttaataataaaagataatccaaataaaatattacactactatcaaagataatagaggctaacagggaagttatataaatactttcatgattcttttgtgtgttttttcctagttgtttagccaaggtactcacttctatttcagttctcattgccatcagtgagtctgcctctagaaaaaacactttctgttttcccgcctcctcttctccagtacatttgtatagtttttgtctttgtttctttggtatgttttctgtggctttaaattggctgcaaaagattgcatagggtaatgaaaagagaaagcagctttggagtcagacagacctggtttgaatcctgactgtgtttttgtgctcatcacttaacgtccctgaatctgtttccttatccataaaatgaatttaatcactgataccctgcagggctatctaatatgtgaagttcttggatttcatcaaatctcatttgccttcttaaaagtatattttgcttatttctgtgtttttaattgaagctttatgacatttgacaatggatacattgctgcactctgatcagtaattattttattcaatgaatcatttcactttttttctaaatgtcaccaaagactctagcttccttaaaatctactttttgttaatttccttgactaatcttatagttccaatagtttctctgcttcaatcagctttcttttgtctaaacttcttctgttttctcttgtaaaataatttatcctaatcttaaatctttacgacagagaccatatcttctttggccataatgcatcgaatattctgtaaaaaccacatcactatcaatcaataattatgtgtgtgttataagtatgtaaatgttatagatctcatagaacttatccactctgccttagcttattcctagaagatcacagattactattatatagcatttgtataactctttatcatttgtgaacctttcgtaattatttaatggaggtcttcaaactactagtatagattgattttgttatttctattgttgggaagggaaaacaaagacagaatgatgaaaacttgtcagatatatcccatgttaccaggaaaaacaggattagcacacagtctcttattctctgatctgctgatagtctgttgagctagtgttttcctagcatgaaaggaagaaacatctattcatttccaattattattttctggaaaaggtattatggagatggttctctttatgttcaaaataaataaaatgtccgagtgattcctggaacttgggagaaaggggaaggtaaaccaaaaactagggccagagagcaagaaggaggtaaaggagataaaattcgtggtgggtgaatcctcatccgtcattacatgacagaagtatttaaaaaggaaagctactacctctcctcatctgaggcttcctccagaaccctgtaggagaggaagatacactgctgagtcttcatttggggagcagcaggagaaggcagtgcctccttagccaaatgaacctttcctgacagctgtggggatatgtgtttgtgccaccaggccccttagaaaattatccctaaaataactaatgtttagtcagtcaaaacaacaacaacaacagaaaaatagcagcttcaaagcgaaagttatgtggcgagagtaaataacccaaacttaacgtgaccttcctagcattattttagggaggcgttagggtatagagagtgaaaaacaccctgaggtgggatttacaagtcttaatttcagtttcagcagtttcactttctggctgtgtggtattagacaagtggcttaacctctctggacctctctgatccttcagatttaaaatgagggggttgattactaagtgacgtctaagagcccttctagagataaaaaattccccaatctatgataataataattaacatttgatggtcctttaccacctacaaatgatttccacatacattatctaatttgatcttcatgccagttctgaggtagtattattatgattatgcccatttttggaagagagattcagaaaccacaaaatggcagagttggcattgaacagatgttcccaagaggcaaataccccttcagtaaaagaagcagctgatgctaacaaggataaataagagcagacaattcagcctgtgagctcttgtttaggggtacaacagaatttctggaagctgcattggggtaatgataatccaccatgtggaatgttatctgatgatgtatttatcaaaaaaaactaataaaaagaaaattaaaaaaagatacaataattgttactgcactacaccctaatgaattattgtgttcaaggttcttacaaaaaaaaagtaatattatactcggcttatgttttaattgatttattaatattttatcacaggaatgtaatttaagctcctcatgatttagatctcataaacctttagcattttgcaaattcaaattccaatttaaagccagggcgagcaattaacttttctatcatcttgtcaggggagaaggttcgtgtttaatttgagacaaagtgacagaaatatatatacactgtatgtattactccaatttaatttatgagtcagcaccatccaccttcaaaatgtagatttaatagaagaggaggaagaaaaggccgtgctgtcatgatagggctgtaatatctgccctgaatttcttacatattaaaaaaaagtcactggtttgttgagataccaagctagattgattgcaggcctatttccagttcttttgtttcacattccacttcctgattcttttctcatacagcacataatctcatggatatcacagggagttcttacccccacttctacctctactcctaccccatcctccattttcatgcatagctgcttctacaggtttatcctaaatcttgacaagtgagataaatggtaaatattgctttgagatcacgtcttcatcacctttctcatctttccaaagccaccttctaagtgctctctacctaaaacaaacaaacattaaaactcctcgcaattttatattttaatgtgcagggtgtatctggcacggtaaaacactggcactttcccgtgatcctttacaaaatatttaaggacaggatatgaataaataagctaaaaccacagaaggtagtcaggtgaactgtagggaagtacttccccttggtggttattaagcactggaacagggctgcggagagaggttaaggaattcttactagcgccgttatcctataattcaccaaaggcacacaatgctctatgctgatgagatgagttacatgacatctcctccctggttcaatcaaaggaaagcaatttacatctcaaaccagttctctcatcagtgggacataaaaactgcagaacagagatgcagcaaatgtgcttatttatacagaatcaactcagttgccactgttctttattattttccttctctcccacctcccctgtatggtggccattttgaataggatgcttaaaattctaaaagtgagaaaaagaaccaagaacaattcagtaacaaaattaactaaagataacttgtgcttctgacaatcagtgtcccttgtggtgctaggccaatccctttgttccacttaaaaataaaatcggattcctcttgctggccacaggaaaagaattagaagacgattaatggaaaattctggaaggtagccttgtaaatgtttattcacttttcaggcatacaatgttgtgctacataagtgaatacagtgcatttgtcaaagaaaggccatgttgaattagtgtgaggtcttcattcataaaacaagcttatttttactaataatctctattaatctcagcttaattatattaggcatttttcacttgcatacaacagtaaaaatggccaaaactgcatttactgcacctgcttaaacgcagttatatccctaaaaacgattgcagggaacaagctcccacagacatggcttttaggcagaatatgggattatggcagaggggtttaaatacaggaggtaaaaatggtaatcatattcatcaactacacaaagaagtaaaaacaagaagctctagataattctttttagtggactcactaaaataacaataacagcttgatgaagagaacatgattgtcgaaagcttgtccattttacattttctctttacatagtgcaataaaaaggaagcacctgcagtttctacttgtgcgtgtattcgtgtgtgtgtgtgtgtgtgtgtgtgtgatgttgaaagaaatcatggacatcatatttgctttaggagctactagtctaatcttaagtgcacattccctaccataaagttgtatttgagctccgtgcagtgcagaaacattcttcagcttagaaagtgcagtctttgcttcacacccttttccttcattcagacacatcagcatcttatcactttggacattaaagtaaaagagacttctttgtcatgaatatttttagacaaattacaccaaaatatcttgtattttccattttttagtggaatctactttactgacatataccagcccaccataacatcactgttgtgatgtcctactacttatctaaaaaaagtactattaactacatattgcaggtatttgaagtatataagaaaaccataaactgaattacattgtatggctggtatgatctcacatgaagtttgagctatcattattaaaaacagaaattgcatttagttaatgcatctgacagtaagccagtcaactttcaaggttgtatgatgagaaaaaaaatattttttaaaaaaacagaaaatgcctgaaaaatttcacaagagcatttcacatgacaagagaattcttcctctcccttctgctgcctgcctgcccacctttcttccttccttccttcgttccttcctttcctccttccttccttctttccttcctttcttctttcttttcctccttccttccattcttccttccttcctttcttccttccttctttccttccttccttcttgccttccttcctttcttctttcctttttcctctctccctctcttctccttcctttcttccttccttccttccttcttccttttcttttctcgtgcttctctcccttagtttctctcttctttccttccttccttcaatttggtggaggaggtgcaaaaatttgagtaagaaaataatatttttgtttcagaatccacatgcttttactattcatcatgctaacttagggggaaatttagataacttcttatggcgttttttttttttttttttgagtttatagatatctttcaggggtcaagctatttccaaacattcttataatggcctccaatattccacactgcaatatatagcatgctctaagcaaaggcagtcttttataaaagactgcaatagctagtgaagaaatacttttttttgattacttttataaaggcacagagcaaacgacagtacagtatgtacataaataaagcaaaggttcaaactgcacttttacaactacaatgtcactaatagacctcatcccctctctgctattctatatatataggttgaaatctgaggcttaaaacaatgtttgaacaacaaaacagaataaatgactaacccaatctttcaggttccaaaaacagtactggagagttttctatttttataggtgtttgtcactatggacattcaatatctataattctgaaattacagccgggcgcggtggctcacacctgtaatcctagcactttgggaggccaagatgggtggatcacgacgtcaggagatcaagaccatcctggccaacagggtgaaaccccatctctactaaaatacaaaaaattagccgggcttgttggcgtgtgactgtagtcccagctactcgggaggctgaggcaggggaatcgcttgaaaccgggaggtggaggttgcagtgagccgagatcgtgccactgcactccagcctgacaacagagcaagactccgtctcaaaaaaaaaaaaaattctgaaattacaacaaaattaggatctgaatatgtgttttacaaaatgatttgctataggccttcatgggggagatggcaatccctagtatatcaaacactgtggcttaattttttttaatcttcacaaaactcttcaagaatggttgtcataatgtaagaagtgtcagcattaccagaacaatcagagatttccataggcagaataacattagagattacgtcattacaacagatagccctcatactcaatgcatcttacatggtcagttaaaccaaagggtaggaggcactataggataattgtgagaagagttgctttctaagtggaagaaaggtgaaaataaagcacctgcagtgctgtgctttcactttacttcctgccctcacagtcatcctggagatcttactggtgtgctttaactgtcttgtggcattctctttcaaaagcatcttcagggactaaagttcaggttttatcagaatagacatagtcctgtgctacttgacagaaggcattttactcttttttatggtttcactaaaatcaagagtatcacaaaaacatcttaagatctgaaactgggaatcgcctcataagcatgtcttccaaccctacaggttgtataaggcaagtatgtgtagattgaatggaaccctctatgtctggcttttcagtattgtaaagactttcaaagctcattaagtacttctttgctgatacacaccaagctaagtcccacctcagggcctttagaccttttgttacccatgactggaatgctcttcctctagggtttagcatgcttctctctttattctggtttctcctcaaatgtcacctcttcaggagacttacactgaccatcacatctgaaatagcttgccaactttactctacctatctcactttattatttttcatagtatttatttttttccggaaattatgtactgcttattatctgtctcccctaataaaatttaacttctttgaaccaaatactttgtcttattccttagtttattgctagtgtccagtactgtgcctaatatatggtaggtgctcactatatatttgtcaaataaataatacttaaaatttaaaaatttattctcctttaagttgtacagtttaagcctcaccttattttctgctgataagagaaggtatcacctacaatgacccttcacattctagacaattaacaaagtctatgtggaagaataactattccaggaagaatgtgttcagacctggtttgaaatcacagcctgttgctgtggggcatttattacccaccatttagctagattactgaatagatggagttaaccaaaatgctgacaagacacacaccacacacacacacacacacacaaacacacacacacacacaccccccaaaaacgaaacctcagccctccaaaactctccttactcttgtaattggagtgcattgccactttgctccaagccaaagaacagataagaaagagaagcaaaaatcagaagaactttggaagccatttcactagagctgccacctgtcacttacgtaagaagatgcaatcatccatctgtccaaactggtgaatcataaggtcttaaatactatttactttccccaaaatagtgaatcccttgcaattttatatcacataataacaaagggacatgattcttatttgtttttcctttagatacacatagaacattttctttaatgtggcatacaactttaaaaatataaacaccaattcactgaggtatttttttggtagaaaaaagtgtctatcataattttagtagcaataatagttctgtacatttcttttagcaattacaacctcagatttctaagcactgtgcaaacattaatttactaagttctgctgtgttctctttgtgaattagaatattatcatatcttcattatttttaggtgagagtcacatggctatgacttgccagggccacacggtaaataattttttttaaagtggtaagatgcctctgttttgaaagtggatgcccagggaagattaataaaataggataagaacatacctaaaatggcatctgtttttttttttttaacctagtgcttccattcaaattttgttttgggatatgaagtcacctgatagctcagttcaaaactcgaataaacatccttgaaaatagtagggttattctttaaaaatagtagttatcaattattgagtgtgcaccttgtgccaggcacagttctaagagatctagttctaggagggaaagtgtacgagtccatgtgaacaaggacttggtgtcttattcactattgtatgctccgagcctataacatacctggatggtagtgagggttcagttggtatttgttgcaataagtgtataaataagggaagctttcttggttccagaaaactaaactgtctgaattttgaaacacaacctgtttgtaagttgggggcatcatattaaacattttcttttggaagcagaggagaagggaagagattttatttgacccaatatataaccaaatctaggataatagtgatcctctttacaataaagttcatttattcaacaattatttattgaatacatactatgtgccaggtattggaagaggttctaggaataaagacaaggtccttatttcagaacttaaattactgtttatgggcataagaggaaaatatcttcatatacaatgcaattatgaggcaagatttttctatgaaccagtgacttctgtttgtttttaccatgttaccctcctaatttactaaggcttcaattacttggttttcttctgagtagccaggaggacattatagcaaaaagtaagtatactgattaattacaacatatatccataaagtggaggggatatctgaaaatcacctagagaatctgaccaatatctaagaaattaatttaggtcaaatgattagttctgaaatgtctgagttatctatattagttattcatattgccagttcttaacttgttctatacaaacacaatctgaagcttcatctgggcttcttcaaattggaacctagttacaactcttaatggataagttcaagaataatgccactacaataaaaaagaaataaagaagggcacaaagtattagaagataaattatctagagattaataaagtctttggtaagagtttgcaactctatcacatatgggctaattggaaatcactgcttccagggctaatgacctcatttgaggttaccctgtgggacaataacatggcctacctctgtccactaaacaaattctgtcaaaacataacttaccaaagtatagcttgttgaggggtatacatatctgaatttattttactctgataatctgcccgagaggttctgttacttgaaggcaatatcacttcctttgggttcacttgtaggacacaaaatgcagcttttacaagtatttctgcttgtaaactaattcttcagctatagtatataaacttcactctataagaaaaccaaagaggccaagggacattaagtttggtgtttaattgctatcagcaattaaaaattgctagcagcccacttaacattttcttcttcctctaaaaatgaaactgaaacgtatcttttagctgagagttctgtaatgctgagaaaacatcctaaatacatcttggcaaaggaagaaaagaaaaaaatgtgatattgatgtatttgctttcctagtatattgaaatcaagaactagatacaggtgacagatctgcttccacctgctggctcagtgaatttgtaaaactgaaatctgttatctaaaaatcactagtacattcagaattacttagcattccctttctgtttgtacatgttcatgacaatgataaaacagccccaggaattctgctaccaatcttcatatatatgtccattgacattgtctccatcaaattcaatccaataaaattaaatggagttaaataaagcagtctgcttgaacctcagtatctctcatttcttattgtattgtacctcttatcatttcttatttatttagccaaggttaaaaaaaatggtttccagattcaattataatttccctcctggtctcctatttcttaagtattttttcctttttattttcatataattacaaggatttttttttttggcaattgacatgaacaacattattcaaaggaaaaaatacttaaagtagctactatcttatagcaaagaggacatttccatctatgtttaccataaaaattttcactggattccaacattttcatataatactatctacaaatattgcctgctttgagaagactccaaattttaggaggtagatgggcgataggtaatgcatggaggaagttggtaaagaagacaaatttctaactatgacttccggagttaaattttaaaagaaattgagaagtatacaaaagtgttaagactgaaatatatgcaattggcttacaatttctccaaccacttgaggcaagagggtaactccaacttttgccccttcattgccacacttcttcaatctgcatatggattttatgtttcccctttacggctgcccttaatattaattttaacctcaaataaaatttttttggaaggaagagtaatatacacattataattttctctggagttttcctcccataagcaacagccagatgacaaccaacttctcattagtctcttgaaaaacgaatcagaaattttcttatgtccttcacacaggattgccatctattataaatagtgctgaaagaccccacacacagcaaactgaagcatgtggcatttaatacatcacacagaaggatcaagaattgagtcaacacttctagggcttctacccctcaactatgcatttccatggtacccatttccatggtttttagacttttaaacaaacacatttgtctaaaaacaaatacatatgtaggaaacatttctccagggctctcgccttttcagctgcttttggttgacagatgagaacccacatacagtattctgaaattctgcgtcttcttgtcttaagtactagagaaagaaatatttggtcctaggtggcagatcttacttatatcacttctattaaacgggcaagatagagtcacaaaaagaggacttatgattttcaccttataatggattccttcttggcttccttccacctcctatacatggatttgaacttcattttgaagacacttacaattattctgaatgaaaactatcattttcattctccctctcaaaaaagtttctgaagaaatttgttgcaaagccatgctatctgtaacattacgaatatgttagcatatttttagtgcttcactagatttcataaatcttacttacccatatcaataacaaccagtataatttgaaggaaaaaggagaaatcttgtgtcttaaattatatcatttaaaattcatggatgaaggtagtatccctagaaatgatctgattctatgtgactccgggaaagatactatttcatttctgttttagagattaagaaactaaagtacagataagttaactaacttgcctaaagccttctggtgaatgagatagccaagatttgaaccgtggagtccaacgccagaggcttaaccattacattattctacttctgtgttaagattaatagagaggaattaaatgcataattttggaggcaaacagcttaagttcaaatcccaatttcaccagttactagctacatgaccttgggcaaagatcttaaccactatgaaactttatttcctcatgtatttaaataatagctgttcttcactgagtactaagctatgttccagttatcgatgctaagtgttttacatgcattattccatttaattatcataataactcaaccaagtatgtagtgttatcatcccagatttagagatgaagaaactaaggttgagtaatttgcctattgttatacagtaaggggcgaagacagaattctagtaagggcaatctcactctagacaccttactcttagtcattaaatttggtgataataaccaatagtgtctacttcatggggtttggggttgtgttttggtcaggattaaattaggtaatggaggtgtaatggctaattttataggtcaacttgactgagccacagggtgctcagacatttggtcaaacattatttggtgtacttcagtgagaatgtttctggatgagattaacatttgaatcagtaactgagtaaagcagattggcctccctcatctccaaacagttggaggctggaacagaacaaaaaggctgactctctcacaggtaatagggaatttctcctgcttgacagcctttgagctggaacattcctttttttttcctgtcttcagactcaaactggaaacatcagctctctgcaggtctctggcctaaggaagttcagactaggactataccattagctttcccaggtctcaagcctttggactaatacgttggactaacgcaattggctctctggggtctctagctttctgactatagatcttgggacttgtgagcttccacagtcatgtgagtcaattccttataaaacatctcttctatacaggtatacattttattagttccaattctctggaaacatagtacatagtttctgacacccagaaatagttaatgaatgtttcttaaactgctttcccaagaaaagccaacagaaaaggaattataggatgaaaaagcccccttcagtaagagcaaagataggtccagatgaggaggataatgttctgtgggcactcggctcttaagagaggagcaggggtaggggcaaattttaaaacacgatctgcagctaggtcagatgataagcttgtttatgaaataagagatggcaggaaaaccaggttgatccagatatcaagaagaaaagccactttcatcttccactaccctaactggaagggaatcttggttccttaccatgatagcaagctgactagaaatatagatgtgatctttccctttgaaaagtaacaggttacagggaaagtgaaggaatttatagaaaaggtcaagtttgtttagtgccttactgtgtactacttcaaccaattcagctctatcacccaggttggagtgcactggcacaatctcgtctcattgcaacctccacctcccagattccagcgattctcatgactcagcctcctgagtagccagggttacagacgcaccccaccacgcccggctaacttggtattttcagtagagatgggatctcaccatgttggccaggctggtctcaaactcctggcctcaagtgatccacctgcctccacctctcaaagtgctgagattacaggagtgagccaccgcacctgccccaatccaactcttacatacatactttgtttccagctataaaccataggggcataaaaagacttctctatggaacaggttaggtccctgaagttttcaggtctaaacatgctggagatggcaattaaagctttctaatatatgcgagttacattaatatctttgaaatacccattcaattaccccagctcaacacctgttagacaccctctctgtcaaatctcttctgaataactttgtttagttagatttggggccagtatcgtaacttcacgtagtctgtacaggaagaaaataagtaagctttactctggatctcagggaacatgtgtttctcccatcatctaagctaaaaaacaaggaagctgcaacagctgggacaagaaggaaaagccaatttgatttttaaagaaaatagaaaataaaagcaatttgtccaattccaatgtgtggtatctatgctgatttttctcaaggaaaagtgcttatcattgccaaaatccccaaagtaaccacagctgacaaacttctcagcatcagagcacttggcaactgacaataagacctgctccttccccaagcggataaaaagccaggaactccccaaacaaaaccaacagcttttctgtactcttagtctgccttcatgtcttttgagcacagtatattgtcctgtgtaactggaggttcatgtagcacactgattttacccaaagcatcaaaactaatataattaatttatataatcttctagttacactgactatagaacttaccttcactacctacccaaatgtctgctgctgatatatacatatgattgcacaaattctaaagagtactctcaataaacagaaatgtaagtctgctaaaaatgcttaaatatacaaagaaatgcaaatataagctctctaccatacataggatctttgtttataccagttgcacatgatcaatggaaaaggacattcaaaacacttttgaataaacaaattattatcttgcattagcttgtatcaatagaatccttccaagtattttttgttcataataaaaatgtgtataggttggtttgattattttttactcttatcatggcaactcaatataacaatactgtgcaggtggaagagggaagaggggaaaggagagaagctgcaaataaccaatttaattaccctaacagtcatttttttttgcaggaaaaaggttccatatgataagaatgtttgttctgatcaaatatctttgctccataaagaccttatgaatcttccttcaatgtgaagctaagctatttctgaggagctactggaacctcctcattttttctagaggtatccatgttctaaaaatctcaaatgatctcaacttaggaggttactgaagctacataaatgtcaaaagaaatgatagatttacacttctccaatttctgcatttgttatgtagcataaattcatgacagaaaaaaaatgatcctcaaaactccttagaagctcgctcaaaatcttgttttaagtctactcaaaccaaaccaagttctgctaatgtaaacccttaagatttgtggtagtttttcattcccaatattaaaatagtcttttattaattctccatcacatcatattttcccttgactactaaatcaggtccacatttgttgcttctatgtttttgacatcatggaagaatctggagcagtggtacattttgctcttcagagatattttattggtttaaaatgtttgattactaaggggtttaatctagtaatactagattaagtactgtctaccataggaaaaaattcatcagacttaaggtgtttcctcttaagtggaagtagaaagccaaatttcaaagcctaccgtgttaataacaaatgcttccttttatattttcatcaaaaaacaagcctatttccttatctaagttctgtgcaagtctttctgattttctcacaataaactatatgtgtgaaatcccatcagtgttatcaccaatatttattcctgatggccacagcttttctaatctttgtgtagccatatgcttaatgttacataacccacttggaattcctttcttacaaacaaatagcaaaaatgtaagtttatgaagtatgcattccttttttaatgccaaaaataaaaacaaaggaaaatttctaaattggacatgtgataatacataaaatctatctgataaaaagtgtgtaattactgtcacaaaatcttcacacaatccttgaaatctcagcagtagggtggcaccaagttcccacacatcaattaaagcatgtacatatacgtcattggcaataggtcagtctcacagagaataatctcatgatgccaaagctatcctacctgaactttaattcctgaataacaatgttggctaatagtgttttactggatattgtcttacttgctaacatttcttatggggatcttgattaattggctacctaatccccaaagattattccagaaaataataatgtctgaaaagtagaggtcttttctttcacctatgcacaaatttgtcatagttaatatgaaattactttgttcatctgacccctatcaagtaaaaacacatgaattaagatcagcatgtaggtgaaatgcacaagaaattagggccatcttgagaggactgtcatctagtatgaatcacatactggttgaccattctccctccaatcccatatttttatggggttatacttaatacgaagaacaagtgattaatggagcattaatcacagaagtctactgactaaaaaggactgaaaattctgagccttgcttcagtggtgatggtggtgggaatgtgggaacaaagttgctgcacaggtaatccctagttttgatccaaagaaatagcagccaagcagaaacagacagacagacacacgcacacacccctcaatatatattaaaaagtcaaatttcattcagtttctcaagaaaataccaagaagaataagacagaaaatctctgttcttagtcttggccactttattctccacatggacaaccactttgcatcaaaagtctctctctacccttactttcacctctaagtcttttctccatcccttctatcccttatgggtacttttctttcctccctcctcatttttcctgtctctagccccttccttttacccaagtgaaattttgtcacttttgagttcccctcccctatgatcacttttccagttctatttttcattcccccaattccacactacccaagttttgacacctagctggcatgaagagagttcttagaagaaatggaagagaatgagaagaagaagtcttttctgtgatacaagaaaggagaaggccatgactactgacatgaaattaaccttgtcccaaccacatacacgtacacctcaaagctttgtaaaccactggcaaataccctcttattatctcccctgccccatctcccctttcttttaattttttggttagttaccaatcacaggagttaacttcctacatagagggtagacaaatcagggcaatctatgatctctttaggtccatggatagatgttcacccccaaatgcagagctctgctaaatacatctttcagtatctctgccttcttagatactctaagctataactctactttagttttagggtcctttttgcctttttctggccagaacatattgcttttatatgtcttccttttcatcttcccaaatgccctaataccagcttaggctaaatgtgctactggtataaaatgtatctttctccttaaaaaacaccaattattctcaacctctgggatccaaagcatccggaataggggccctcttcaataataatcagtgagtgagtgatcttaaaagatatgtggtttaggaagatgaagttaagtatttaaggtcacaaatcaagtgtggagtggggctgcaacccagatccagatgttctttctgacatgatctctcattgtcttttttcttgtattaatcagttgctaagtcttattatttcttcttcataaaaaagctaatgatcatcttattgcaacaccacactctctataccacaactatatatacttattttggaaagctaagattattcaagtaagactaaacaacacataggaccttcaaaatatgctcctaatcttcccttcttgtcttcgtttctgtctcctggtcccagttcctcccaactttatgtatgcatgagtcttttcatgatcttctctctgcctagagtttactttcacttcccgccaggaaaaaaagaataagtaccctttttaaataagcaaactcaaatattatttgctccataaagccttcccaatatctattccatgagcctttcccaacatctccactttcctactaacagatcatatatcctgttgctttaaaattcctactgctttcaaattctttcttcttgctagattgtgacatgcttactggcagaatccatgctagatactgggaacacaaggattaaaaccacaacccttgtactcaagaggtttccagtacactagtaagtcaaaaatataaacaactacggcacaggtctgatgtagaaaacatatttctatttaattgacttgaattatagttgcacacattttgtgttgtaaccaagattatgttacatatgataatttaagtagccaaaagttgactcaggttgagtagagaagtaaaagcacataagaaagagaacaggaagaaataaaactgtaaagatgtaatgggagagaaaatactgagttaactgaagtaatggcttaatgcagaaataagacgtttggggaaaggaagttgaattagttgaagacatttttggtaacaagagtcatgaagcctacagttgccagaaataaaaaaaaaaaaggactgactatggagtatttattaaatactcatactcactgtttgaagtacaaactaagaggaatcagaggatcaaagtggttggttatgacttgctcagctagtaactgcaagtgccaaaattcaaactgtggaatatttcaaagtccgccctttctaaattcaattttggcctaaatccaaggaggtagtgtccacagaattagctagaaattacttatttcctaaaagatcaaagtcccaaagaactctgtatgatttcaaggctgctcatatggtaataatggatacatttcacttcatagtctaatcaactaatagactttaggacagtgaatatgaatgacatgaaggtgccttgagaaccatcaagtcctacctcttattttgagactaattgaagatactgaggcccagtaattgaatcatatagattgctaaaagaagttctgagaagaaatgaaatacaaaagcttggtttctaaggctgaatatcatgagaaactatcatgttatcctgtgtgagtgagctccacgaggccaggtatcttgtctcttttatggtcaactgtatctccagtatctaggagagtttatggtactataactagcacatagtgagcacttaaaaaaaatcaggtgctcaaataacacggtttagtgaaggaattaacgggttcatatatgtgaatgtgtgtaaagtgggtgcaagcatgtaattaaatggaaaactggtcatatttagttagatgttactaaatttatttttatttgccatttggatcacatgattttctcctttaaacatcccagtgacattataaatgtcttatgtagcaaggtctttggcttcaaatgccttcaccaggaattaagagtttagtacaccatcaatgaatagaatttacaaagtaccctttgggcagaatcattaaggaattaaggaaagttttttaacatattgagaaataacacaaaaggttctgaaaataaaggataatatgaatatttcatctttgtcttagttttggggggtggggaacacagaagcaatatttcatttctaaaaccatgttcccatgaagctgagcagaaggactgcttataacataattttccagccaaattcccaaagggcccccaacaggctttctcaatttgtgggcgctgtcctctaacaatctatttctttccagactctccttggaaaccaaagatttatgtcattctcttcatattttaaaatgaaattgttccaggttaaagaaattatgaaaactgaaagcctgtctttatccaagaaccaacactgcctggacaaataacttatgaatacatcctattctggaggtatcatcaatgactttgcctctgtagcactcttaccattatttggacatttccagaaatcaagatccacttcagtttgtgaagatgagctgtgcttagacataggcttaaaaagaaaaggtaaataaatattctgtcaggttatatagagggaagcagaccctcccttttataaataacgtatacatttgcttaaactccagagtaaaggaaaaatctcatggactgaaaacattttttaaaaaaatgaatattcactaaacaatcctgaaatgctttttgctctctgaatacattcaaacaagtagatatcacagcatttcattgatagcttatcaaaccacagaatagaacaggaggacagaatacaaagggcattcttaagggagcaccatcatgattgttctgtaaaaacatatgaacatattgctataaactcatcttcacaggaagtcacacagcttaataagcacagacctgcaagttaatattaaaattcactttgatttcagcagcagcaaagctgatccaactaggagctattacataaaacccttattgtcatattcgtcatcaccactctcaatagagaccactgccagcaccaagaagccagccctcagttcacctcaggaaacaggctacacagacggccgtcccagtaacaatgcagcagtgagatggccctgtttattttatcagaatggcactcccttaatttttcagttctctttattgatgtcctttttcatgtacaggtctattagattctacttcctttactgtcctcccaggaattggtgcttgccaactacaataagttgttttgacaacttgtctagctatacaatactctgtttccttccctctacagtctttttggcttcaaatgagtgccttcaaaatatagcagagactatccaaccaaactatgctacaggggggaggagctttctatgtgtaagcaatgtcctgcccaaactacaatctttcatgtgctcatagtcctctttcttttcctatttatttttatggataaatcccccttgctatcttgtctactcctatcttaataaggaatgactgccgtgactacccccatctagctatgccattcaccgccagcacctctgctctcctcgtgtgcttcaagaagaactgattagcactttgcataattaacctgattagcactgtgcataatcaaactgattagcactttgcataattaaaaagaaataataataataacaataataagcactaagtaatatcaaaagctgttagtcccacagccctttggttacctccaagattagttcagtgcagcatattttgcaccttcacattgaaatcttttctttaactcaaaagtcaagaaaataaattaaaatgcttgcaatccacagactcgttatggttttcatatccataccagttaccaaaataatcagtttcttacccatacacatctccctcagtttgggtcttacatattttacccatgttaaaatggagaaaatggggatataaaaccaagtgaatgaaaaatatttagaataacattagaaaacaagatatatgatgcgtatagaagcatagagagagttatatagaactatataaccctcccttgtgttgcttctgggtgacaatgaggcatgtggaaagaactggacaacctatcagaaaaacctggctatgacatttcctggctaagtgatttaactttttggaacctcagttccctcatctgcaaaattaaaataataacaccagttctgctacctcaataactgtaattaaaataataatttaggaaggtgctttgtgaactgcaagacactttacgtacatgaggtattccattctaggtccctaaatctcctatcccccaaattttatttcacaccatggacaatattatacattatgaataataaattttaggctcagtgcagtggctcacacctgtaaccccagcactttgggaggccaaggcaggaagatcacttgaggccaggagttcaagaccagcctgggcaaaacagcaagatccccatctctacaaaattttttttaaaattagcggggtatggtggcatgcacctgtagtttgttttttttttttttaattttttattctcataggttattggggaacaggtggtgtttggttacatgagtaagttctttagtggtgatttgtgagattttggtgcactcatcacttgagcagtatacactgcacacaatttgtagtcttttatccctcacaccctttccccctggtccctaaagtccattgtgtcattcttatgcctttgcatcctcatactcagcaggctgaggcagaaggatcgcttgagcccaacagttcaaggctgcagtaagctaagaaggtgccactacactcctgtctgggcaacagagcaagaccccatctctaaaaaaataagataaaataaaaatttatatttataatgccttaaaattaaaaagttataaagtcctgttgcatgctttgccttatttcttattcagggctgaatgtgactaaaattttgacttggagttaaaactggactctagtaattattgtttccatcacagctctcatttgtgtttctgtggaggttaaaatcaagctgttgctggaaattcacaagagaggagaagaaaatctagtacattactattaatttgggactacaacataagagaattctgcaactctgcttttctccaccctaccatagccaaccatctgttccttaccaacttcgaggcttagttcagttccactttcctccaagaaaccacctatgatacccatagattggaaattctctctttctctctaatgcttccataatattttatctcatgcttccatagtacagtgtactatttattaaatatgtgtatatctatctgatacctttagtagattagctgctcctaaacagaactatgctgcctattcatttttgccccagaaatagctgccacaataaataatgtagtggtgaacactcaacacctttgttacagttggcttaaggaaactggatggtaaactatttttttcactaggcatttactatataattgctaaatgcaagcctgagaaattgtttcaataactatatgctagagaatacaaaggtgtttgacatacccataactacttaatcaaccattaaaaccaaccattcatttattaaaaaatagatagaagtgctagtaaatactaggcattgtgctaaacactgaatacagcattgataaagtttaaaaggaactgttggttcctctcaaggagcttatagtctaggtctctattaagaagttcatattagagaggctggagtggagtagtgtggaaaggaaaccttaaaatagcaagatacacatcatggagccactaagcctctatcaacctacgggaaaggaacccaaataagcagtcagtgttcttgggcaaatcattcattttacaattcatttaattcaagaaggaaaatgctgctgtggagattattcaagtccaaatgttcctggtgaaggtgcttccagtaattctgggaaagaagccaatcccttagttttatatgtaaatatttttaaaacacacacatatatataagcacaaaagaaaggtcaggaagacgtaagtcttttaaaaatctattttaataattttttctataactgtccacaaaagtttgggctttttttgtagccttacattttcttttacacaatacacctgcttttttttctaaactaaatatttcttccatctaatgactctctttattagacagcatctaatttgcatacatttacatacaatttaactgctagcttgtgagaacaaagaaatggctctgtattgtactgaaggacaatactcagtaaaggaaggtataaaaaccaaccagcttggtgactgtgtaagctctttgtttcagatataccaggctccctctttctcttttaacataccatttaaaaggggcaaaaattatttcatcaaacaatgaaaaaaagaaacagccctactttgtttaactgtccatttcctctccagtttggttactacaattcaggggtccaagttccctgaatctactacaatttcctctattatatttgatagatttaatccctttatctatttttgtttcgtgtctcattcctaaaacaacctgggattccactgcgataaagctctgttctgatgctaatttgtgctgccatcggccttgttcccaagcagacagggtagaatatggcatcatgctctccagtgaacaatgcatacacttacccttaacaggttaatagattttattgagactttgggtctttatcatatgaaccagctcttcaaaaagaaatggttttcagcatctactggagagatgatggaaaagaagacttgaatatagggagggaaatggtaaaatagatgttaggggtaaaagagtacttgagtcaaatgtttctccactcagcaatgctatccctttgtaagtctccaaacctgcatgactcttggagaattaaaaaaaaaaaaaaaaaaaagaactgaaaaccagggacccttgactctcctttgaaagtaaattcacatactctgtgatacggggtgagtcactatgactcttctctctgtagctctcatccttgacacatggaaaaggagattatgtaaagcaatcttgaagaggtttgttcagtgttttgtaaatattaacaattattgaaaacacacaaaataactaataaagctgcggtcacaaccaactgaaaataaacactaggctcattcaagtttctgaaatgccatgtctaaaataacacacaaaaaagaaatatggtacacaaaaatgcttcaagattataacaagctatacaaatgtaaagcaggacataagggcaaactgaaaattataaagccaggtacgaattggcaccaaagcctcgatggaattatcatccgtatctgggtgctgcaaatggtcatgggagatgcatttccttggacatatatttaacattattaatttggcctgttttctgcatctgataatgcaaatttacaattttagtgacccaaagaagtgtgaacttgtcagtgataagtgaagaaattctaccactctgtggggctgcagaatgcccacataatttggaacctttagcagccaaacagattgcacaatctcaactagcgatcttgaagcatgtctgattttccacctggtgagaagaagcctgagttatggggactgtatgagtgctggagtgctggcataaaccaactctgccaacttcttaacccataaacaattatgaataatgatccaaacagcatttaaaagaaataattagacactgcactttaaaaaaaaaccctcagtagtgactaaaatctagtcactggaatgagtagtcaggaagttgttgatcctccgaaaaccacggcttagttctaaaaacagccttaaattgcagagaacctgaccctgaccttcaaatcccttgctccatgaggaaatgagactaccgcctcctgagtgctatagtgtctgttctttcagagattgtcagtaagttttacaatacaattcctgtttctgaggctcattagatcttccttatttatacggatttgaggcagtacttgcttttgtgtgatagaattatctgttggtatccgacgtcagacctattttctacactctaacatattaaattctgccttgtttgtttctaaagcacctcttaataccaactcagccaacatcacctgtgctggaggtggttaagatccacctccccaatgcatgttaccacggtgacaaagtagtgacctaatttacacacacctgctgggttaattgggccaaaatgaaagatgatatatatgctcaaaatccaaaactgatttttttcctcaaaattaaatatttgattttttaaaaattagcagtttctaaagctaagtaacatactccaggtgtgcatttgccagttaatgtaccctgaatgtttcatgacacttgaggagcaaaatatattgagtgatgaatacaaatcttttatgtattttctgtgtgcaatgattagtatgagtaagtggtctcgatcactgaatacatggggtgtgcttgaagggtcaggccactgccttaaagcaaacagagacatctcaactgtgccaagttagcacgcagagtccgggccgcctttgaaagtgcaagtttgctttggagaaagctgttctccatagcctgaggctgcctgcaacatctcttagacaaaaacatcacttacctctgcttgacctcttcccacctctttgtattcattcttcccagaccactgagagtttttctttgaaccatattaagttttatgccaagaactgatgaggatatgaacaaatagatactttcagagactgctgggacagacacagcaatgtgtaaatggtatagctaaatgtatcaaaacccttaaaatacatatatctttgattcaattattacacttaagtatttacctgatgacataatcagggatgtttataaaaaagattgtcacaataatattcattgtaattcatgtttactggagaaaaattggaagcaacttacatgtccaaaaattagagatcagctaggtaaattataacacatccattgtatggaatactatataatcaattaaaaaaatcatgtcacaaaaaatattgacagaaacaaatattcataatatattgctagttgaaaaatcagaatcataaccttgcataatcctatgttgttgcatgcacacatacatatacacaccaaaatattaagaataactttttctttaagtggtaatagtaatatcaatggtgattttcttgtcttctttctgtctttttgtgttttccaaatagttttacactgatagcgtactacttttagaaaggaaatataaatatgatattaaaaataaaatgaagagtaggaaaaaagttaaatgacatttcctaatccctctctcctacttagatttcacatttcacctatatttacttctctccttgtcaactacagatgtaaatataatagatgttaaactggtcaatgttcttttattactgaatattcaacttttctagctgaatggatctttcacttatttacaaatcttacaaagatgtcagtcagcacaactcttagaaagagtctccaatctgctttttatgcttacaaaaaccatgtgaaataattgccttttaataacaatgattacttgaagtgaacttttcaaggtacaaataaatctatttatcaccaagctattgtgtcccgcttaaattacaactttcacattttgatttcatttgtacagatatagggtcttactgataagtaagtgcttttgttaagtaaataaaattagtattaccatatgaactggatttgctgttaaaagtatctcactaggggtttgatttattctatgatggtttcactgatttaatcattgcttaaattagcaaaatataattatatatttttataaagaagatgttttcttgggattttcctatgtcaccaagaatagacatcagggattgataagtaataagaaatgtcaattttaaaattacatttcttggtctaatatgctttctttttaccttagtgatgatcgctgccttcctaaaaagttcataaagcttcagaaaaatctaaaattcatgaaatttcaaagaattaaaaaaattggtgcttttatttcaagtgataaaattaaactttattttcattctcaaaaataagttttggttgaatcaaagatgtaaatattaagagactaaatcataaatgtgctagaagaaaatctgagtaatttttctggtgtaagaagttttctaagccataaaggaaattattgaaaaaatgaaactacataaaaaatttttctacatatacaaaactcaaaaagcaaattaataaccaagaaatatgtctaacacatactacagaaaatttattttccataatatacaaagaggctatacaaaccaataaaatatttttaaaaactcaatagaaaaatacagaaaagtattatagccaattcacaaaaaagtaaacaaaaatgtaaatggccagtgaaattttaatatgttgtttaatctaactcctgagtaaagaaatgtaaatcaaaacaatggtgaaatatcattttcacttttctgattaggaaaaatttgctaaagcccagtactgatgaggctgtgagaaagcaggaattctcatataatgttgttacatgtgtgtgtcagaaaaatgtttttgaaggaaaatttttaacaggcatcaaaattttaattatataaacatatctaagaaagtatgctatgtggatattaaaataaaaacaaggatatatttagaaagctgttttgtaatatttttaaacagcgaagaaactgtaaataaccaaatttccataaataggcagtggttaaatacattttgtgacatccataaaatggaaatattaagtagctgtttaaaaagaggaaaaggtaaaatataatataccaaaatataaacactataaaatttctagaatatataaaatctctaagacatggcattaagaaaaaagtacaaatgtatttgaacagtatgattccctttctgtttttaaattaaaggtatatagacacatttctctacgcaagtacagttgaaactttttatctctggtgaatagtgctatcagtcggtaaagacatacttttcactttatatccttgtgtaccattcaaattttttaaccctgtgagcacattttaaaaatacaaatagcagaaagattgttcagtgtaatggtaaatggtgaaaggtatatacatggaagtaaagagtactgcactgttaaatttctcattctagacttctctagtcccacagtaaatcattcaacttcactgggatttcatttcctcatttgtaaaataataattaaattagctcaaagaataatctgtaagttaccttatagttctaacagtacatattttcatgtgttaataatccaatacagaatggtggaaaaatatgtttgagacttaaatatcaattttgagcacctgtacctactacaataaacaaatctctacttggtattttgtatgtagactgtagccatgtctttatgacaaaaacaaacaataaatgtactgaaaattttggctcattgaataaactaaatattatcttaaagaccatccccatgcacaagtacctctgggtctcaatggtttagttctgccaaggtgttgaaacaagactatcaaacaaaactgatcagaaatgtattacttacatacttcactgccaacttaaagccacaaccacgaagctgacttgttgaatctaaccttgattaatgctctcatatatacaaaataatgtcaaaatatcaacattcatttataattcaggtatatattgccacaagcactcttaatatgtttttgatattggataacctgatagtgcatgctcacaagttaaaatagtaatatccatcttgtttttaatttgtggtacttgaggcttcagtataataatggccttcttccattgtgacttaatattcctatcatttggttatatatttttaaagcaaaaatctctcgatcgttattcagatgacaaattatatggtcatatctgttagatacagcaaagtctgcactgtggtatttctaagaaagcaagtagttcattccttcatttctgggttccattgtgataaggacagaaccatgggaatttccttggtaagattcaaggggtataactggtaagaatggtgtgttctttttttttttttttttttttttttttgagacggagtctcgctctgtcgcccaggctggagtgcagtggcaggatctcggctcactgcaagctccgcctcccgggttcacgccattctcctgcctcagcctcccaagtagctgggactacaggcgcccgccactacgcccggctaattttttgtatttttagtagagacggggtttcaccgttttagccgggatggtgtcgatctcctgacctcgtgatccgcccgcctcggcctcccaaagtgctgggattacaggcgtgagccaccgcgcccggccggtgtgttcttaatcacacaccataggtacatttgtaaattaggatgtggctaaagcctactaaaaagtatattgatagatttttagtatctgtagtgaaaaaagttagattctcacatctaaaaacctcacaatttctgaaactgtcatctgactgtgtttttcaaatgttcacagtagacggcctacttccttgtgcattttttcacatagtatcagcctgggtcatggtaatactgttatctggtataacatcgagcaatgggaaaataatgtggtgaatgaacagttgattagacacattaaactaaggaaaattcaatcaaagatcatcagtttcaatgatttactaccatacatctttgcttagctatgaataaaacattttgaatgaagcttttggtgaaatttctgtttcaagatgaaagtagaaatgagaaaaatagacatcctgtgctcacctcaaatggagagataactatatattccgaaaaagttctatgttaaatcttgggctcctatgagactaataaaaaaaaataagtttaacccttcattttcagtttcagtcttgatatacagaaaaggaggaaaagggctgatactactacttgaagaagtgatttgcgaaagggagaaatgatggctcaaaaacccctgtagctcctctaacaaaccctggtaccagagcagacaatgaaattgctagggagagctaagagtagcaatgaattcaatccctccctttgtggccaaacttagttctgctttcagaaataacaaaatttcaggagatatggttaaaatttataggatatggcaaagtttaaggagatttggttaagcatttttaatccattcccaaatgcttactatggctatatttagtaccaggataaagaggaggataaactggttgcccctgaagaagcagacctcccaactgtacattgttaatagttgacagaacactcctcccttgccacagctactctaatacacacaaaccttggatgcacaactctgtgtaacctgtaatgatttagagattgcatttcttgtacacaagatcttcccttgaatggctccttcacgtcattcaagtcttataattcaaactttatttcctcagaaaggacacctacaccctgcctccggattaccagccattcttcatcctttttgttgtagttgtatgttaatttgtttagtgtctctctctcggtcttctagttcagagctctgtctctagtgcctgagatcaactgaattgtaattatttactcatgatagaagagtaatcaacaccagaaagaaatctgctatctaacaaaataatagtttcttcttttttttttttcggcaacagatacaagacaaactaaaacaggttaattcaattaatgtgttttgggtgcaaatcccagtttggtattatcaaaggcatattttcacatttaactatattatcatttcagggattacttaattttcattttcatttctatttcatcctttcttttctggcagggaagcctaagctcatttgtaaaatttttctgtcctctgagcatacaattatattttatccagaacagaagtgcaccaaaagagctgaaagttaaaagaaatgttcagtagatgagacctataatactggttctgattaattaatataatcactctattaattatctatgtttaaaattcaaatttatctatgttggcttattgagcattcttaaagaaaacatacttgtaatatcctacaaccatgaggtggaaagggtcagcaaatgcttccaattatatcccaattattttaggaatggtttacttcaccttctgctccctctacccactcaccctaatagtggtctgctccttacttaaaaggggaaaacacaaagatttcctgcagtttgagaatcaacttgggagaaatagaaaaacaggtgtctgagttgagcagagctgagtttagtcctgtgtcagccatttactagctatttaaagttagaaattaactttctgagccttgggcttgctcttttaatctagacctggatattcatgattccagtgttcatttaatggatgtgtatttgtacgtatggccatatccatagttctctaataaagacctggccgatgctaagcagagaaattagacggattgtgatctcaacatgcagtcatccagcacaatacttttgtccatctacgacactaaatttcaattgtatacttggcttatattatctggagatcattacgaaaaacattttctgcaactcttgatttacttaggtcacaagtaaagttatgtgaaagtaccatggactataagagtatatttggcatctcaacacacatggattgacagaaaagttggatgataccaatgtcagtttttagttctgcagtccatctgcagagttagtgactgttggttacctattctatgcctcaaccttgtcatctataatgagaagtttcagtagtttaaaaaagtatgacagaaaatgattcataattccatgaaattcataaaaaataccaaggtgctaaggctacaagtattctaaaaacagaggacaggataaactttgtcaaataccgaggggaaaaataattaacatgttagcatatgtcttagtctgtttcctgtcgcctataacggaatacttgtaactcagcaatttataagaaaggaaatttatctcttatagttggaggctgggaagtccaaggttgagggagcaaaactggtgaaagccttcttgccgtgacaacactctagaatcctgagacaacgtaggacatcacatggcaagggggcagactgtgctagcgcaggtctctctttatgtttctataaagctaccagtcccattcccatgataacccagtaattcattaacccaagaaaagactcatccattcatgggccctcatgacccacctcttaaaggccccagctctcaatactgccacactggggcttaactttcaacatgagttttggaggggacaaaaattcaaaccatagcagtgtgtaaataagtcttccatagatatttactaccaaaaaataacattactctctatagtaggttgaatgttgactagagtccccaaaatttcatgttcacctggaacctcagaatgtaacattcctgggagatacggtccttgcagatgcaactaattaagaaccatgagataaaatcatcctggatttaaggtgggccctaaatccaataactgatatgcttttaataggaggagaggacacagagggacacatacagaggggaaggtgctgtaaagatgaaggcagagtttgacgtcatagtgccaaaagccaaagaataaatgggaccatcagaagctggaagagccagggaaagattttcactgtgagccttcagagggaatgtggccctgctgcattttgatttctgatttctagcctccagaactgtgagagaataaatttctgtcgtttttaagtcacccagtttatcataatttactacagcagccataggtaactagtacactttccctgtactctctaggactaaaacagaggaagacatacagaagttttataagtgtaaatagtgatctcaaagcccccaattgataggagcacataaggacaaataaaaatcaatgagaaaacttaagaggttgcagtgatggtttctggtagtagtaagcctcaaacgaaatgtactgccctctatttggagctgttccctcttaaatcaaatgcagatgccctccaaaagtgatgcaacatcttctgatccaatcctttcaagcaagccagaaactgatcttaacgtggaattggtcattaaaaaaaaaaaaagaaagaaagaaagaaaagaaaattaataggctgggtgcagtggctcacgcctgtaaatccagcactttgggaggctgaggcaggaggactgctggagcccaggagtttgagaccagcatgggcaacatagtgagacccccatttctacaaaaaaaaaatttaaacatctgctgagcatggtggtgcacacctgtagtcccagctactgggaagctgagatgggaggactgcctgggaggttgagactgcagtgagccatgatcatgccactgcactccagcctgggtgacaaagtgaggcctttatatttttaaaaatccaagtggtatattgatgtaaataattaatatcttacaatgatatatgatcaatagcaaaagtatactggaaattacttaattggacataaatcagttctcaaataaaaaattatttatgttcctgaagaacttgattcagagagtaaatatacctatttttcatcaatggaaatttaaatataatatcagtaacaaatttacatagaggaaaatcaattttattttggtctagagtatatactatcatgagacttggcaaagaccctaataagtatacagatcacggcttgaggcatcagatcagcatgattaaagattatgtttgaattgtctcctgatatacaaaattaaccatttcttaagtaatactaaactcagctatcctatttgctacacaaatttaagccattatagaagcaacattttagttaattttcaatatctctatttactttctgtgcatatttttatgtacttacacttaaatcttaactttcagatagtcctaccttatttaatttttttacctttaaaaagtcataacctgtggtataatcttcttttgatatgcttaacaaaatataacaatgaaatgtagtgtaaaaagtttaaatacttttaaaaatatatttttaaatagcttaagaaatatattttgaaaatatattttacacaaatatgaatgtgtgaaatatctattcacacatttttaccctaatgcacagaaatcctttcgtttagaaaaatagaaattgtattcataatttcccttaaagactctcaaaaccataaggatgatacatgcagatattaactattagatattacatgtttaaagcaggaaagaatgaaaacgttaacttcctagaaaactgcaaatatcaaattctttttcttttggttttttaacttaagagttgtgcattaattactattagtaattaattagtcaccaaatattctaaaggtgggaacaaaaggttcttacaactcagagatgaatctatttatatttgactttttttctcagacactggtctcctaacactttataagttcaataagatgtgaatatagataattagggtattcctatataatcaggtagaaagtgaatacatttgtgtcagtagctacaataatttgcattaaatgaatgagtgaataaaaaataaatcataaaaaggcactgtttgggattggtataaaacatttacttttaatacataaattattaatattaagcagttatattacaaatgacagagaactgttattgaggtgcaaataactcaacagtaaatattagccatgactaggttatagggtgtttctggaattcttgcttctttttagattagtataatgctctactcaaggtgtagagtaaatctgcaataactagagcaaataataagtggtagaaaaaaaaggatctatacagaagaccatattttattacatggtttcagaatagcattatgattatgatgactaatgagaggaggaagaagaagagatgtttttaattttaaagtgctttggtatgttgtcatctctaatttacagatgaggaaactgagcgtaaaagcacacgaagagctgcctatatctcatagccaataagtgataacagagaaacttaaatccctctcttctatttctaaaccctgtactctttctactctattatattgtctctttattccctgaaaccagagatatgtattaacagtaaaattcttaaatactgcagttaaaatagaaattcctccaagccagtgttgaaagcaccacagtatttataaaaataaaaatcagcttcttaaaaaattattgttcttaaataaatttaaaaagaacaaaatcttctttgagttcccctatattcctcatacagaatcttggcagtgataatctgcaccgtaaactgtgaagtaaattgtgtatgtgaatgaaaacaataagaacctacagaaacacatgggagatctaactcggataggatggtctgagtagcgtagggacatggatgaagctagaaaccatcattctgagcaaactgtcacaaggacagaaaaccaaataccgcatgttctcactcataggtgggaattgaacaatgagaacacttggacacagggtggggaacatcacacaccgggcctgtcctggggtggggagacgggggagggattgcattaggagatgtacctaatgtaaatgacaagttaaggggtgcagcacaccaacatggcacatgtatacatatgtaacaaacctgcacattgtgcacatgtaccctagaacttaaagtataataaaaaaggaagaaaaataataataatattatcacatttcacagagtttacagtctggcggaggagaaaaacattaaactaataattatataaccacttatttatttacacctgaggtctattcgttatctttgactatgccacataattccaatctgaactcacttgtatgcattacttagcttggcgatgcttgatgttctcctttctatttccttatgtcctatgcttcatgtttttttcaaggcccagcttaagttcagcctcttcccagcagttcacagagatctctgcctccactaaatatctttagcacttaatgattctttttcaacaatggcaaatgggtttcctattacatgaaacttccaacaattggtatggctgtcaaagtactgtcttcagagggactctgaggtcaagttttggtgtagtgacagagacagccataatggattagtgttgtttcatggacagtgaaggggagacaggggatgctgaatttagaacattgacttcacaaatagactgcctaacttaaaaaaaatgtttgtagcatttattttacaccaaatccaggtctaagcatgcaatttgacactgagagtgccttgttttattttttaaaaaacctgtatcatgtctcctcaagtatcataagattcttgcatgtaatacttctctatgctcacagcatgtagtcatgccttgaaacataggcatttgctgatgacaataaattaccattttagaattcactcttattactattgtgaactccatttatgtcatagcttctctcaaaatattatcaatattgaacccattttagaaaaactttgtaacataagctataaaatgtaagtaaatatattgtctttaccatgaccagattcaaattcaacattaggatattgataacacttaacgattaaatatatacctgccaaataataaaatgaaacaaagagaagataactacttcttaaatgagtttaaacattttttaaaaatccagccaggcgtggtggctcatgcctgtaatcctagcactttgggaggcccaggcaggtggattgcctgagctcaggagtttgagaccagcccgggcaacatggtgaaaccccgtctctactaaaatacaaaaaactagacgggtgtggtggcgggcacctgtagtcccagctactcggaaggctgaggcaggagaattgtttgaacccaggaagtggaggttgcagtgagccgtgatcgcgcctctgcactccagcctgggcgacagagcgagactccatctccaaaaaaaaaaaatatccaaatctgtgtatttcaaaatatattttacatacttattatgtcctaaaatttgtatctctcttttagtatacttcattttcctgcacatagtaagtgttgaagaaatccacagtggttagtttagaccttattttagagagatagctccattttacattccgtcttgctaaggaagtgtattcatcatattccataacagctcacagtttgttatacattaactgcttattctctgtgccaataagactgtgctggaacagcaaataaatttggtgcattcatttaaatgattctgcaaaccacaggctacccagttgtctaatgataagagagccccaaagccacctgatcaccattatactcccttatttttttggatttgcatggtcagtactgtcaggatctgaatacagagaagaatgagaagtaaaagtatacctcagacctaatcatgaaaagggattttattaatttcggcaccagtgatgatgtggctaggttggaaggggaatgggatataagatctggagtgctttatctgctccaagaccaatgctggttttggcacttctctcactctagtgagttgcaaaaaaacaagcaggtgctagcaatctgagagaccacatgccagctacagctgcttcaaactgattcaattacatctgcctgaatagtcccaggacatcaaactagttgaagagatccataggttgcaaggagactttgtctatcctgatggacaactgtctctgagataatgacctgcaaatttccaggttgtgatataaagtgatcattccatcaccaggcataagagaaaagatgggggaatgcgatgttttattcactttaaaattaaaaattggttgtagaaagcacaaaggcctctttgaatttaaatctgaaagtcactgaggccttatggataccttgaaacagcccaattttgtgagaacatttcccaaatcattgggtacagcacatttacagaacatgctcttgggatccggacttcgctccaaaccttgtttgtacaaaaaggggccaagcagctgggaaattctggagtggagtgtgtcctcattagttcccatctgccaccagaactcagctcatggcaagtttggctaagtcctggtgtactcaggtccaaatgtgggtcagttttaattacactatacagaattcagtgtgcagttttaaaatccttattatacagcacagaggaatgggcagctctccagctaatcaattttttaaaagtacatatataaaaattttaaaccaggctagacagacagtgggtggaaaaaaatctttaaatgagtacaagggttacttaagagaattattagtgaaattgggtcatgaacaagttctgctttaaagcttcaaagtgagaaacaaactgttttcattggtaagttggaaaacttatgtaaggtacacaatgtgccttgctctttagtgtgaataacaataagcctgtggccagggtacacaacacacctacaagtgaactggctttcatgtaagcagaaatgttcccaattttgtgactcttcactccatccccttttgatgtttatcacttatggcaaagactggataaaagaaaaaaatcacaagctacctggtaaatagtgaaaaaaaaaagatgaggaaggggagggagtgagagaaaaggagagtagaaagcacaagtgctgagtagcagactctgggcatgacttgtctctcagtgccatccatacaaatgggggccagaatcaacgcttgcagtctatgttcagattccatcctgtccaaaagctttatcaggttcaggagcgctaaaacactaagccttcgaagacaattgtcagtaaaaaattcaggagtaaacacgtcggcagtcagtgattaggcatttatgcaccatttttgatagataaaatgtcccttgacacaagtcctaatgacaacaacaacaacaacaacaaaacacaaaaaccttaaatgttcaaagtatctttgggcttttgactgagtttttatcaggtttatccatttaaaagcagcacgggatgctaggttcaaataccagcattgaatatttacaagctatatgactttggacaaattgcttatcctctctgacattttgttttctcacctgcaaaatgggagaaataacatcttcctcacagggctgttgcaaggatcataaaacatatatgcatacatatattggatattacatatctatatatacatacatgcatatatatacatatacactcacataaatgtgcatatgtatatatatagcatctggaacatgaaagtcactcaataaatgttaactatcattaacccagttatgatgaactaaattttgttccccaacccctccaaaaaaaaacatgtgttggagttctaaccccaagtacttccaaatgtgatcttacttggacataggtctctaaagaggtaatcgagttaaaataatgcaattagggtgggcctgaattcaatatgactgatgtccttataaaagcagagaaatctggggacagagacagatacttacagagggaagacagaggaagacatatggagagacataggaaggagatggccatctatatgtcaaggagaaaggctggaacagatccttccctcacagccctgagaagaaccaacctggctaataaaccttgatttcagacttctgaactgtgagaaaacaaatgtctgtttaagccaccaagtttgtggtcctttgtaatattcccaactaaataaaaattccattaatcatcaatatttaccttgattcatcatggtcgaaactatacatttgatattaggcaggtctgtattacctctggtgagtaataatcaattctatatatattatctagtgatgttttcattattttaaaagaatccttttctgattgctgtacaagaagatactgctgcaatataaacagcctggcagaggaaaatggtttactataattaagatcatctagttattattaaagataattaagggaaaatcatacatataaattcataaatccacttttctactgttgagtttgcatagaaggaaatcagaaaatcttaccacactaatttccttctcaagaaaaaataaaaccttacacagcgatttatgcactgacaactatgctcactaaacctgaggctgcttagattaccaacaggaccacttttaagtcattttgatgcatatgaaagtaactcatcaagcatgggttcttcatcctttgcaagagactgcttttaaaggtatctgactttcagaagagggatgagagttgtctgggttgtgtcaacacgctttctattgcaagacatacctccataatcaacagacattgaagtgaatgtgagcatccccatcttaagtttttctttaaacagccctagccttctatagaaatgtggcatgtatagttagaaattatgagtctaattatgttgaactgagataagcaacagatatcacaagagccataattggaccaaagttaactttcttaatgtatgtgtcccacacttccttgaaattcctatactactgattataaaaatttttatattttgtcaagagaagagaggaaaaaataatacacagagactactatgcaataatacataggtggtagtggtgcacaaaataaagtattttgtatacctaatttactttaatccacatatccaccattaaaaaggtaggtgttgttaccaccatactatacataggaaagcttgaggcttagtaagctctgccaacctcgatgaggtcgcacagctactgaataatggagctagacttttggtaaaggtcagtgggagggaatccaaagctcctaaattcaaactcaagcatgagatttacaatccagatatcctaagtgcatcactgggttccaagatggtgatttatttaaggaattcacaggcgtgttgaaagcatttgaactcacataagcagtagatgtgttcttgctaaacctaactcaacttattctccttatgaggaaatcaatgctattcacaaacacaacctaaaaggctttattcaatttaaatgaaattaatcttattataagaacacatgaaaatggaattaccatacaatctagcaattccacttctgggtatatactcaaaagcattgaaagcaggttctcagagagatagttgtacacctatattcatagccaaattgttcataataattaaaacatggaagcaatccaagtgtccactgatgagtgaatggacaggcaaaatgtggtatatacatgcaattaattattattcagccataaaaacaaggaaatcctgacatgtactaccacatggatgaatgctgaggacattacgctaagtgaaataagccaaacacgagaagagaaatactatatgattccacttatataactacatagagaagtcaaaatgacagagacagacactaaaatggtggctgccagaggctgggggtgggagtgcagagggaaatgggaagttatattttaatgggtatagtattttagttttacaacatgaaagtgttatatagagatgtattgtggtgatggctgtgcaagcatcataaatgtatttaataccattgaactgtataccaaaaaatagttaagatagtaaacttcatgttgtgtgtatttttcccaaatacaaaaatttggggaaaataataaaaatatcacatgaaggtcttttagattcagtacattgcttcatgatttttataatatcttctaaggccagggaagcagaggtaactttgtatagaacctctgagtacaatctatgtgataatgcccaaccaggatccctgctcccaggcaattagatgttcttttttcagagtctaaactgcagtagtggtgatggcgagggaactggtagtgatagaaatgacagtagcatagctaagatttcttcagtacttgctatgtgccaaccagtggaccaagaatcttacatgtagtgtgttattaactctcagacaacagatactattattttcccagttttacaaatgagtaaacaagggaacagaaacattaggtaacttgattgagaccatactaataataagtggtgaagtcaaaaagaactctattgatatatctttgtctctcactagcctgtatcctcttgagaacaaagattttgttgtattcatctagcctagcacaatttctagcaaacagcagacatccattcaccatgcagaataaaaggaaatgaggaaaggagagagggaaagaagggggaaaaaagaaattatatctagtcatgctatgttcttaataaatgtggattttctttctttatttccttaaccctgaaatcgcaggggaacctgcaataatgctcaggaatcctagggcataggaattcctccctctttgagattccaggctaattcctgacacaggaccctcaaaaagctgctaatatctgtctagtttaatgattaatattctagcaaatatatattcttggctcatctcctaatttctaatattgagactaacagagagatagagttcaatctaccacactaagattcactggaaaaaaccgatgtctttgatattggcctcttgcacactggtgtgaactgaggtaaaagaaaaactgttcccagaggaaaggtagttccatgcctaaaagtacatgtgtcataaaccagtggtactaaaatttgagaagcctaaacaaaaggttttaatgcaatagataactggcttattatgtaaactgtgccaatcttatgtgacgggcttatgccacacaaaacggaacattagaatgatctatctaaagcaagtcttaactgttctattttgactctactcttgcttggctttacctctatttataattaaaatttagtgagtcatagagaccataattataaacatgtatacagtaaacacagggtccattacttttgcttagaaaaataattacagattttttaatattctgatcttaactgacccaaaggaattaaacacacattttatttttgtgttttagtgagatagagatagggagggagaagcataagccagtgctcaggaaagacgaggcattaaccatataacatagatttgtttatttatgggctgcaaagtatttccaaggtgacaagtaacttagccattaatgcctcagccttatgtgtataatgggaataacatacagacttcttgtaataagtaaaagttagtttaaagcacattgcaaatagtgttatttcaattattcattaaaatagtcaaaaaggatcagttcttatacattaatttctcattttaaggacagaatttatcagtattctcatatctatgtaactggcagtatgagaactaaaggccatcaagacttatctaaactgtataacaagtaataagattttaggacacaatccctctatttctaatacaactccagaaatgttttattcataaatgcattcattcaacatttactgatcaactactatgtacaaggcattgtataagaggctgtggcaatcctctacttacctttgtactgtgtttcctacttccaaagaggttaaattaataccaaagtgatttgttaaaaatacaaaaaaggattccaaatgggccaataaaaggaaaagacacaccaactctaagaccagatttatgttactaaataccgacggaaactcctcagcatttaaaagaatacattaaggagagtaatgcaagtcatttggatgttttcaatatgagaaatttgagcctactgaataaattaattaaatatctttaatattgagttgcagctttttattgcatttatagaactttacctattagtaaaatatacaatctataatagcttgtctatatcaaaaatatagatatctgtcagaaaacatacaaagccacaactaaaatacatttaatatcattaccagtaacatttgtgaaaaaataccaagcatctagcatttgttaaattaaagaataatattccataaaatctacatctggattttagcccctcttttagaattactatttaatcttcactttttttctctctcacttctaccccaacagcaacagaaacacatgcacaaattaaggaattatcttacaatatacccttaaattttctgaatatgccccatgtgtccactaatagccaaatgctttcaaatctgttcagctaaatggatcaataactacatccagcctcacatagtggggctgccaacacggtgaaattgagccaaacacaaaatgtctctaccaggacaaaaattattatcaacccagttatctgaagagatctactctcccagatattctttcgagaagttggcatacacattatctagggcagtcaacagctactaaaaaaaaaatatttgagtcataaaacagaggatttaaagaaaatattcagaagctaaaaccagtgagttttagaataaaccaatgtaacagttcaaggtctacatcaagtaagaatctttcagagtcagagtacacaaaacacgtaagagcacaagcacactgctaacaagcttctctgtgctctcactcatatgacacagctgcaagcaacaattgagcaggtgcaaccaagcttttgagaattcctgcctgttgcccaggaaccacaacactgcatggttgagattttaaacaggtgcaaacatttttttttcccattcgtctagtgcttgagacagtggagcagacagtacatctgcaaccactccatacctaaagcaaccatcacagaaaataaactcaaaagcagcaaaataaaaaaaagtttaaataaaacaataatggcaaaactgtggttttgcaatggtctgaccccacatcaccgttcactttaatagtacaattccataaaataatctcttcaccagatgaatgctttgtaattaaaattatttgccttatcaaatcttagaaatgtttacttgattcttacaatagaataaaataaaatatatgtataaaatgtactatcctttgaagctgtcattatctgtaagtaatcaagaattaacatttttacattatgaaatctataagcaattttaatacataaaaatattataacttgttagttaatatatagatttacatagttataggtaattcatatacatacctgtgcagctatggggcacaaacttgcaattcatcaattctgaaatgtaaaagaaatatataagtaaaaattaatttactaagttggaaccagtatttatgttgcaacaattcctgcagagaagtaggaaaagtttcagtgcataaagaggtaaattattttttatcaatattttccctataggatatttcatatatctgaaaatatatacacacacacacacacacacacacacacacacacacagagtcccttagcagtgtatcataagcactagcaagggactctgactcaccatggcctctgaaactcaaatgctttcactagaggacgaggcaaacactttaaaatgatttttttttttggtattcttccaagactattgccttcctaatacaaatatgactgctgctctctaaaatgaaactactcagattcatctgcactcagtttggatagaatgttgttaaggaagaaaggtgcttttgtagagcagtccacaaaaaaatgcatgaataaatgaaagtaaactttgaatgttcgttaactttgagttacaacagcaaatagaaatgaaattgattgctacaagaaggaatgctaacaccacgtcggatataatgcaaaatgcctcaactcaacacactttgacaaaactgccagcgaagtaggtattgatacagaagactatgtaagtccacattaaacaaaagtagcagtttacaattagacctgaaaaacatttggatttaggtggaaactgtattgcaacatacagcctgggaactactggtactcttaaaaatatttcctagttctagccaggagtggtggctcacgcctgtaatcccagcactatgggaggctgaggtgggctgatcacctgaggtcaggagttcgagactagcccgagattacgctattgcactccagcctgggtgacaagagagaggctccatctcaaaaaaaaaaaaaattctttttgaaagcaaacggacatgtttaatttatatagttcttctgagcacagtcgattacagcaacacattatagtcagtaagtccactttataatactgcttaaaagtatatagaggtaataattttgatgatggctcaataaaacaacatcttcgtatattctgatgggaatgtggattacaaaagactttctagaaacccactgagtactatgtatcaagaacccaaagttcaatatttttactcagtaattttagtcccaggaatcaaatgtaatagaaaaccaacagaaatttatgtaaaaaagataatttttatgacagtaaaaaactataagcaacctaaatatctaatagaaaaataattaaataaagcatagcacatctatataaaggaatatttggcaaaatttaacaaggtactttaaagaatattttaaattttacggaaaaatgcaaatttatagtattatgatgctaaaatattatataaacatgtagactaccaattacatggacagtatgaaattatgtgaataagaaaaaacaaagaacaaaacaaagaattaagagtgattatatctggataataagactttggatgattttaattttttctttttactttcatatatagttaattatctacaataagcatgacttttataataggaaaaaataatagtaggtagggtaggggtaaaaggaaaaagttataaaatgctatattgaattcataaatgtaaccttcctaagagaaataaattaattcagtcacaaataaaacccagtaactgtgcctacagtgagaaacaccctcactgcttcctcaaaggggcatagccagggtcttttttatcccagtgctttggaatctacacaagtaattcaataacacatttttaaatcatcttagtaaaacttctttacttattatgcagagtgaaatgatggcaagaataatttaggacttcaaatctcttcaacctagcacagcctaacttattcactaattcaatcacattcagtgagcatctactgcctgcatggtgctgtgtttggcactgcaacgtgctaacagataaattaggacacaccttaccctcattgagctaacaatttaaaaacactaaaaaatgtttagacacagctcacatgaagaagtaaacacaatacagttcaaagcatttgtgacagatttggtacattttaaagcaagaaaacatacactaggtttattttttatatttctgagcaaacacctatctttaggtaacaataaaaagtcatgtgtattagtatcacttattaatgcactagcaaattaagtatttaagttttttccttatgtgatctattttttgttaatggacagttacataataggagattaagtatgaaggaatagtgacccaatctggaatgcagatgtgtaagattgtctcagtttatctgaggccacataaaacacatgcacaattattaacaggctgcagttatttattggaaaccaaagcaaataagttagttactggttaatcctgctaaaagacactgttatgacaacaccaccagggaaagaaaagaagatagagcaaaccacttttgttatgcagataaaatgattcagcatagagattctctcaatagcagttcagtttcctgctggcctgtaaacataatcagcaatgcccttctgaggccagtgctgcaggattattccaatgtgaggtcaatggggtcaatctgtgtgaagtggtgacaaacactaagagaaggtaagaagctatttgtgtgatcagtgatccatagactggggctcagagttctgggaagcagtagagttatgaggtagggtggtagttaagcacttagcttttgccatcaaacaaacctggaatcaaattccagctccccatctttagttctgtgatcctaagcaatttaaattttctgtctgtaaaatggtgatcatgttactcaccctacgaggttgtctatgcaggttatatgttatagccatataaaggaactagcacagtgccagccatgaggtaagcatttgataaaagggaactgttagtactatcatagttgtatgaaaagggaaagcatgtctgtccctttaagctaaggaactaagctaggcaaggagtaaggagataaagaaggcttgttgaagacatcaccctacagtccagcagctcatccaaaagccagtcatgtgcttgatgttcacagaacatttctgaatcaggcaacactgcaacaatagtaatagccacaataacaattctaaccagcacttttaagctccattcctatgactgaaaagaaaggcagtaaagtctaaataatacgtgcagcaacactgccgaacttctctgggtgaaaaatgaaggatcactttccacatttaactgaaacaatcaggaaaaggaaaataaggacaaaatgaatataattactcaactggaattggaccaaggtgccgtgtaatggtcttagcaatcacatgtaggcacttatcacctttttatgtattctaaggagatcctgcagatgaccagagccttatatatgaggtttgcaactctaagtaaaaaaaaacgttagagtcagtttttttcttatggctgggaagacagaaatggatgcatactgatgttgttctagtccttatttgtgttttgatttaaaggacagcacagatcctgagttgttaagtggcgtgtcttcagattcccacacagttcatgtaattgctagagttgtttcactcgcattgggtgaagttactattagcaccattccagatgcagatatactatagagtgtttgtttgtttgtttgtttgtttgaagttctttttacttctaggttggcatagctgtgttctccagtgggataggtccaattctatgttacagaatacagaaatagttcatcttcccttcatactagttgggcctggctagagatgccccttaagccattaataaatctacttgctaattcacttagagtactaacaaggatctcacctgggcctgtgggtacaaccactccatagaagagctctaaacctaaatttaaacaaaaagaatttcacccatgactgaggaagcatccacaggactattttacatgctttacatttaaatttgatattttgagagaagactatgtaattcaaaataattttattttatttaatatgtatttagtccttctggacccactacagagctggatgttgtatcattattatatggttattataaaatgtacactttactcatcaataaagccaattttacttttgaaaattgaggtacctggcttctgtggtttctctcaacagaaagtcctatgaagagtaagaactataaattgtcaagtagacttgaaaaacttatgcttattttgtaaattactgagctaggtctggcccttcattttgaaaagctatctgcctataagaaagaggaagtatgaggagcacagttatctattaatcaacactgtgaactggaaacagataaagtgcaataaagaaggaaaaggaaatcatatggtaaacaccgttaacccaacggcacagttgatctgtctagaccttaggtcagataagctgtaataaagctataaaatccacgaaaaactaaagcttatttacaaaaactgcaaaatttgaattttctataattaatgccacttaaaatgaaagaatttaatatcaaatttcatgtataaacatgataaatttgaactctcaagtagaaacctcatctacaatacactaagtgttaataattctaattgtcctataatccacacttcacagcatattctagagaaaatagctgttgggtttttatgacttaacttaaacttcacaacttttaaaataaaagtttaagagctaatttaaaaatgtatttaagaacctaaaatttagaaaatattaaaaattatattttcaaaatatcctcaacttgaagttatggctattgaaatcaatgatttattctcagaaaatgtgaaaattttactggcctgcttgtatacatccctggggtcttagtttagatattatctcctccagaatctgatatcctgtgtctaatcctgtcataataatcattttattgcactggaattgtcttttacataagactgtaaacttggggaccagcatttgtatcttattcaccattacatctgtagtttttacttagcacagtacataatgtgtggtaggtaggtcttaaatattggctaaaggaatgttgcatgaattgtgttagcttgtattcttgatgattaagaaaattcacactgcataaaaaattaaggaatcacattcgtaaacaagttattcccaatctttaaaggactaatcttccaatctattttcttgtgctttttctacctatttttcctcttaatcagtacaaacttaaaatatgagaatttgagtctcaaatgttaacaccaggttagaaagcctcgttagtttggccccacattggacaagaatgagttgtccaaatcctacctgttaacagatactcggtatggaagaaactgttacacagagttcactgaaagagttctgcagttcctaaccaattatgtggttcttatactttctctaaaaaacttcttctagctatagttcctgagacagatacctccactattttattcttttgtggcatatatgacagtttaaattattggggtgattattggcttatgtgtttattatctctttctttcccactagattgtatactccatagaggccacactactttattcactactctatacccagggtctagtttagtgcctgacacacagtcaacacttaataagtatttgtcagatgtataagacaaacatgagttcaaaaatatgagcagtaaatttagagcagtagctttcaatcaagagactataaaagtaggcagttaacagctacccctaaaaagtgttttcatttgaactctgtggaagccttgatgatgtagaaaatcttttattgtaaattctgttcaatcaaaggcaaggcagaaaaacttcaaaagcaattctaggtaggatgaaggtatagtacctagaaaaagcaatggaatcacaacaacagcaaccactttcaattagaagttttgagtttgaattaaagcttactaggtatgtgtcctaggtaaacttacataaccatctctaatattcagattaatcatatttaaaatgagggggattttatataatataaaatttttatattatataaaattttatgtttttatgatgacttaatgagattatatgtatacaagtagctattagcattatctatggcatttaggagaaggggctcactattgattagttcctttaccttggccagccagcgtctgcaacaagattgagctaaaacttcatcaagtaaccaggataatacattttaggtaggaaaacatagatgaaataagggcttaaatgcagagaaaagtaagttggtgttagggttaatacataaaaaaaaatgtgtaagacagagtagcgagaatttcacagcagttagaaatggaaaaagatttcaacatgatacaaaaactgccaagaaatctattagcttttcccttaggtgacgcagtcttcccctcatataaataaaataattgctactattatagttggagaaaaatcaactgaaatgtacattaaacacgtattagagatttaacattcttcacatcatttcacatgctgaaaactcaacctttgtaaatatagccatgaaccttattatttactataataaagtaacagcatatccttttctatgtactacttgcagaagtataaaaggcaaatgtgttcttgctctttaggtgcaattacaaggcagcagaatgtagttaggctaattttttgcattttgtgctcatcagacagtggctaccaaccctgcaagaaaaaactggtaccaaaaatacttcatcggaaattctattttcatacttagttgctttcagtattcttactaatttggtcaaacttatgtcagctccctcattaaaattgttttctgtctaaatcgttatcttttctgtgtacgtatatgtgtgtatgtgtattatttggtcaatattcagacagaacaagtctgagatgcaccgcataacaaaagtaatcaccccatccccatacttctcagggaatatctacctggtaccaataagctcatcaagagttcatctgaattcatagcctttgtcaatcagaggtgataaactgtgattttagtagtctatgttccctgcaagaccatcgtcttcatgagggctagaatctggtttattttctttcttttttgtcatcaccacctagttcaggacaaagcacacaatatacaaccattggatatttcattcatttattctaaaatgtttattgagtacttactatgtgacaggcattgttccaagtggtggtgatttaggagtgaacaaaatagatggaaatttctgatctcatggagattatatatatttgttgtggatgtctgataataaatatatagaatgacagacaattatctgcgctaaggaattaaaataaagcagggaaagggaaaagtaaatgatgggattgggagttggggttgaaattttagatagggggaccagcaaagaaattatggaaagatcacattcaagtgaagacccaaaagaaatgaaggagggagttagccagaaatgccttggagaaaaggcaaaggaataggaaagagtttcctttaaaatgccaggctatattcagatagaaatgtttctattaaaatataaaggtatacgaaaggcattcaagccaaagaaataggaaagacttttctttaaaatgtcaggctatattcacacagaaatgtttctattaaaatataaaggtcctatagaaacatttctgtacgaatatataaacatcaaatacataaaagttttaaaatgtttcataagaaaggaacttagaaatcaagaagatagagctagggtatttggcattactatgattctaccacaaccctcccaggggaattatccagctcagtaataacctgagaaatttaggggtacaaataaagtttgcaataactgtaatcactgagaatggcaacctcctaatagatctggaatacctagaagaaacaaatccacttttgcaggataccttcaacaactcaggtcatgtgggagtctcacagaaaaagcaaacaccaatgaaaaagagctcatatatcaaaaatatcaaatccgaagaaaggttcatccataaatgagtcagcagatgaaaaactttaaatgaaatgtacgcattaagttcaaaatagggcacaatcttagggaactaatctgagggccaaaataaaaaaagaaagaaactatgaaaaaggcagatttgataaatatacagagatttatagaaataaaattgtcattaaaattaatatctgaagtgagaatttatcatattaaatggagctaaagggaggattactgaactgaaaaataattccaaggaatttacctaccataaaacagagatagaagatattttttaaaaagattaggagatataaatgacaaaataaaaaactctaacatatctaataagtatttaagaatgaaaaaaaataaagacaaaaatgcaatatctgaaatgatgatgaatcttttccaaaactgataaaacctcagaaaactgtaaaacagcatcaggtaggtccttcagggaatatttcagaaaaaggaatttttatcacaggagatgacagctccatgcatgttattacgccagaagaccttccagtgggacaagatgtagaggtggaggacagtgatatggatgatcccgaccctgtgtagacctggctaatgtgtgcatttttgttagtttttagcaaagtttaaaaagttaaaaaaaattaaatggaaaaaatacagaataaagatgtaaagaaaaaatattttgtacagctatacaatttatgtgagctttaaactaagtgttattacaaaaaattcaaaaagttaaaaaatatgtttataaagtaaaacacttaacagtaagctagggttaatttattattgaagaaatatgaaacttttataaatttagtgtagcctaagtgtacagtgtttataaagtctacagtagcatacagtaatgtcctaggccttcacattcattaaccactcactcactaactttctcagagcaacttccagtcttgcaagctccattcacggtattaattataacttataagcaaaagactataccatacagcatacgtgtacaataggccataccatctacgtttatctaagtacactctatgatgctcacacaatgatgaaatcacctaacaatgcatttctcagaatgtatccctgtcattacgagatgcatgactatatatcaaaactcatgcaatgcagctaaacagtcttagggagcaaagtacaactttaagttaatatgctaaaaagaaaagacaagactaaaattatcaagacattagaaaagttacaaaaaagtaaaaccaaaaaatgtaaaagctgaaacgtaacaataatactgagcataagggaaatgaaaaacaaaaatgtaaagacagtcaacaaaattaagtgttgctttttttaaatgactaataaagtagaaaaatctctgggaatttttattataaaaaagaagatagaaataaaattaaaaagaaaaaacaaatctatttggacatttaagtgattactgaatactatgaaatactttatgctaatttgacttaaatgttcaagttattttacaagtgaaataatatgaacaattttgtagaaaaatataacttgcctaagaagaactagaaactctgattcgacaattataaagatatcacatatgtggttagaaatttatataaacatacacacacacatgcacgcgtgcacacacacacacacacacacacacattaccaggcccaaatatatttaaatataaaatttaataaacctttaaaaatctgttgaggtctatgtgataaaaattggaccatagaaaacaggaaagcacctcaactcttgtataaggcccttgaacactgatatcaaacccagataaaggtattatgagaaagaaaaattatttacaatggtgaggatttagaagaggtacaagctagccaaaagacactcagaaaaagaaaagtaacaatagctattatttatttagctactactaagtgtttgataagagttttgcatatattatttaatctgtatatcagccatataagtggttttattttcattattatcacaattgtataaataaaatgatgctcaaaaaaaataaatgggctcaaagtcataaaattaataagtagcagcagttgatagagggagactctaaagaccatgtacttaaacactgccttgtactatttactcatctttcttaattatgttcacagaggacattatgctgtctccctaacacttcacccaattttaaataaagcataatttttggtttttagcagctttactatgatgttcccaagtgttgttttcttcacgtttattgtgtttagagttcactaagcttcatgtctttcacaaaatttgggaatttttaacctttcttcttaaagtctttaaatattttctctgtcctattcttgttcttcaataccctacatgagagaacaggaggtccctcagacatatacccccacagcaataaaaattttctagttatcccaaaaaaaaaagtgccctagttgaaactttggggctcaagtagggggttgtgaacactagtgacacccaagacctaagaaggccattttgagagggtagaatcaagcccacatgacagacttgccaatgatggtcccagcttcagacatggaaatagctccaacatcctgtatcaaaaacatcgacaaaggggcctggaagaagtcatgcacactaatgcctcaggtgacagtcatttgtcttggctgaggatcctaaaagggagctcccacttagctccagttcctcttggctgctctctcagagcagtcctgccagcacagggaaaaagaactcaaaataatgattttcaataagtccaatgagatgtagaaaacacaaataaaccacaaaatataattaggaaaataattcattaaaaaattagtttagtttaaatattatattccataaaaaaaggaccaaacagataccctatagctgaaaagtatgaagacagaagtgaaaaattcaatacagggcttcaacagcagactcaatcatacagaaaaagaattgatgaacatgatgacaggtaatttgaaattacccacctagaggaacaacaagaaaaagactgaaaaagcatgatgaaagtatgaggaacctatgggacaataccaagtgtacaaaaatatgaattaggaattcccagagaagacagacagagtaagaggacaaaaactaatataaagaaatactagcagaaaagttcccaaatcctgggaggcatatggacattcagattcaagcagcataaaggcttccaagagagatcccaaacaggaatgctctaagacatattataaccaaattgtcaaaagtgaaagacaaagagagatcttgaaagtagtgaaagaaaagagccttgttccatataagtgaacatccaaaagacaatcagtagatttctcaagaaaaaccttgtaaaccaggagggaatggaataatagattcaaagtgctaaaagaaaaaaaaaaaaaaacctgccaaataaaacagtatatccacaaaagctgtccttcaaaaatgaaggagggataataacataaccagacaaaggaaaactgagggaggtcatcacaagacttagaagaaatgctaaagaaagctcttggagtggaaataaaaggatactagatgataaaataaaattatatgaaagaataaaacttactggtaaaaataaacatatagtcaaaatcagaatactctaatactgaaatggtaatacgcacatcactttttaatagggttatttgtctccttattatttgttattaggtatacttttaaactttttattttaatatttttggaacacagtaagtatatatatttatggggtacatgagatattttgatataggcacataatgcctaataatcacataaaggcaaatggagtatccatcacctcaagcatttatgctttgtgttacaaagaatccaactacactcttttagttattttaaaatatacaattaaattatttttgactagtcaccctgttgggtgatcaaatactagatcttactccttctttctagctatcgttttgtactcattaaccatccccacttccccggctcctactccccagttacccttcccaacctctggtaactgtcattctactctctatctccgtgagctcaattgttttaatttttagctcccagaaatatgtgacaacatgttaagtttgtctttctgtgcctcactgacacacaaaaaagaatgacagaacctcattcttttttaaggctgaatactactccattgcatatatgggccatattttctttatccattcttttgttaatggacacttaggttgctaccaaatcttagctattttaactagtgctgcaataaacatgaaagtgcatatatatcttcaatatactgatttcctttgttttgggtatatacctagcagtcagattgctggaccatatggtagatctgtttttagttttctgaagaacctccaggctgttctccatagtacttatacttatttacatttccgccaacagtgtacaaagattctcttttctccatatcctcaccaccacccattattgcttgtcttttggatgtaagtcattttaacgggagttagatgatatctcattgtagttttgatttgcatttctctgatgatcaatgatgttgagcactttttcatataccagtttgcgatttgtatgtcttcttgtgagaaaagtctattcaaatcttttccccattttttatttggattattggattattttgtatatagttgtctgaactccttatatattctggttgttaatcactgtcagatggacattttgcaaacactttctctcattctgtgggttgtctcttcactttgttgatggtttcctttgctgtgcagaagctttttagtttgatgtgatcccatatgtccatttttgctttggttgcttgtgcttatggggtattaagaaatatttgcccagtcaaatgtcctggaaagtttcctcagtgttttttttttcagtagtgtcatagtttgaggtattagacttaagtctttaattcatgttgatttcatttttgtatataatgagagagaagggtctagtttcagtcttctgcatgtgggtattcagttttcccagcaccatttattgaagagactgccctttccccaatgtatgttcttgccacctgtgttgaaaatgagttcactgtaaacgtatgaatttgcttctgggttctctattctgttccattgctatatacactgttggtatgccagtaccatgctcttttggttactatagccctgtagtataatttgaactcaggtgatattcctagttttgttctttttgctcaggatatctttggctattgtgggtcttttgtggtttcctataaattttataattgtgttttctatttctgtgaagaatgtaattggtattttgatagagattacattgaatctgtagactgccttgggtagtatgggcattttaacaatgttgatccttccaattcatgaacatggaatatctttccatttttttgtgtgtccctttcaatatcttgcaacaatcttttatagtttttattgtagagatctttctcttcttcagttatttcctaggtatttaattttatctgtagctattataaattgaattactttttaaatttctttttcagattattcaccattgacacataaaaatgtcactgacttttgtatgttgactttgtatcctgcaaatttactgaatttattgatcagttctaatagttttctggtgaagtcttcaaatataagatcatctcatctcccaacaaggaaaatttgacttattgctttccagtttggatgagcattatttctttctcttctctaattgtactactatgacttctagttttatgttgaataacagtgatgaaagtgagcatccttgtcatgttccagatcttagggtaaaggctttcagtttttccccactcagcatgatactagctgtgggtctgttgtatgtggcttttattatgttgagatatgttacttcgatatccagttttttgagggttttttttttatcatgaggggatactgaatcttaacaaatgtttttttccagcatcaactgaaataatcatatggttcttgtccttcattctgttgatatgtggtattatattgattgatttgcatgtgttgaataatcattgaggcctgggataaattccacttggtcatgatgatcctaatgtgttgttgaatttgggttactagtatttgcttatggatttttacatcaatgttcatcagggatattggcctgtggttttctttgttttcttttctttttttttttaaatgtgtctttggttttggtattaggatgatactggcctcacagaagatggacacattccctcctcttctatttttcagaatagtttgagtagaattggcattagttctttaaatgtttggtaaaattcagcagtaaagcgatcaggtcccagggtttcctttgctgaaggactttttattacagctaccatctcattacttattactggtctgttcaggtattggaattcatggttcaatcctggtaggttgtatatgtctaggaatttactcatttcttctaggttttccaatttatttacatgtattaatagttgcttatagtagcttctaatggtcttttgaatttctgtagtatcaattgtaaggtaacctttttcaattttgattttatttatttgggtcttctatctttttttctgtcaattttgtttatcttttcaaaatgtctgtcaattttgtttatcttttcaaaaaaccaacttttcatttcactgatcttttgtattattttcttcatttcaactgcatttatttctgcactgatctttattatttatttaattctaccgattttgggtttggtttactcttgcttctctagttctctaagatgcattgttggtttttttattgaaagtttttctactttcttgatgtaggcacttgtcactacaaatttccctcttagttttgatatgttctgtttccattatcatttatttcaaaaaacttttaaaatttccttcataatttcttcattgaccaactgatcactcaggagtacactgtttaatttccatgtgtctgtatagtttccacaattcttcattattaatttctagttttattccatggtgatcagagaagatatttgatattatttcaaatttttgaatattttaaagcttgttttgtagtcttaggtatccttgagaatgatccatatgctgatgacaaaaatgcgtattttgcagccgttggatgaaatgttatgtaaatatgtattaggttcattcagtctatggtgcagattaagtccaatgtttctttgctgattttctgtatggatgatctgttcattgctgaaagtgggatgttgatgtcttcagctattactgtactggggtctatctctctgttaagctctgataatatttgctttatatatctgggtgctccagtgttgggtgtatatttatttacagttgttatatcctcttgctaaactgacccctttataattacatagtgaccttctttatctcttcttgtagtttttgtcttgaaatctgtattgtatgatatcagtatatttcaagtatacttccaaatatgattacagtattataatgttgtttttctatgtacatattacgtacataccagtagtattatgtactatgtaatagtaataatatttttactgttactgcaagttttgtaccttcagatgatttcttattgctcattaacatccctttctttctaattgaagtactccatttagcatttcctgtagaacaggtctgatattgatgaaatccctcagcttttatttgtctgggaaagtctttatttctccctcatgtttgaaggacatttcaccaggtatactattatagggtaagagtttattccttcagcactttaaatatgtcatgctactttttcctgggctgtaaggtttccactgaagagtctgatgccagatgctctgttgtatgttatttgtttcttttctctttctacttttagaatccttttccttatatttgaccttttgggaatttgactattaaatgctttgagatagtcttctttaggttaaatctgcttggtgttctttaaccttcttgtgcttgaataattatatctttctctaggcttgtgaagttctctaataccgtcctcagaacaaactttctacctctacctctctctttacctcacttttaagaccaataactgttgccctgttgagtatcttgtaggcatgcttcattcttttttattctgtccttttgtctcctaaatatgttttcaaacagtccttcttcaagctcactaattctttcttctgtttgatcaattctcccgttaagaggctgctgcattcttcagggtgtcaactgcatttttcacctccagaatttctgtttgattcttaaaaattgtgtcaatctatttgttaaatttgtctgataggattctgaattccttctctatgctatcttgaattttattgagtttcctcaataattctgtctaaaaggtcacgttatctctgtgtttctgagattgatccttggtgccttatttagattgcttgatgaggtcatgtcttcctggatggtcttgatgcttgtggatgtctgttaatgtctacacagtgaagaagtaggtatttattgtagtcttggcagtctggacttgtttgtacccacccttcttggggaagcattctaggtattcaaagggacttgtttattgtgactaaatttttggtcaatgcagctgtgtctacattgggggcactccagggtcagttacactgaggctcttacagactcatagaattaccatattggtggtcttgtacaagatctggaagaattctctggattactaggcagagacttttgttctcttccattactttctcccaaacagagtctctctgtgtgagtgtgcttagctgcctggtgctgggctgggagagacataatacaagttcccctgtggccatcaccactgagactgtgctgggtctgacctgaggccagcacagcactgggtcttgcagaaggcccactataaccactatttggctgctgcctacattcactcaaggccctggggttctacaattatcagttaccaacaccagccacatctgtgtcctttttttcatggcaccgaatgcccccggccccagatggttccagagaggccctctaagatccagggcctggagtaagaaaccttaagaatctacctggtgctccattctactgcagctgagctggcacgcaagccacaagacaagtcttttccacaagcacagaagtctcttctcttggacaccactgccacaggcccatggggagtactaacaagctactgtcaatgttcattcaagacccaaaggttcttcagtcagcttgtggtgaatgctgccaggcctgggactcatccttccatgtggtgagctcccctctagcctagggaaactccccaaatgccattcaagaaccaagtcctggattcaggaaccccaagagcccacttcctgctctacaacactatggccaagctagcatctaagctgcaagacaaagtccccttttctctcccatctgtttttctcaagcagaagtagtctctccctgtagccaccacagctgggaatgttctggatcacacctgaagccagcatgtttcagagtctcactcaatgcccatgacatgtactgcctggatattgctgctgattaggaaaggcccaaaggctctttagtcagcaggtgatgaatcctgccagggctgggtccttctcttcaaggcagcacattcccttctagcccagagtatatctagaaatgttatctggaagctagtgcctaaagtgggtgcttcaagactctacttggtgccctatcctactgtggctgagtgggatccaagttgcaagacaaagtcctgtttactcttcactcctctcctcaagtggaataaaggagtctctttcagagctaccaattgcattgcttggtgtcagaggaggggtggcagaagccctcccttggccaccctgtctggtgtctcactaggtcatatgacccctgcatccactggctccaagcctagcagagcactaggacttgcctaggagttgcagtccttgtggctcagactgccttaaagtttatttaggaccccagagaattttagcccatagtggtgaagtttgttgatacttgagttccaaccactgggatggacaatttctctcttgtaaatcccttttaagcctaatataaaagataaaagacaaaaaatatcaaaaacaactatagctagaatatttgttaatggatacacaatataaaaaggtataaaatgttatatcaataaagtgggggcctgggggaaaagcaagatacagagtttttatatgcaatggaaattaagttgttatcagtttaaatttgatggttgtcattacaaggtgtgttatatatgcctcaaggtgaccacaggaaaaaacctctagtagacacaaaaaatagagacatgaatcaaagcaaaaattgaataaaatacaaaagaagacagcaagattggaagaaagaaacaaaagaactacaaaacaggccaggcatggtggctcatgcctgtaatcccagcactttgggaggccaaggggagtgaatcatgaggtcaggagttcgagaccatcctggccaagttcgtgaaaccccgtctctactaaaaatacaaaattagccgggtgcggtggcaggtacctgcaatcccagctactcgggaggctgaggcaggagaatcacttgaacccgggaggcagagtttgcagtgagccaagattgtaccactgcactctagcctgggtgacagagcaagactccatctcaaaaaaaaaaaagaactacaaaacagtcagtaaacaattaacaaatggcaatagtaagtccttatttgtcaataattactttaaatgtaaatggattaaattctccaatcaaaatacaaagagtggctcaacagaaaacaaatatgtaaaatccaacaatatgctgcctataagaggctcactttagctgaaaggatacagagccaaaaagtgaagacatgagaaaagatattccattcaaatgataaccaaaagagaataggagtggttatagttatatcagacaaaatagactatcagtcaaaatctatcagaagacacaaagaaggtcattaaatgataataaagtggtcaattcattaagaggatataaaaaattgcacatatacatgcactcaacattagagaatctaaatatataaattaaatgttaacagaacagaagggaaaaatagacaccagtataataatagtaaaagatttcaatattccactttcaaaaatggatagatcatatagacagcaaatcaccagggaaacagtggtctttaaaagtactacagaccaaatagacctacagacatatatagaacattctatccaacagcagtagaatatacatttttctcaagtgcacatggaacagtctccaaatagatcagatgttgggccacagaacaaatcttaacaaatttagaaaaaactaaaattatctcaagtatcttttctgactacattataaaattagaaatcaatcaaaggagaaattaaaaatgaaaaaataaaagtggaaaaatcacaaacatgtggcaattaaataatacacttcttaacagccaatgtgtaaaagaagaaatcaaaaccaaaatcttgcatatctttaaacaaatgaaaatgggcacacaacaagagggaaggacataacaatgaatgcctacattaataaaagaagaaaaatctcaaacaacttaacttcacacctcaaaaaattaaaaaaagaacaaagtgcacaaagtcagcagtaataaggatatattaaaaattagaccagaaataaatgaaatagaaaatagaaaaataatagaaaagatcagtaaacctaagagttcgttttttgaagacagataaatctttagctagattacccaaggaaaaaaagaaagaagactcgaatttaaaattttgtaatggaaaatggacaattaaaatgatagaacagaaacacacaggattataaaaagactacattaaacaattacattccaacagattagataacttagtaaaaaataagttcctagaaacatataagatgcaaagactgcatcataaataataaaattcggaacagattaatagcaagtaaggagattgaatcagtaataaaaaattctcccatcaaagaaaagcccaggactagatgtcttttattttttgagacaaagtcttgctctgtcacccaggctgcagtgcaatggtgtgaccttggctcactgcaacctccatctcctgagttcaagtgattctcctgcttcagcttcccaagtagctgggattacaggcacccaccactacacccagctagtttttgtatttttagtagagatggggtttcactgtgttggccaggctggtctcaacctccagaattcaagtgatctgcatgtctcagcctcccaaattgctgggattacaggtgtgagccaccgtgcctggcaaaagaactagatgtcttgatgagcggattctaccaagctttaaaaaattaatgcccatccctctcaaacagttccaaaatgtttacaagaatgacacacttcctaactcatttcaaggccagcattgccctcataccaaagctggataagagtgctttatggatatacaccatcagcaagctatcgcaaggacaaaaaaccaaacaccgcatgtcctcactcataggtgggaattgaacaatgagaacacttggacacaggaaggggaacatcacacaccagagcctgttttggggtggggggaggggggagggatagcattaggagatatacctaatgtaaatgatgagttaatgggtgcagcacaccaacatggcacatgcatgcatatgtaacaaacctgcacgttgtgcacatgtaccctagaacttaaagtataataaatatacacatatatatatataaagagtgctacaagaaaagaaaattacagagcaatatcttagatgaatatagatacaaaagtcttcaacaaagtaccaccaaaccaaattcaacagcacattaaaaggatcatacaccatgatcaggtgggatttatctctgggatgcaaggatggttcaacatacacaaatcaataaatgtgatacatcacattaacacaatgaaggataacagtgcgggaaaagcacctgacaaaaatcaatgctttcttgataaaaagcctcaacaaatttggtacagaaggaacgtacctcaacataataaagatcaaatatggcaatcccatagaaaacatcatactcagtggtgaaaagctgaaagcatttcctctaagattaggaatgaaaaagcatactcactctcactatttctattaaacatagtattggaattcttagccagagcaattaggcaagaaaaaaattggaaaggaagaagttaaatggtctctgtttatagatgacataatcttatatgtagaaaaaccctgaagactgcagcaaaaaaagaaaaaaaaacctgttgaaacgatatatgaacccaatagtttcaggatacaatgtaacatacaaaaattagttgcagttccctacattaataaagaactctctaagaaattaagaaaaagatccatcttagtctgtgggcattgcttattacctaaggctgggtaatttataaagagaaaaagtttttttggctcatggcttttccggatgtacaagaagcatggcaccagctcctggtgagagctcaggctgcttccactcatggcagaaggtaaagtgaagccagtgtgtggagattacaaggcaagagagaaagaagagagagctgccaggctctttataacaatcggctctcatgggaaccaatagagaaagaaatcactcaatacatcaagacatcaagaaggacatcaaaccacttatgaggaaactacccccacgatcaaacacctctcattaggcctgatagctaacattgggatcaaatttcaacatgaggtttgtggggacagatatccaaattataaaacgattccacttacaatagtatcaaatacaataacatactaagaaataaatttaaccaagttgatgaagaattggtacactgaaaactcttagacactgatgaaagaaactgaagacaaaaacaagtgtaaaaatattgcacgttcgtgaattgaaagaattgctatttttaaaatgcccatgctacctaaagcattttcagattcaatgcaatctatcaatattataatgatattttttacagaaatagacaaaacaatcctgaaatttgtttggaaccacaaaagatcacagatagccatagcaatcttgaaaaggaacaaagctggaggcatcacactctgtgatttcaatttgtcttacgaagctacagtaatcaaaatagtttggtaccagcataaaaacagacacttaggtcaatggaatagaattgagagcccagaaataaatgcacacttgtatggttaactaatctttggcaagggcaccaactatacacaataaggaaaggaaattctcttcaataagtggttttggggaaactggatactcaaatgcaaaagaataagactggatccttgtcttgcactgtacacaaaaattaactcaaaatgaattaaagatttaaatttttaatttaaaaatgtaagatccaaaactgtaaaacaaagctccttgacattggtcttggcaaagagtttttggatattgacacgaaaagcacaggtaacaaaagcaaaaataaaaaaaagtagaactacaccaaactaaaaacctttttcacagcaaaggaaacaaaaactgagaaggcaacctactgaatgggagaaaacatttgcaactatatatctgatgaagggttgatattcagaatgtatgtagaactcacacaactcaatggcaaaaaaaaataataacaataactcaatttaaaaataggaaaaaggcctgaatagacatttttccaaagaaggcatacaaatgggcaagaagtatattaaaaagtgctcaacatcaataatcatcagggaaatgcacatcaaaactacagtgagatatcacctcatgcctgtcagaagggctaagagataaatatctgcaagaatgtggagaaacgaaaacacttgtccactgtaggtgggaatgtaaattggtatagccattatggaaaacagtatggagtttcctaaaaaaatttaaaatagaataattatatgatccagcaagcccacttctgggtttatatccaaaggaaatgaaatcagtatctttaagagatatctgtaccctcataattattgcagcattattcataatacccaaaagatggaaactacctaagtatccatcaatgggtaaagcggataaatgaataaagaaaatgtggtacatatacacaatgaaatattattttgccataaaaataatcaaacctgtcattttcaacaacatgaatgaatctgtaagacattatactaagtaaaataagcaagatatagaaagacaaatagtctgtgatctcacttacatgaaatcttataaaaaggtgaatctcattgcaacagaaagactgatgattgccaggggatggtggtggagaaaataaggagatgttgattaaagggtacaacatttcagttataagttgaacaagttccagggatctaatgtacagaatgggtggtgaagaatgtgtgaattaacttgattgtgataatcactgagaaatgtatgcataaaacaatcacaatgcacactttcactatatacaatctttgtcaattaaatatttttaaataaaaaataaataaaattgtacttccggtttttgagatactgcttattttttatccactcttttttctcactcctttttagattagataatttctattgatctatctttaagttcaatgacttttccttcaacccctcctccattatactgttaatcctactaatttatttatttaatataatacatttctctgttttaaaattcccatttggttcttctttttttttttttttttttttttagatgaagtcttgctctgtcgccaggatggagtgcagtggcgcaatctcggctcactgcaacctctgcctcctgggttcaagcaattctcctgcctcagcctccctagtagctggaattacaggcacatgccaccacacccagctaatttttgtatttttagtagagatggggtttcaccacgttagccaggatggtctcgatctcttgaccctgtgatccgccccctcagcctcccaaagtgctgagattacaggtgtgagccaccgcacctggccaatttggttcttttaataatttcttatttctctgctgagatttcctatctttttgttcatttcaaccatattccctttcatctcttaaagcgcagttttaatacctgctttaatttttttgcctagtaattccaacatgtgggtgattttaagattgtcatctgttgattttctttatccttaagaaagggtaacattttactgggttgaagtaattatggggtttttatttgtttggttgtttgtttttgttttgttttgtcttgagacggagtcttgctctgttgccaggctggagtgcagtggcacgatcttggttcactgcaacctctgcctcctgggttcacacaattctcctgcctcagcctcccgagcagctgggactacaggcgcccgccaccacacctggctaaatttttgtatttttagtagagacggggtttcaccatgttagccaggatgatctcaatctcccgacctcgtgatctgcccaccttggcctcccaaagtgctgggattacaggtgtgagccactgtgcctggccaattatgggttttaacttagacatcgtcaatgttaattgtggatactccagacttggagtccttaacttggacaatgtgttacattgagccaaagagtgctaatatctttgttctcatgggacattaatttggctaatctcatattgaaaaatttgtgctttttggatctcagtgtggactgatttcagtctgccctgtgcatgtgcagttcaggggtcagacaaagacttaagacagaatttatacacacaatatcccatctctgtctctttactttcctatgtttttcctcattctctgacatccccgttccttcccagagttcctacagcctacagagaaagcaagggctttctcttggagttaaattgtcccatgttgccactgcaattggagatgccctcagaaaaagcctcagaaatgtgaaactcacttcatctcatgacatttgcttaatacaaagtttgaacctcctctaatatttctctagtcttatccattctccaaaacctttacagagttgtattgtgttttgttatgctttgcttttatttttggtttttgtccagagtttatagctactatctgcaggctggttgtttttttggaagtttatttctccacacaagaagcaaaactcttgtattattactaatcctgagaacagaaggttacagagaaacagaaaacagaaggctttaaaaaagtaccaagagatacaaataaaaattgaataaaaaacaaacaaacaaaaaactagaaaaatgtctcctgcttctaggagagggctgaacaaaggcagatgaagaggcaataaagtaggtaataagtacatttacagaaatatatgccatcaaataggtaagaatgcaagtaaaatttatatataacaaatacccaaaagttttggaagcagaaaaaatgttagtcaatagttcatattgtctaacaatcaatctgtcacccaggctttgtcacccaggctggaatgcagtgacgtgatcatagctcactgaaatttcaaacactatcctcctgagtagctgggactacaggcatacaccaccacatctggctaattttctattttattttttgtagacatacggtctcactatgttgcccagactggtcttgaacttctgggggctcaatcaatcctccctgcttggcctcccaaagtgctgggattatagtgtgaaaggaaaataaatcttggggcccaaaatcactaagctaaagggaaaagtcaagctggggactgcttagggcaaacctgcttcccattctattcaaagtcatccctctgctcactaagataaatgcatatctcattgcctctttgtcaaggctaatcagaaactcaagaatgcaaccatttgtttctaatctaccaatggcctggaagccccctcccactttgagttgtcctgcttttgcttcaagttgtcctgcccttacgaaccgaaccaatgttcatcttacatatgttgattgatgtctcatgcctccctaaaatgtataaaaccaagttatgctccgactgtcttgggcacatgttatcaaaacctcctgagactgtgtcatgggcatgtgtccttaacgttgacaaaataaacttcctaaattgactgagacctgtctcagattttttagtttcacaacaggcatgagccaccatacctggcctcaaaagtttcaaaaccaacactcttcatcagatcccagaaccaaagaaggaaaaaacaattgaagaatttatgtccacagttatgccaagatttacactaatgcataccacatctcaaagattgaagaactctctcaagaactggcaataattaagtttccaaccaaattatattttctaaattaaaaataagcacacatccaagtgtaaaatttaaaaaaacctgaagctaaagcacattcaccttatagataaaaatatagtccatacctctctattttataaatgcattttcagacttgatgcattataggacatggtaacttcaaacagcaaggaaaaaactcttatttaaaactcagtaagaatataatctctgtaagaaaattatcattttaaataatttcattaaactgttttctcctttgatatacccctggatgtaacactattaggttatagtgaaaaacaccctcaattaactctcaaaaagtatggttccaccattaagctactatgagactttggacaggtcccttcacctatctaggcttcagtttactcatgtgaaatgtgaggctagaacatatggtttctgctttccaggtgtaaaattctataactacataactttatcccttcgtttcatgcagttttatctccgtcttccacttctgtgtcttcctggctggagtagctttatctgtcgtctgaggcatccggggcacaccccatcatttcaggcttagccgtttctaagtcgaaggctgcagtcactgagggcagcctcaaggttcttcaatgatggagaacctcaaggttcttcaatgatggagaacctcaaggttcttcaatgatggagaacctcaaggttcttcaatgatggagaacctcaaggttcttcaatgatggagaacctcaaggttcttcaatgatggagaacctcaaggttcttcaatgatggaaagattcttgtttaatttctaaaaaataaatttggcaaattcctcagatctcaggcccaaagaaaatatttcaggagagatacattatgcctttcacgcaagtgcaaaaaaattaaaaatgtagactcccacacacaatctcaagcaaatcatcaactgacatctgatgttgtcttacctacagagttaagaagcttgtttacatctgtacttcaggtgagtgagataattttgtgaatggtaggttaaaagtaatttcaaatttgagaattaagcaatgagaaatgtgctgtaaatttcaagaaaaagatgctgcaatactgtttaggattctgagaactttagatctatcttcttataaaaacttccacttagaaacaaagaaataaacaaaaaccaggataaacaatacaatgctctttccaacttgctggaattacattcactcagataaacatttattaagcacttagttggtacaaggtgtactgtcctctgtgagacacacactcatagaaaagaattttgtatctgctttagtgagtttataatatgccagaataaatacatactaaaaggcatatatacataaataatataatgcattgcaggaagaggtaagtactatgatagagggacacagaaagtcctgtgcctcaggccttgctccctgcagggcactaagctatttcgaatcacactgcaggaggtggccaactacacagtatgcagtgcatcagtgctatccagggaagaaaagactactacatggttaagagagcctgaaaaaacagaagcagagaggtggacctagaaaactagcagtcggttgaaggtcaatatgttcctacctggaaaatagggtccaactactgggcagaaggccaggacccaagggtgattctgtgcaactgggggaggtgagaaaggagagaaaggaagtgagtattctgctgtgggaagaagggaattccaagatgacaacacagcaagagcttaactatagatgaaggaattctgaatttcttctagtttcccatctcatgatcatgtcaatataaaaggaaattactataaaatgtaataatttctaccagtctacagattctggcaggctaaattaaacctgaagataaggacaaaattacattccagttcctacttacaacttctatcacataaagaggtacttacatagttcatatgtgcaaactgagttgcatgctttctaaatcgttttatttaattgtgaaatgtttggaattgggtgtcactggtcttcattttgttttgaaaaggcaatataagtgaattaatctatcatcaggctaataacaagaataagtattttaactccttcctttgaaatgaaaagacaaattctttagccaagagcttccaagtttaatttacgattcacaaaattctacaaacataaattatatagtagaagtttcccttattcttacttgaatataactctaatcatttgaatatcagttttaacaaaatgaataagagtacaacagagttcagatgaagctcgtttcttgccaaaatccatatgaatgccaaataccttccaagcacaaataaatcctgccttccatttaaacaaacaaacaaacaaacaacaaacaaaacaccacattgcctaagattgggcaatcactactaagtgactactaagtagtgagtaagagctaagggaaacggagcgaactttaggtcaccagggcacggtacactgaaaaacatgtgctgcgcttcttcagaaacaagctacaacagcagaaagacgaggtaccttatatcttgtttataaatcttactttataaaggagaaaaaaatgaaaaaagggaaataatattcccttatatcctattttgtgctaggcacttagacaatgttttattatttaattgaaacttgagttcaatcggtagcaggagcggcgagcggaacccagagagccctgagcagccccaccaccgcccccggcctagttacagtcaccccagaaggagccacaaccctgcagccagcaggtcaccatcacagcaaccacaaccctgagcaaagacgccaaggcagccaaccccaagccggcaccacctgcagcggcgcagggagcagtggcaagggcgacctcacaggcggcgcctgctgatggggataagatcaccgcaaggaagattttgggaacagtaaaatggttcaatgtaagaaataaatggtttcatctatgcgaatggcaccaaggaagatgcagttgtacagcagaataccatacagaagagtaaccccaggaagtaccttagcagtgtaggacacggagagactgtggagtttgatgatgttgcagcagaaaagggtggggaggcagtaaatgttacaggcccctgtagagtccagttgatagcagtaagtatgcagctgaccttaaccatcattgacgctatccatgtggtcctcaggcaattaccagtagaattaccagaatagtgagagtggagaaaagaacgaaggacgggagagtgctcccttaggctcggcccaacaatgccggccctgctgcaggcgaaggttcctgccttactacaggcagagaccctacggaaattgaccaccatattctaaccctccttgcagggagcagcgacggagggtgctaacaactggggtgcaggagcacaaggtaggccagtgaggcaggatatttgtatggtttatagaccacgattcctcagggaacctcatcgccaaagccagcctagagaggacggcagtgaagagagtaaagaaaatcaagatgagacccaatatcagcagcgacctcaacatcggtgctgctaaaaccccaattatctatgtagactcccagaaaaccctaaaccacaacatggcaaagagacaacagcagccagtccaccagtcaagaattctgcacccgaggcagaagaaggttgagtaaatgccggtttaccatctccaccatcatccagtttaatcatccaacaagaagaaatgaatatgaaattacagcaatgagaaatgcaggaaagaaatgctgaagaccttaagtgcttgctttttgcccattgatcagaaaccagaactacctgcattatctacgaagcatggggtttttaaaattatttttacctacagacatgtctttttggtaataacaaaggtttttattgttgttgtttttgtgtgttttttttttagtttggtttttctcaacatgcctttaaaagcttttaaattggttcatatgtcaagttgagatttttaagcacttcacttttaatttgtaataaaagtttacaacttgattttttcaaaaatgtcaaccaactgcaagcacccattgaaagtcttaaataatacaaaaactttaaattaaatcaaatgggtattaacaccatataatacaaaaaagaagtgaggttcgaaaatccttatgcttttgtgatgccacacgtcacctaactggtagcacaacttgattgcaatctgactctgaagcttttcttcattcctagacatcctatttttgttgaagtcctagattttaaaagtataatttttttaggaataaagatctggtaggcaggaaattctgctgaagctgtttctgggcaacttgactttgccagggcctttgcactgattgtgttaatggccacctcctcttcagatgtagggttatggatcacctgtaaccacctgtaacctgtacagcaagctgaaggagtgtttgcctaatatccaatccacagaatttatttcaaaaatggtgagcctcactaaggtgatagcagtagcctgtccacaggctgatcaacaaaatcttgtctttgatccatggtttctgcttcttggagtctcccaaggtacattctgccactgctggacctagaatcatagtctcctttcctaccagccttctcaccctgccaaacttatcatatacaattgtttgacatcacagatattatcaatccctaggcctctctagctttctgctcttgcaatttcttttacattgtctttgtcacccagcacagagcccatacataagtcatcactctattttcttagaaatactttcagttcacttcttggttttcctatctcacttaccaagctgtcttagtacagatctaagatgagaattttagtacaaataatttattttggaaacaaccccatgaaacactggtaagggagaaaggatggaaggcagaaaagggaaataagatagaatgtttgcaaagataaccatcaatagttcctcaaagccttgctctagcatgctgctcttcccatcaagaggcagagtttgtttcccccactcttgaatctgcactgaccttgcaccctttttttgaacaatagattgcagcagaagtgatgctatgctagttctaagccaaggctgcaagagtcctggcagcctcttcttttgctttccttagatgcagataccatgtaaagacgctcagactagattagtgaatgatgagaagcaatggggagagacaggcccagacagaccccagccattctatacattgcactgaggcctaaaacccataagtaaagccatcatagtcattcctgacccagacaggcttccagtcaagtgcaactacatgagtgacccaagctattactaatctaagcctgggcaccccaaagatttgtaaaaaataacaaatctttgttgttttaagtccctgtatttgggggtagtttgttacacagccataaatgaaacagggacaaagccaaaaaagggtacaattattaaacaagttactgctatgggaaatgagtttagtccttctgggatactctggaaaacagtaaagaacatgcctcacagttatcccatgtgaagggtaaggatgatagtgtaatccacccacttgctaacagttatttgcttaagtctttttctagtgacagtaactatttggtactttaagcctgcccaacactgtgagccaaatctgctcagcagccacacacaaaaaatgccttcaggcagacagtcacagtatcaggaataagcagtcttctgtgacaagaggtgagtggtggaaggaaacaggaagagcgtcaacataggtgaaaacccaggcctagagcagtccagctatctgctttctccactcctagaactgcaacagctaaagtgggtcacatacactcacagattataaccactacacatctacagctcccaaacttagctgggtcccaaatgttacttaataatccttccaagtttccctaatcatctgtttactttagtatattttacatctatttcaaaacttcccacttttattaaatcttctattccacctacccctcccccttcggtatcagcaaagcaatatgctctctatcccaatgagaaaataaaggtcatcagatcaattttttgctacctccattgcactgcattcagaatcatccttccttccttccctactaataccacaggaaagggtcaaggtaaatgcagcattaatccagcacctctccatctctggaataccccaccttagaatacaagaacccattatgtacttgcccttttctgtctctcttaggtccctaatgcatgaatctcatcgagttatagatctgttgaaaccctacacctatggatctttgcaccaagcattgttcctactgcctaaaatgtaccttccccaactttccccatttctagactctgccctggcagagtcctcttcatcttttagacctccacttacctgcgacctcttcaggaaagccttctttactttgctgcccacgattcctcaaatctatgcttacctctgccacagcactttgctcttttctgaaatcgctcattcctttttctgatatccttttcctcctcctttacctcccactgaaaataagctcctccaaatcaggtatttgccttatatatttttgaaccatagtatctgtgcctagaacatagctgtggattaacaaatagcaccaaatttaaataaattaattaatcatctcttttccttaagttactttccagagtaactttagtggaagctgcaggcaagatttatgtgtactgtggcccttcctctttctatctttttttttctttttaacattctaagaggtatcatacaggtcatgataaactgagtctcttctaaatttgcatatagtgaaaaataacacgtcaaaatgcatttgcttagaagctcaggaatccattgttcagttaaaacttgttgccttgttataatgttatgacaaaataggcttccatactggcttttaacatataattgttaattatcatcacaaaagtttcaaaatttcttcagttttaaaaagattttcataagtaaaaatgcatacagtacttgtatactcacagtgagcttatttaataatatgtttgtagaatgtaaaatagctttctgttttatggtcagatttgataggcctatcaaaattggtttttatagatatgattgctactttcatcaaaaaatgaaccatcaactttaagagaaatgaaaaaatcaatttgggtcatggtaacttctaagccctactacctagtcctagaatttgttcttaatagaccagactgtctgcaaaatactttgaaacaaagaatgtgtactttgcctcctccctaccatgttcttggcaactagggaatatgggacattttaagtctttaagataaaattaatcacactgatttagaacaactaaaatcttgtcagagtaattcctaccttctcccttccccaccatgttacctttaggaagaggagacacacttgaggaagctcttcaaggctggtcttcagggaaataaagacattgaaattccactccaattattttttattacctgccaccttgaatccagaatatatgttacattatgaagtgtcgtattcttgactcaaaacatccttccaattaagattttcttttttaaaaaaaattaggttaaagcaaaaatgcagaaaagaagggtaaataagattagtaaaccatctgaaaattactgcattttgtaaactttggtaaaatgtatgaagaagcatgttttccagtctgctttctcggcctgtggatacctgggacataattcagtttgccatcccctgttcccagatcagctcagtctttgttcagctccatcttcaatctggcatataattacttcttcagctcctgtgctatttggttttaagcacctcttacccccaaggcctcatggctctaagggcttgttgaatttaaacaagcacatttaaatctttgtctttaaatgagtaaaataaaagtcttaacacctaacacagagtactcttctacactctaaatgtgcatgttataattgcctaccagatcataatgagcatctatccatcctcaaaatcagagaaaggggggctcattctagaggtaaatttacaataaatggctttattcttgattagctatgtgtgtttggggacacagagactggcacctgcataatttaaatacctgataggaatcagatgatcaggacaccttggaaataaaggtggaaaaacaatagtggaggaaacacaataatggaggaaatacagaagaaaaaaaacaagattgttaaaagaaattaataaaatacaacttaaggaattttaagcttcacctctcattggaaaaacactgcaaactcatacacacactgatgcatgcacacatgcatgcacgcacacatgcatgcgcacacacacgtatgcaatataattacagaaatgttaaaactgtctgtctttcctgagagtcaggagatgtggattctgccactactgctgctggcaaatcataaataccatccagggttttagtttagcctgagtaaatgagtaatcattacatttgttccacatacatactttactccaaacactggtagataagtattgaatgagaccctcattcaaatacacggtcaaaaatgccacaaaaagaagtattataattataactattaattataagtaaagttttttaatgaatggataaattagtaaaacaaattttaatagatataaatggaaaacaaagcatgtgcaatctcactagtgatgaaggtaatagaaattttaaaagtgagatactagtctttcacctatcagatcagttaaagtcaataaaagaaaaattcagtgttggaagaggcactgcagtgggagtgtacattagtaccattaagcactatgtatcaagggcctgaatcatgattatgtactgtgccagtttgggtcctcttgtgccaaggtgaattgggtatgtgagataattatttggggtagaatctatacatgataaaggggaagaggtgtaggtaaggagagcactcagactatgatgcaattctgacatctctgaaaggagaaaggcaaggaagcatttggtaggaagagatctgcatgcaggaaagtcctgagaaagtctcagccagggttggttccaagtctttgttattgtgaatagcgctgcaataaacgtatgtgtgcatgtgtctttatagcagaaggatttataatcctttgggtatatagccagtaatgggattgctgggtcaaatggtagttctggttctagatccttgaggaatcgccacactgtcttctacaatggttgaactaatttacactcccactaacagtgtaaaagcgttcttatttctccacatcctctccagcatctgttgttttctgactttttaatggtcgccattctaactggcttgagatggtttctcactgtggttttggtttgcatttctctaataaccagtgatgacgagctttttttcatatgtttgttggtgacataaatgtcttcttcttcttcttcttttttttttttagatggagtctcgctctgttgcccatgctggagtgccggggcgcaatctcggctcactgcaacctccggctcccgcgttcaagtgattctcctccctcagcttcccaagtagctgggactacaggcgcatcctaccacatcctgttaattttttgtatttttattagagacagagtttcaccatgttagccaggatggtctggacctcctgacctcgtgatcagcctgcgttggcctcccaaagtgctggaattacaggagtgagccactgcggccagccgtaaatgtcttcctttgagcagtgtctgttcatatccttcagccacgttttgatagggttgtttgttttcttcttgtaaatttgtttaagttcctggccgggcacggtggctcacgcctgtaatcccagaactttgggaggctgaggcgggtggatcacaaggtcaggagatcaagaccagcctggctaacacggtgaagccccatgtctactaaaaacacaaaaaaattggccggccgtggtggtgggcgcctgtagtctgggactacttgggaggctgaggcaggagaatggcgtggaggcaggagaatggcgtgaacccaggaggcggagcttgcagtgagccgagaacgtgccactacactccagcctgggcaacagagtgagactccatctcaaaaaaaataaaaataaaataaaatatttaagttccttatagattctggatattagccctttgtcagatggatagatggcaaaaattttctcccattctgtaagtcgcctgttcactctgatgataatttcttttgctgtgcagaaactctttagtttaattagatcccatttgtcattttggcttttgttgccattgcttttggtgttttagtcatgaagtctttgcccatgcctatgtcctgaatggtatcacctaggttttcttctagggtttttatggttttaggtcttacgtctaagtctttaatgcccatcaatgatagactggataaagaaaatgtgccacatatacaccatggaatactatgcagccataaaaaggatgagttcatctcctttgcagggacatggatgaagctggaaaccatcattctcagtgaactaacacaggaacagaaaaccaaacaccgcatgttcgcactcataagtgggagctgaacaatgagaacacatggacacagggaggggaacatcacacattggggcctgtcgggtggtggggaagtaggggagggatagcattaggagaaatacctaatgtagatgacaggttgatgggtgcagcaaaccaccatggcacatgtatacctatgtaacaaacctgcaaattctgcacacatatcccagaacttaaaagtataataaaaaaaaaattctagaaaaagaagttgcatctgtactgaacatgtacagagttttttccttctcattattccttaaaccatacaaaaaagaaagtctcagccatgttggtagggagtccctgaaccagagttacccattagaagaatctagtattgggcagaaatgtccccgttctggtattcctgacatgttcagtcactcggtggaagcagccccaaagaaggatggtttcagggtgaatgttgtggtggatccacaggtatagcagctggaggctgtcaattatctatgctctctacaaaagctcctcttgaaaacagagctgagaaagacacttgtatacatatgattttattcccgttctaggaatctatctcaaggaagcaatctaaataccaaaataataatgataaagagctttatgaacaaagatgctcatcgcagtcttttaaaaaataattgaaaggatagaaacaatttaaatgtccaagcataaggattgattaagcagctatagtatgtctactttaccaaaaatgctgtggctattacaatggaaaacttatattttaagtaaaattgaaaatagagataaaatatggtataacttttaaaattaaaagctttgaaaagatacatattttaagactggcagaaaataaaccaatatggtagtaataggaagtttttttgcatttttgaattttccaaattttctttattaaaatttatgacctttagctgagggaaggaagcattcaaaataaaaaggcaaaaaagcaaaatagttaaaatgatttagagtcgaagtaagcaggggaaatatgaagctatagaagagaaaacaaagaagacaataaaaatatctgaagaatactgtcttaataattctgggactaggtgtggtggctcactcctacaataccagcactttgggaggcccagccaggaggattactcgatgagcccagagttcaaggctgtagtgagtgattattgtgccgctgcactccaggctgggtgacacaccaagacccagtctctaaaaacaaattctggaaaacagcttcatggctccaacataacattgaacaaagccaaagatgggaaaggaaaagggaatgtttttattttcattgtagcattgggtttttaaatgaaaactgatgtttcatatgctcttctatgactattcagtataggtgtttcaccatcattgtaaggagtatcttctgtgtatgtaagtatgtgttcactagtgcattcattttttcaacatgtgattaaacagtttgagagtcaccatatgccaggtactgtgcaagcaaatcaaaggtcacagtgtaaaatgagaaagggtatgttttggccctctattctagaattgtttatagaaagtgcataatttaagcccatatgtcccatgtcctaaagatacctgtccattaaatacagtgcatttcattgccttttcagactctcttcactatgcacataagtgacaatgtaattgcaatttgattaattcatataaactaagaaaggaggaattattcattcatttctgatttttttttttttggaaagtatcccattcctactatagtttgccaaaccctctcagggtagacctctatttacttaaaagaactagtttcatagattgctgtcatgcaccctaattagacaaacgtgttttccaggtctatttgaaggacattctgatataatgcatacctatcttcttaatcttcttattcagcttatgcatatttcttttcctttaaaatccatcaataaatgatctgtgatctgtaagtaattaatttaatgattacatgaattaaaataatgcacattgctttaaaggagttagtattttcggtttatgttacaatattggccttgggtaaatatcatccattgcctgaatttcataatggttcaaggataaaccatttcctctttataattcagtaagtttgttccaaaggagcctattgctcctctactcaacaatgaaagaaatgcattcagggaccttaggttgcctattcttaataagatggaatcctttcccggtttgttaaattcactgaatttataactcattgttactgatgaaggaattaatccaagcccgttaccagattgatctcctaaaatccacagagcgaatttggtgtcatttttaaaaagaaataaaataacaaaaataaaaatacaaaggatgtcagtaagttacagacaggagggcatacctcatatttatcacctggaaaactagagaaaagtttcatcaaaactgtttcatgcatctgtgcagggctaaagtcatctgctaatcagcactaataatgatggggataacaataataatctgctacctttacataacagtttttaccttgggaaaagattttcacatactactcttcatttagttcttataatgactttgagaaactaacataaatgttttacaagtcccattttgtgaaagagaaaattagagtacaaagaagagactgacccaacaataacatttaactggagctagactcctacttcaggtttttaaaatgctttcaaatcaatagaattcatgatttgcaatgttttcctaaattctgttaaaacacacttaggaccgtaaattttcaccaaccataacagacacctggtaagcgggcatgtaataaacaattgagatgttagaaaaaaagatatgtctctgatgagcagggcaaaagtgaatgtaagtcaaaagatatctaaagactctatagcttctggaataataaattggtagttttctttatttttcatttgttgtttcagaaagtgtttaacttttgatactaccaccaatgtaaaatataatagattgttagtaacaataaatcaatctctacgttgtccaaataggtgtgtttacccaggtccacactgttcaagttttattaaaactgtttcgttttatccaggtttccagtattgcatctcctaagacaaacactgatatttatctgctgatgcttgttttactaaccaaatattacattacacatggtttatcacattacccagggaggtgacaatatttcaggaaaaaaattaacaaatcaaaataactttgaaaactgtttataccccatgtacaaaagtactgtctatgcctagttattcactactatcacaagatatacataaatcagagtttttaaataatactgacttccccttataaattcctttaccccttgtgaaaggaacctagcaccattatgacacagttaagcattagtcacagtttaataaataatttcgttatagcctcctagtctatcagtattatttggattctcagaatgcatgtaatcatgtaaattacaaaatttcctttgtatcagggataaccaactgtcttttataaataatgttatttttggtgatttttcaatatcagaacagtatagttttggctagagaaattactataagcattcaaataaagattaatcaatttatacaaggcaaataaactttttgtactcttaaatacttaaagaataatatatacattcaaatatttgtaagaaattcatatagaggggagtataaaacacatatggaaaaggaggtatgtctgcagaagttactttgtaaagaaacatagtgctcaactaccaccctccctcaaatatcatgtcaatcaaattagcatcataagaagaactccagttctactgtgatagagtagcttatatcaaatcaccccctcgttgagaaaaactattaaagatgaataaaatgaaattattttaaaaactgtttgaaggcaccaggcaccaaccaaagtaatttcaatttaaaactcaatagtctataaaggaagtaaacacgttaaagtaagccctatgttgtttattacttttcaaattcaaggcatttgctgtttcctaagtagaacagaatgcgagactgagcacaaagctccagattagaacattaagaagtcttgtaaagagaggagggcacaaataacactttggagctgtcagcacagccaagacatgaagaatcaagatcctggataaactgtaaatgcaatgaggtgaggcctgtattctttttccacttttaacccctaaaacatttccagttcctctttcttggagtgagaaaatcaaaagagaaacaagcagaaaacagcaacctaaatactaggacattaaaaagaatattcagtagtcttataccaacgaagcaaaaactggagtttagtgactacttgaaaagcactccaaaattttatttgaacctctaaatgactatttataaaactaagggaaaaccataactagagtagccatcacaaagatggaaacccaacttcaaattgtcttaatccctgataagattaagtaaattacctttattctaataatctgtgaggagaaaattaaatccccatggaaaaatataataccatacaaaacactctaaatttttaatatgaaaaaatcatcaagcatgctaggaagtagaatcaaagaaccaaaacaaagagaaaaaataatagacaaaaacataaattcaaaaatgatacagattaaagaattatcagatatagtcttttaaaaacagtgataaatatggtttcagaggtaaaggaaaagagtgagaataatcagagaactgggatttatattaaaaacccaaagattattctagaactaaaaataaaacaaaattaataactcaatcgcagccagttagacacaacagaagatccaagttgtgaacttgaaaataggttaatagaaaatatccagaataaaacaaagagagaaataaggatgataataaaagaagaagcattagagatatatagaacatggttaaaaaatgttttaacatacaaatatctctagtcccagaaggaaagggtaaggagaataggcagaagcaaaattcaaagcaataatggccaagaattttccaaaattggcaaaagcatcaagccacaaattcaagaatgtctaagaaccccaagcaggataaacacaaagaaaccaactacaaaaaaaaaaaaaaagcctgtttgtaaaactatttaaaaataaacaataatcaaaaaggcaatctcaaaatagccagaaaaataaaaatgcattactttgtaaggattagtaagtctgataactgattgctcatgaaaaacaattgaagccagagaacaaagccatgatatctttaaaatgcttttaaaaagtaactaccaacctaagaaacccaaacaacagcaaaaaactaaataacctgattaaaaaatgagtaaaagatctgaacacacatttctcagaagaagacataaaaatggtcaacagatatatgaaaaaatgctcaacgttactaatcattaaggaaaagcaaattagaaccacaatgagatcacctcacacctgttagaaaggctaccttcaaaaagttaaaagacagtaagggttggcaagaatttggagaaaatgaaactctcatacactgttggtaggaatgcaaattgggtacagccattatgaaaaacaatatgaagattcttcaaaaactacaaatataactaccatatgatccagtaatttgacttcaggatatatatcctgaggaactgacgttagtatgttgaagagatatctgctctcccacattcatcgtagcattattcacgatagctaagatacggaagcaacctaagtggcatcagcataaaaacagataaagaaaatgtgttaaatacacacaacagaataatattcagccttagaaaataaagaaatcctgtcatttacaacaacatacgtggacctggaagatactatgttatgtgaaataaggcagacacagaaagacaaatactgcatgatctcacttaagtgtgaaatccaaaaaggccatagatacagggagtaaaatggtggttactagaggctgagtgttggatggtgatgaagaaaggggagatgttattcaaaaagcacaaagtttcagctagacaagaggaataagttttagagatatactgcacagcatgatcactataatttataagagtgtattatatattttgaaactgctgaaagtatactttaaatgttcttaccataaaaacacgataattatttgaggtgatggatgctaattagcttgatttattaattctacaatgtaaacatatactgaacatcacactgtatctcataaatatatataattgtcaatcaaaagtaaaataaaaataaagcaaaacatatatatacacaaaaaagtaaataccaacgtagaattctctaaccaatgaaagtattcttttaaaaagtcaaaataagaatattttcagaaaaacaaaactgcggaaatatttcaccgaaagattcatactataaagaatactaataggtatctttcaagtaaaaggaaaagcatctcagacaatgatagagaaatgcaaaaaataaagtacacagacaagattagtatgcgtataagtatagaaaaataataaaaataatgttttaggaattagagcacttgaagaattataattcaggacaatgataagacaaaaaatgagagagggacaaatataattattcattgaaaagagataaaaggtgtaagttacagtagagctcattagggtaaccactaagaaaaattaaaaatacgtaattagcaagttaaaagaggggcaaatgaaataacaaggttgattaataaaaaaagttaagacagaagaaatgggaaacataaaattggtagaaaaaatagaaaagtacagtaagatgatagaattaaatcaacaaatattagcaagtgcagttaatgtaaatttaaaaagttgcattgaaatacaatgtcagactttgaattaaaaatcaccattaataatatgctatttgcaggacacataccttaaaagtaagtatacagaaaatgtgaaaggaaaagtgctaaaaaaaatttaccaaacaccaacgaaaagaaggctaatatcactatacattataatatcagtctaagtagaatgaaaagaaatagtacaagaagagcattaaataatactagttaatctactaggaagatatcacagttccaaatttgtacaaaccaataacataagcttaaaatgtacaaattgaccaaactaaaaggtgaaataaacaaatacacaatcaagttagaaaattttgacatatttctctcagtaaatgatagaacttggtaaaaagttggtagataaataaaagttttgaacaccaagatttagcaaatttgatctaatttatatgtacagaatcctgcacccaatagcaacaaagtacacatatttgcaggtgcacatagagcatgcaccaaaagtatccttaaactgagtcatatagcaagcctcaataaattttcaaagtatttatatcatatagaatatcttctctgaccgtaattgaattaagctcaaaattaataacaaataagtattataaaatacatcaaatactttcaaataaagcaatagataaacttgataaaagtcaaaaattggggtcttttggtaaagaaagacaaatataagcagtagtcttctagaaacacaaatttcaaagatgaaaaaggacaaataaccttaacaggaatgaaaaaatggagtattgttacagatgctacagacatagtacaaagataataagatctggtgaacaagtttacatcaataaacttgaaaaaattgatgaaacatataaatcccctgaaaaacacatattaccaaaatggacacaagaagaaatggaaatccttcatagtactacgtcttttaaaagacatgaatatttgatttggaaaactcttctggacactggtctagagaaagaattcattaataagacaccaaaagcacaagaaaccaaaacaaaaacagacaaatggtacttaattaaactaaaaagcttctgcccagaaatagaaataatcaagagtgatcagatgacctgcagaatgggagaaaatatgtacaaactatcaatcagacagaggactaacatctagaacttacaaggaactcaaactaaataacaacgacaaaacaaataatcctatcaaaacgtgggcaaaagacatgaatagccatttttcaaaagaagacatacaaatggccaagaaacatataaaaaaaaaagctcaacatcactaatcaaagaaatgtaaattaaaatcacgatgagagatcatctcagactactcagaacagctattacttaaaaagaccaaaaacagcagatcttggcaagcaattgcagaaaaggaaacgcttatacactgttggtgggaatgtaaattactacaatcactatagaaaacaatatggagatttctcaaagaaccaaaaatagatctactatttaacccaacaatcccaccattgggtatatacccccaaaaagaaattattataccaaaaatatacttacactcatatgtttatcacagctctagtcacaatagcaaagatatggagccaacttaaatgtccatcaatggatgattggattaaaaatgtgaaatatatatgtaataggatactatccagctataaaaaagaatggaatcacatcttttgcagcaataagaatggaagtggaggccactattgtaagtgaaataactcagaaacagagacaaatgtcctatgttctcacttataagtgggagctacctaatgtgtacacattgacatagagggtggaatgataaacaatggagactgggaagggtgaggaggaagggggtggatatgagaaattatttaatgggtactatgtgtgttattcaggttatgaatacactgaaagctctgaattcaccactatgcaatatatctatgtaacaaaattacaattgtacaccataattttacacaaataaaagataaaataaaaaagtctttccacaaaactttctgactcaaatagtttcacaggtaaattatttcaaaaatttaatgaaaaaaaaatagcaccaatcatatacaactcttccaagggtagaaatagagggaatacatccgaactcattttatgagaataatataactatgcaaagaaaacctgacaagaacattaagagaaggtaaaattacaagctaatctctcttttgaatgcaaatagaaatatcttaaagaaaatattaagaaaatcaaattctctatgaaaaggataatataacatcaagtagggtttattctaagaatgcaagggtggattaacattcaaaaataaattaattaaataacaaaaatcctatgatctcaatagatccagaaatgtatgtgaatattccttatgatttaaaaaaaaaacaaaacagacaacacagaaacacacataaaacaacaacaccaactcagcaaactcacgaattgaagagaaattctctagtggatacaggaaatttacaattttcaaaaaagcaaaaaccaaacctagaacaaatgttatactagtggtcctagctagtgcacacaagtggtcctagctagtgcaacaagtcaaaaacacttataaattaaagttatatggaatgaaaaggtagaaataaaactgtagttattcacagaaaacatgactgtgttataaaaaattcaaaagaacccacaaagtctaatagaattaataagtaaatttagcaagattcctggccaaggtgaatctctctctctcctctctctttctgactctctctctctctctgtgtcatagatagatagatagatagatatgaattgttttcttatatagtaacaatacacatttagaaaataaaacttaaaatgataccaattacaagagcattaaaaaatctaattgtagaaatgaatctaacaaaaagtatgcaagtccactgtgcagaaaactataaaatattactgattaaagaagaataaaataagtatgaattataatgcatttatagattagatatcagtattcccaaaataccatctcaatcaaaatcccagcaaattacatattgtagagattaacaagcagattctaacatttttatggaaataaaaaggaacaagactaactaaaagaatctaaaagatgagcacagctaaaagatttacactaccagatattaagatttcttctaaatgttcactacttagtcatgcatcattgatgcaagggtaaataaatagattcctggaataagagtccagaaatatgtccatgaatatgtaggcagtacatttataataaagttattgctaacatactcagggaaagtatttttgacaaatggcacttgatcaattttttaaaaagaaaaaatgaatcctgtccatccttgcccccatctcacacctaacacaaaaaaatgaatttcaggtaaaatgcagacctacattttaatggcaaacaataaagattctagaagataacaaaggaaatgtctttatgacattaaggtaggcaaaagcttttccatttttttgtttttgttttaaacaggatagaaaatactaacactaaaagaagaaattgatcattgaagtgcattaaaataaaaaacttttgtaaccaaaagacaactataaggtcaggcgcggcggctcatgcctgtaatcccagcactttgggaggccaaggtggccagatcacctgaggtcgggagtttgagaccagcctggctaacatggtgaaaccccatctctactaaaaatacaaaaattaactgggcatggtggcataagcctgtaatcccagctacttgggaagctgaggcaggagaatcgcttgaactcaggaggcaaattttcagtgagccaagatcgcaccactgcactccagcctgggcgacagagtaagactctgtctcaaaaaagaaaaaaaagacaattataagagagtaaaaacataagcttcagaataaaagtagatatctgtaataagtatatctgacaaagaagtatatatcagaatataaaatgaaatcccagtaacttaataataaaaacagaaacaaacccaactggaaaatggacaatacctttcaacatgcacatcacaaaagaggatacccaagtggaaaataaacatatgaaaagacgcttaatttcactaatcattagagaaatgcaaaccaaagccatcatatcatgggctaccatgtcacacatgcctgaaaaactaaaatgaaaaaagaccaagtgttttcgacgagtagaacaataggatctctcttatacagtagtccccctttatccatggggaatacactccacctcccttagtgaatacctgaaactgcaaatagtacccaatcctacaaatactatgtttttttcctatacataaatacctatttaagatttaacgtatttatacctatttaagatttaatttatttaacattaatgtataaattaggaacagtatgagattaacaacatacttaatcataaaatagaacaattctagcactatactggttatatgaatgtggtctccctccctcctcttctctctctatttccctctcaaaacatctttttgtacttaagggtgagcccttcttgtgatgatatgagatgataaaatttgggctgcagctgactacggataactgaaactgtggaaaactgaaatcatgaatcaagtgggaggggcattactgtgctgctactgatcatgtaaattggtataataacattgaaaattatttggcactatctactaaagctgaacataagcacaccagcaatatcactcctcagcatatatccaataagaatgcttaaatatgtaaaacaagacatgtagtagaatatgcatgtggccaccacaattcataatggcttcaaactggaaataagccaaatgtccatctatagtagaagagctgaaaataataataatagaattgtgattatattaatacatggaaatattataaagcaataaaatagttttaaaatctgcaagcacatgtaaatgcaacataatataaatgaatctcagaaacataatgtgagcacaagaagccacatacagaagaatatataatcacatgattctatttctatatttttcaaaaataaactaatattagaagtcatgatagtggttatcctgaggaagtagagactggaaagatagataaagggatctttgtggtctgctaatgtttttttattggtctggtgctgcttacatgaatatgttcactttgtgaaaattcacttacctatatttttataatttctgaatttgtaactgttttcctgcactaaaatatttcatttaaaaattatctttaaaaacaattgcgaccataagaatttccattgcttttgtttttttttctctgttttcctgctacttagccttaaatatgggcatagtcacagaaatgtgcatatgaggtaaataaagccccagcttgctggctggaggacataaaggggagctccaggaaaactaaaaaatactaatgagagcacagagaaaaaggggctgcagaaagtgatcttatagggttacaaaattctgggctcatctttagctgtacatgcatggatctgatgttaatcagcatatgaatacaattaagaatgaaattaacagatagaccaatgtctacatccaagattgttcactggtatacacacaggacagacctgaaaagcaccgtaagcaaaactgatattgaaaccacagaaggaatcttgtatcttacaacctgaacctaaccaggtcaattgccttttaaaacaaaaatgtcaacattctccatagaatttcaatatgactcagaatctcataacatgatattaagaatatctaagaaataatcctaaatcaccaggcacaagaagaactaggaacatgtgaactcatatgagaaaacataatcaatggagataaaacctaaaatgacacagatgttggaattgtttgacaaaaactttaaatttactattctaaaaatgctgaaacaagcaatgagaaacaggcttaaaactcaaaaataaaattttaaaaaaatacaacaaaatatcactggatggtttccaacaaaataaagataatacagaaaacagtcaataaactttaagatagatcaactgaaattatgcaatatgagcaataaagaaaaaaagtggctcagaaacctgtgggacaataacaagaagtctagcattcatgtcattatattaacagaagcagagaagaaagagtgtgctatgtgttgaatgccccctccaaatctcatgtggaaatttaattgccattgtaacagtgttgagtatcaggacctttaagaggtaagtaagatagactaatgtcattaatgtgggagtttattagttatcacaggagtgagttgttgataaaaagaatagtttggcccagtgtcctctctgtcatgtgctttcttgccacatgatgccttccatcatgagatcacccttgttagatgctagcatcatgatcttagacttctcagcttttagaactgtgagccaaataaatatgtctgttctgtattaattatccaatttctggtattcttttatagcagcagaaaattgactaagattataattctgaaaaggtatttgacaaaatagtggctagaaaattctcaaattctgtgaaatacataaacccacagagtcaagaagtacagcaaaccccaaacagaaaaaaaaaaaatcaatctctggatacattaaaatagaactgctggaaattgaagacagggaaaactgtcttgaaagcatccagagaaaatcacacattatctgtagggaaacaccattcaaatgactgtggaattctcatcagaaaccatgaaaacctgaaggaaatggcaccccttttttaaaggtctgagagagcacagagaattctatatcctgtataaaagagacctgctctaaaacatttgctgaaaggaagctctccagacagaagacaaatgatacaacattgccactgatataaacactgaacattaggaatgaaggaagaggaaaaaaagtgataaacctatgagtaaatataagaaacgattattcttttgggttctttaaaacatgtttgacaatttaatgcaaaattacaacattatctgacggggcttccaatgtatgtagatataatatatgacaaaacaataatgcaaaactgggagagtaaaaggacttatatggttgtaagatttctacattctatttaaatgtctaaaatattgattctaagaagagtataaaaagatatgtatattgaacaactttagaacaacctctaaaaacaactatacaaagaaatatcgtcagaagaacaatagataaatttaaattgaatgctaaaaaatgttcaaataacccaaaacaaaacagaaaatgaaaaacaaaggaaaacagaagaaacaaacagaaaacaaaatataaaatgaaagacattaattcaaatgtaacaataattacattaaatgtaaatggcataaatataccaattaaagacagagattatcagaacggattttttttaatgacccaattatacactgttttcaacaaatttacttcaaatataatgaaaaaggtaggtttgaagaaaagtgtacgtgctgcaaactccaattataataaagctggaatggctatattaatattggacacagtagatctcaaagtgaagaaacctgccagtgatacaaaggacatcatataatgttgaagagttaattagccagtaatatataataagtctaaatctgtatgccctaacaacagagcttcaaaatacatgaagacataaaaactgacagaactgaaaggtgaaatggaaaaatctacaattatatttggagatatcaacacccttctctcagtaatagactaatatataattagtaaaaacagaactgaaaaaattagcttcataagagagagcatatgatcattcagaaacttaacagcatttaagagattatattccttaccaaatttttaggttaacatgagtaaggttttttgatatagccaactacagttttcgtaagagtaatggttacttcttcagagataagtcatatcagcagaggcagaaagctgagaatgggggaggtcaaatctttgtaagatgtaaactgaaaagaaagttttatagaaatgaatttctgctgatctcactgtgaaagtgcagttttcatacttttatgaaacaggcttgttactttgtttaaatatttgtgtaatccaaatagttttgacttcagttaagctgaatatttgctttaaatatttgtttttaaaccccatttatcaattctttagaatcttatataaaaggtacgtggtacttgcttaggaaaataatcaaaaatcagaaagtggcccttttaataatgtgaaatgattcaacaaacagaaaaccaatattttcttataaaatcagtaaggtggtaggtaggtagctataaaaatatttagatttttactacatattaatccttaaaagaaatcaggtaatgagtctgaaataagtttaatgtgtccttcttatttctattttagttacacacacacacatatacacacacactcttacagatagcaaaatatgctaaataggaagtaaacatggtactatggtatggattagtaagaaagtcctaccttagatagcattatctgagaaagtgttttttactttaagaaggattcgactaagcagtgtgagtttaagtgtcagggccagtgccagcatgcttcaatgagaacactgagaataagtgaaagttgaattgtcactggtttcttctaagctaagataaggtttggggcacctaaagtgcactcaactgcaaatactgttagaggccactcatcttccaagggaagtatcaggggaacataaaacttcattgagttctggctagaacaacatcttatgaagctaggtagattccatgtttctcttgctgataccaaggaacaaaggtaaacaaaggtgtcttcacttgcagctgccattgctgctgacaaagcttatctgcccacagagtggtgaatagtaattctaaaggaaacttcttgtctgccaagtagaactttgaagttctgtgtcatcccatgcaactaccccacaaagagcaggtgaatcctgaggtgaagggcactactgcccctatggtgccctgaaagttggagatcaagctttgagcccttcaccaactcaggataaaccagcacaattagacctcctataaatatgaaagaattctgataactccagctccagagattcttggacaagttactaaatggcagtagacagagacagcatagctgcaccttctgctgtatacctgaacactctagctaaaagtcagatatatctatccatgcactaagtggttgaggatcaatataaacaaaacacagttgcctgagttctgtttacagagcacatacgaaattgtctttttctctccacattgtttgcatcattcctaacccctgaattgaattcacttgttagctgcactgttgtgcaggtcttctgatcttgctttactgacttaatgacaaccactctctaaagactgacaaaaatcacactgtttcttttcacactgcccaactgaagtgggccaagttctcatcatcttagctctagtactcaaccttgaaatcatccacagagatgtcttccatgcaagatatttctcactgtaagggaagatgatggtaagtcatcatcttcaaatagaaatgatagctccaaagaggaaaaggaaaaacaactgccactccatcacctctctgactttggctttctagggaatcagttcttctgggtaaggttaaaccaacaaacaaacaaacaaaaaaatggaggtggggggtgtactttattctgttttgtttttaaagaaatggccacttttcatagatagagcaatataagtggaaaataaccaggaggttttagtgaaaatggaaaaggaaaaggcaaattttgtgacatactaggtctaacaattgtttaaatctaaagtttggtgccaaatagtgatggttttaattaatagatggatctgaaacacccatatatcatgctaaagatttagtattaaatatgttctactactgaaaataataccaaggtctctaacgacaagataaacacatgctatattgacaaaagtatgcaaaaaaatgctaatcaaactcagctcataggagcaggagctgaattgaatgatcttgttcccccaaaataaacttccaattcactactcaggttattttccaattgtcactgggacaacacaacaaaagcaggggacaaagttaaaacctggccttttcagtcaagcaagtggacaaatactcaagacaataacccacaaacaaggaagatgacagcggaaaatcccccacattcagttcacccctttgtgaccaaaccctgttctgcaggtcttctgatgacttagactttaagacagcaaggtagacatcctggaaataggccaataataatcttcaactaggaagacatactgaaatcactagggaagcttttttcaacataacctttccctccctcagctgggaatcatagattagatttaatttgtataatcacttcagtttgaagtaggtggatgacctgaagaaaattaaggtataatggcaggcttgccatcagcaagtacgcatttacaaacattttgacaagctatatctggaaatatcctgaggatccaagaatcttggttaactttatacaactacgataaattgggcactacaccaaaacatgcaggctatttgactctgcattttcctcaatcaacaacatgtaacggagaggcctaatataccaaatcattatcgaacagcttagggatgactcactttgacaggaagagcaaagtgtttcactctcatctcagtgaacctgttcatactgacataatgccacatggttcctaatacgcaacaatgtacactgttccagcaacatagaggcagctttgagcctttggatccaaattctgtgagtgagctgggctagagttttctgtttcccttccctcattatcatggcaacagagggcaaaggtggcagttaggctttatgcctggactgctggcatacaggtccacacctcttccaaaacaaaatttggacaatagttacacatgaaaatgttgtgttctgcttaggttataaggaaactaaatcatactgcaggcaactctttagttattttctcttttatcctatcttcaccagaaaatttaaagagctctaaaacagtgtttctcaaactgtaggtcacactgtcagtgctcttgaaattaagatagtgggctgtagactttaaaggaaagttaggataagataaaataggataagataaagtaggataggatgggatgggatgagatactagaggatagaatggaaaatgcaacacataggaagggtaaatactgtcttatgaaattttgttttaattatatgactgcatgtagactgtgtcatgatttaaatgcatttatctctgtggattattaggaaaatgtatgaaaaccactgccgtaaagaacatctatcttatggccctaacagcatttctctacagaaacactattggctttgtgactgggcaaatctcttttctaagtaatttcagctattcatggcaggatttaacatcatatctttcccctatccactgaattccagtagtgcttccttttcatcgtgacaaccacacattttaaatgctacctaggaggagttatcaccatctagagataaatatgaatccatagacaaaaggttgctagctcaactcatatctgatgagaagcaagtgtttctaagtatccttttgtatctagagtttgtcctccaggatgaatggaggtcagctttgatagctcttatctgggacgtgtacactgttccagctacttattctgcaaattaagtcttcctttcctagcacccatcaatctaatactaaattcattagcaaaatgaaatgaaaagaacacaacatacattgctattaatggaattccatgcatgtcactccccacacattgtactaaaaatgaactcatctccatttgagtgtctctacacaaatatctgtgtttattaatacacagcatttcagaagtgagattttccttaaagctgtaaagccatttgctttgtcaagctcccttttcagggaaaaacttcaggaattttcactatcaatttatgttgattatttactcttttgtggatctgctattctccaggcaaaatccaataaggagaaatcatgattactgtctaaagaatttattttgtaatattttttcttacttcctgtaacttactttgtgtgacagtaataaacagttcataatgctccatctactatcctcatccataaaatctagtaacagttcaacatttaaaaattttttaatgaagacaaaaatcagctggtgacttcctactggagcacaaaattaacacttgcactggagtgggtgagattttcttattcagagcagaatacagtctttttcttacggatttaaaaatcttagttacctttccctagcttgaaataataggcattttgggctgggcgcagtggctgatgtctgtaatcccagcactttgggaggccaaggcgagcagatcacttgaggtccggagtttgagaccagcctggccaacatggtgaaaccccatttctactaaaaatacaaaaaattagccagggtggtggcacacacctgtaatcctagttactcaggaggctgaggcaggagaatcacttgaaactaggaagcggaagaagttgccatgagccgagattgcaccactgcactccagcctggccaatagagtgagagtctgtctcagaaaaaaaaaaaaagaaagaaaaagaaagtaataataggcattttgaagacttcaggagaaatagctagaattcataaattacccagaagtgataacactgtacttagattttcacacataaattttcctattcctggatagtgtgggaccaaactatatataaccaagttttaaggtgaccaaaaattaaaattcacaaatactctgaatgtctcaactactttccttccagaaacccaagaaaaactgaagtgatttctcacttcccctaatgagcactaatgacaattagagatgaacagctaacctcaaacacactaaagagtgtttttaaaacagaataccacacaggttgtataaggcttatcttcaaacattttcctcaataaaatgttaataaacaaaaaaaattgacatgagggaaaagagaattggaatgaagaatatcctcctttacttttaaatgacaaaattaacaaacatgagagaaaacaccatttttaaaatgaaaagatcactcatatgagagaaggcagatcacatagtggaatgtctaaggggaaatccaggtggattgcccactggagtatacagttaaaaaatatccaaaggaagaaagaaaagacattagatatttggaaaggtaagtaactaagtaaataaataaataagaaaaatgatgacaaatttgcaagggacaccaacaccaaatgcggtttttgttttttgttgttttgtttgtatgccaaagagaatcagtcagctagtaacaagtaaggaaattcaaacagtagttgttctaggtcaaaaacaaaagatatatatgtacacacacaccacacacacacacatctatatttatatacatacacacacacacacacacacacacacacacacttggagactctcatgcctcaaatatattttgaagcatacaaatttagagagtctagatttaaaacagtggcaaatacaaaagtctttcttaattaaaaagctagctgcagataagtcactagcatcaaataggtaccaatcaaaagtaaaactgtgctcagaaaaactaacttgttcttaaaatggccattttcacaaagtactgaaagattggcaatgtggccaaattcccccaaaaaaggggtttagaagcagcctttgtaaccaaaggcaaacagtgggaatatgtataaaacaggaagatacacgaaaagcttttgcccacttggtgaattgagcctctctatctaggcttcttgtggcattaaagaagcatctgcaaatgcagtaactagaatatataatctattcagattttcaaaaggcttttgagaaagtttcatagcaataactgtgcaaataaattttgggtaaacatggaattagaaatacatattttcacaagcacaaaactatgttagatataggaagaaaatgtgaagtggaaatgatgagagaatgcttttataaattttgactgtggaattcaaagtgtcaactgcacatatttatatttcactatccttttcaaatagtaaaatatcaaaccacagcatcacggaatcctaaagagctgggatgactccctacgtactacagattaagaaactgagctacagaggattaataattgcccaaggttaaaacatatagacatcaggaagatttcataacgtttacaaacttgaacaaaaagtaccacatgagctcccctatggggatgtgttgagtattatatttcactagtgataaagaatacaaaactgttcacataaatgtggcctttaaaatatggtccctaaacaagaaccttaaaagaattataatacattccctgaaaacatttcaatgtgttctggttacaaagatattcaaaattctagacatcatcagaagtgctttggatccagtcttagggagatccaacatttaatagctatcagaaaaaaatgcctgcaaaggacatagtgaggatatcagaaaaaaatgcctgcaaaggacatagtgaggaaatgacaaggagcataggaagaaaatcaagaaagcatgacgccatgaaaaataagggaagaaagcattgcaataaggaaggagtggtcagcaagatcaaatgctcagtgaggtcccagtgagagttaatttggagaagtgatggaggtccctgcagcagacaaggtgaattgctgaatggattggtgaagaaatggaaatagagagtagaaacatttctttgaagaaatgtgagtgtccttctacaggtaaaaaaaaaaaaaatacatgataactggtcaatctctgaaagtgtgggtccagcggttttaagaggagattcagtattacccaccatactcgttttttttttttaaccataattcctagtcaaatatgtcataagcccaggaaaaggatctcaaaagaacttagaactatcctccttcaatacaaaaaataaaaggcatctggtttgcagtagggttgtagaccttgcaagacttctgcattttggtttaatcagagattttccagaagtctaaaaataattattcatctttgaaaaataagggtaccatacagctatctagctctgtaatccaaggaaaaatcaattatcttaaaagatgccttatgaggtcattgtttcacatgataaaacaagaacattaggaggacaagtctcggttggaagtctcagatcactctaattgttctaattgatgaatcttcttcaaggaaaaaagtgggctccatttctgtttttaaaaatccagagtatctgtagtagtgcaactaatgacaaccttcccgttgttcttgcctaagaggaaaccctataataagagcttcccaaaatgtcaaataatacttgtctcataacagggcttctttgttcattcaccatgtctcttttgatatgcacagataataaaagttcatataaaactaaaggtaatatagagcagaagccaacactaattctgtataaatatgtctgattaataagaatgctattgttatggttatttcataatgtcacgattgttacaagaacagaggatagaagtactcttactcttactgttttcgttcatcctctgtcatccaaccagtttgcaaatttctgttcaacgggaaaaatgaaggatagatttttgtccattaattactgctgttgcataagttagtctcataaattgtgaaatgagcattaaattcagggaaaaattaggggttttattttaaaattgaactccacttccactacaaaaatgaatacatgctccaggcttactttctaagctcccttttccacatgcacagttgctatattcttctggtgctcatgaacacatgaaagatagaatttagcatgatagcactaaaatctaggtaagagcctagtatattaaacctaaactgtggtttaatacaacaaccatacacaaaattgtatatgggatttggttccaaaaattagaaccccaccctggtgaagtaataagtaaccccacccagatgtgagtatctggtcccttactggaaaggaaataaaaacaagtaataagataacagtctacactcactgcagacagacagcccgatagattttgaaggaaattctaaggctggtagataagtttgtattgtcattattttgcttttctctttaaattcttatctcctagatcctggtattcccccttggggcagcagtataatataaaagcttaacagtcgatcttaaatttagctgacatttttatatccttcaaaacataccttttagattgcacccaagaaggagattattaaatagtagcaggagaccagttagtggaccattttgactgaacaaaaaacagcactgtgccttcttgttgacaaaccaaaaaacatttatatagtcattataatcaatttcataaataaaaggctattaatgactgagaaaaaaagggaaaaactgtatttctcccaagtcccttcatcctctcttaaactccatattagtttaagaaagtggaggaagctatgcatgaaaaatagtgtacttagttgagctggagtctcttgtgaaacaggttctgtcagtcagaaggcaagggtacatttctataattatttaagcctagtttttttgtagtaattagccagagctccattttgctgaagctggcatcactcacagctcacttttttttttcaatttagacttttcattcctttttataaaataaatttacatattttcagtctctcaatccctcctatgttttatttatgaatatagcccttcttgatggtaactctaatgtgaaagaggtagtaattaatgtcccaatctgctaggttaatccctttccacactctctatagagaagtttaaggtaagtaacagtttacagtcaatattaggtttaattatgcttaatgagagttggtgtctctgtttactaactgcatttaggtgtgtggatcctagatgaattttcccttggcctcattctgatttgttaatagtgccactgtgtactgtatactcagtgcttaaatctataaagctgcttctggagaacaaagcaagtaaggcacctgtttcagttgaaacattattaaacaaatgagtgaagttttaccgcaaccacatctttctttgggaaggtgctgttattttataatgctttccaaacaggtccatgtaaaaggctaattgctgcctaaattcaagatcctaggttaagtctatacatattaaaaaatgtttcaaactaagtacaataatcaatggtgagtattttaaaactatggagtattaaacacttctaagactttctgtattaatctttcaatgttttcattccaagtactataattgaaaactactttgacaagtagtttttttgccttgaaaatgtcttttgtcttaaaattatattcaactttgttgctgtgtataagacaaaacttttgtttccttactgaaactataaaaataagcatcaaaacaaacaccttggcctcaaggaaatcagatagtaagccgagggaaatttagtaaacaaatttttaaagaacccctttttcctatatttttgttatggataaattatgtatacaactgaccatgtagtttctttaagtccattcatagtctaatcaatttagtaaacatttattgagtaaatactttgagctaagcacaaaaatgaacatgacatactcccttctctcaagaagcttaccatctagaaaggagccaggcatgagttaaaaactttaataggctgggtgcagaggcttacacctgtaatctcagcactttgggaggccaaggtgggtggatcacctgaggtcgggagttcaaaaccagcctggtcaacatggtgaaaccccgtctctaccaaaaatacaaaaattagccaggtgtggtggagcacgcctgtaattccagctacttgggaacctgaggcatgagaaatgcttgaatccgggaggcagaagttgcaatgagccaagattgggccactgcactccagcctgggcaacagagtgcgagtctgtctcaaaaagcaaacaaacaaacaaaacccaaaaaacactatgctacaatatggtaaatcatactcatgcattaagaagacacagaaaagatcagttgatctgtagaggataaataaggcctctgctggtgaaatagcaagttttttctgggtcatgtgcagactatagcaggctaaatgaacagtaagagcaaaggcagaaagcatggcatccacagtgtatttaaaagacagcaaacagtgaagtgtgtgttgaaagaactatgtgcctgggtggaggaggcggggggtgatgggaagagatatgggagtttggaagttaggggctcaaagagtggactgagaccgaattaagaattttcaatgtcatcttgtgttagcttttatgtaatatgagggataggaaaaggtaaagagataacactactaaacaaggataaggtctgaataaattccttcaaattaaactgaattcttctaagcctactgatctttgaaaaacattttcaaatttcaaacctcccataatgttatttggaagcccttgcatttagatcaaagaatttgtgccatgtggaaaaaaattcctaaaatatgtctatctgaaagatgggatgataacatattaatggaagccagtagaaagagaagctgttaggtttataccccagggaatcctgagaaatctgcaaataattaaatgtactttgtgatataaaaatctgtttataattaatttcagaaattttctgccttttgaaaattctcccttagttaatatatcatgatgttgtttttgttttttaaattttaattggcaactaaaagttgtatatacttatgatatacaacatgctatttttaacgcatgccttactccacatatttttgtagtgagaagacttaaggtatactctcatagcaatttttaagtatagagtatatttttatttacacaatgtacaacatatctcttcaacttattcctcctgtctaagtgaaattttgtaccccttgaccagcagctccccagtctctcatcccagcctctggtaaccaacattatactctccgtttctatgagcttgacttttttagattccacatataagtgagatcatgcagcatttgtctttctgtacctggcttatttcacttaaaaatcctccaggtctatccatgttgtcacaaataacagcattttcttttttaaagatgacttacattgcatcatgtttatgtatattattatctattcctccattgatggtcacatgataacatccattctgacaggtgtgaggtggtactcactgtggttttaatttgcatttctccgatgattagtgatgttgagcattttttcatatacccattaaccatttgtatgtcttcttttgagatacgtctattcaggtcctttgcctatttttcagttgggttatttgttttcttactattgagttgtttgagttccttatatattttggatattaaccccttatcaggtgtacattttgaaaacatattcttccattccttaggttgtgtctttactgttaagtgtttgcttttagaaaaataaaaaaagaggcaaacatttccttaaaatccataaactaatgagttttaaaagaaaagaatgccatccaaactacctaatcagaaaaagactttctacagcttagatcctgtttttatagtattttagaaatgtctaaacacatggcctatgacaaatacttgcctctttttggaacatcaattacttctttgtaacggtatactgatttccttttaaggaataatctctttcccttccagtatagtattggtgagacggtaactccaggttcaaagataaacttggggaaattaggtagataaaaacagagaacatgcaaaaaaataaagaagcacacgaggtgaatgaagaaaaatgtagcaaatttatcagaaagatggaaattgtttaaaaaagttttaatattttctaaatatggtgaacatttctccaatttaaataatcatcagttatttaacactttctatgtgctaggtattcaattcatcaatttattaataatatctccaatcctaattataaccccaagagatagatgttattttttccattttattttatcggtgtgtaggcttaaacccagagaactaaagtaatttgcccaactgttagtgaatagttcagtcaagactgaatctcaaatccagtggaaaataaaatggtatgtccagtataggaagtacaaaacatacaggttaaataaacaaacgttcacatatacctatcaataaagaactccaaaattacatcagtctgttaaaaacaagccactcaaagctctagagttaactaaggtagtaacataattctgaaattaaaatgaaaatatttacataaagttaaatatttttttaaaaaatctttaaaaagtacactcaaacatactgggaaaacatttttcatgggaaacattttaggataatactatctattctataagaaaagagtcaccttcctgaagagttctttgctttcagtgctgttgcctaaattaactttctgttatgaaacacatcacgctagttttaacctagagaataatttgaacaaaaccaagttaaccatttctaaaatacttaaaatacaaagaggtggttgtgtaaccttgaagataattattcagatgtttttaagtattcatctctccatagtattttagatttaattttgtgaatttagcaacaaagaacacagtttagcacaaaatgagaaaacctgttcagaagtgaagaaatcatctaaatattaatagattttattaaatagcagcagaaaacgttatacttggtgttattttcagctatataaatatcttatttttatccaataaaaaacatactaaattcctccatttcaaatactgatgatatcagcaaagtgttcacacatctggatatctttctgtgtttacctaaactgacctttctggtatgtactgtactttctatctcagtatcttcagtgtacatttgcaaaaactacttgaacagtttacattctcccacaccatgctacttcaaatggtcttcaagactttcaaattactgtcagacactgggcattttgtaggcatatacttttgcattcctcctcaagggaaaaaaaaggggggaaagcctagattcaaatggtaataaagtctctttcaccctgataaatacatttaaaaagttgatctcggctggtcgcagtggctcacgcctgtaatctcaacactttgggaggccgaagcgggtggatcacccgaggtcaggagttcaagaccagcctggccaatgtggtgaaaccccatctctactaaaaatacaaaaattagccaggcgtggtggcgggcacctataatcccagctactcaggaggctgaggcacgagaattgcttgaacccaggaggcggaggttgcagtgagccaagatcaccccattgcactccaacctaggtgacacagcgagactctgtctcaaaaaaaaaaaaaagagttgatctcatcctgatgctagagttgtataaaagaagatcttagtgttaactcacaagctattatataaaaatatttgtatatatgtataccaatgtactatgcataaacacatttgaatatagcatgcgtatatatgcaatctatttagtatatttgaatgtatatattatatatagatacatatgcatttacatttccacatttattccaaaaacttagagagaaaatacttaaactgttttcaaaatacaaattctaaatgaaataaaatgttctttaaaaactgtaattaatggctgttatgtcaaactgtgaaccaaaaaggtcaaaccttataatttacagtttgagaggtcatacctcaaattataaccttaaaaaactgattatttgtgagtaatttgacaaatgcatctaatataaactgaatgcatatgaaatatttttgcgagtaaaaagaatgtatgtccaagtggacagctgatggaggaaatagccttttactgaacaaggctgaagtccaacataatgacttggaatgcctttgaataagcatgcaggttggaaggccaaacagtacacacatccaaaagggagcataatgaactatctgatcagaagacaaaaatactccacatatacacccaatgagaaaaaagaaaacacacttcggtcacctcctcttttttcatcattactataccccaattcacgaatgaactctgggctattgataaataatcatcaaaagaaatgatttttataatttaaaaatactagaaattcctataatattccaatctgagattttcaaatgtctatggagatcttctatatcatataaagtaagccaggtttacaaaactgtttacgactcatcttggatgcaaatattaccacacctagcttcatctcaaagccacctgctccttaaaacataatctgaaatactttggcctctccacaatttttaatctacaagtcatccaccattaagaaggcagatcattgaagataattttctccaccgtagactcaattccctaacccaagctagaattgagaaggttagcaaaatagtcatttattaatatatctatgtctctaatatttatttatgtgcttattatatctccctgttagactataagctcaacaaggataaagactaagtctcttttgttcaacagttatctataacatctacaaagtttctggcacagagctagcattccataaatattcgctagaaaatggaaagaaggggttgacagaagaaaggagggaggattgagttagctagtctcctctagtattatttgtgcaattgtggagagaaaaatccctaaaaatgtacactgtatttaatcaatttacccatccaacaattcactgatacatcgatccttgaaaccaaaaagatttaaaatggcttccaaaagtacacaattatacaataaaataaattaaaacagatgaaaaatgaaagggatacaaaatatagttgggaacaggatatttctatacgtatactggtaaagtcagttaaatcacaggaaagagaaggaatttgctttttaatttctccaatttaaccttattgtaactactattataatagtgttataaacactaagcaaatatttactcgttccttatctaaccattactatggcaaatactctataaccaggtaccttatattatgagccaggcaatctattggatgagacaaatattcagttataagaaagtataatatgtatgttataacagtaaaattatagatttttgtaggagagaaaagtaggattctctgaaccaacaaaaatgcttacatggtaactgctgaactatgaacccaatacttcatgtaccaagagatttttctgatacatgtaaatatgcatagttcttgatacacagggaaatatgtggtctcaaatgttaccagtacaaatgagacttgcacatgtaaatcacaatatgataagaaaacacatttgaaaagcattatctttcttgtaagtgaaagcttaaatctgattccacttagcctggtaagtgtttttgtcattccgttgggccagcccacacatactgggctcttgataggtcctgggctcaaccagctggccctttgtgtacttaattctttttttaatactgacgagtgtattagtaacacttccttgatcactggtaaatatacagctaccacacaactaagattttccttaattctgaaattcactaattagttgtgggtacgggttagtattacaaaggtatgttgagtggtactacaatgagtaatgtaattcccaaaaagaactgtgttaatttacttcccacttcattagaggaataaaaaacatcttattatcactaaaggatacagaaagagacctgggtattttagggaatggtagacagggagaaagcatgaatgcagcattgaggcaagaaacacaaatcacctatacatcttggacaatgttcgtgcttcttcttaatactttctgcttgcttcatttattagtgtgtttcatgaaaacattttattcaattaataaacaggtttccaaagaaagcaaataaggtaaatgattcctattttcaaaaacttatcattctactggtacgtaagttatgcattagtcaactctggaagctgcattaatcttttcaagccaataaggtcacaatcaattacttgagatagcagaataaaatacaggcttaaaagaaataatgcagccgggggcggtggctcacgcctgtaatcccagcactttgggaggccgaggcgggcagatcacgaggtcagcagatcgagaccatcctggctaacgcggtgaaacctcgtgtctactaaaaatacaaaaaattagccaggcatggtagtgggcgcctgtagtcccagctacttgggaggctaaggcaggagaatagcaagaacccgggaggtggagcttgcagtgagcccagatcatgccactgcactccagcctgggcaacagagcgagactccgtcaaaaaaaaaaaaaagataatgcaatttccaaaggtgctaccaagtcatttagagagaacatatggtacaattatgagtatcaaaactgggaatttatatattttaagcctaccataaaacatatttactttttttcttttgttggatgagagatattctaacgctgtttattttttcggaagattcagattattcaaagtgtatcagctgattgttatgtgtgttaattcaagcactgagtttaaataatcataactcaactccctaaaactgaagattctgtgtaaggttgggccagtgccctcattcctaggatcaaaccatgtaagaccagacaaaggtctcagagattttggggggttccagtctttctcctttgtccatagacgtgttagggaaaggatgacattttcttatagtacttaccccaaataactaaaatctcaacaaaaaatagataaaagtgcggattgtaaaataggtgttaataattccttaatcaaatcttgtaactaatgaaaaaacactagtttatatgcagaagtaaactgacgaaaggatgaacagaataaacaaggaggaaaagacacatttttaaatatgtaatttagaaactgtcaaaaaaagtgggacatgtcttatttaactggtgtatgagaagaatggatggttttacaggcacataaatgcaggtacagaaaggtaataggagctttgtattacaatggaacttaaactcctctgggcagtgatcagctaagatggaacagagacagttacaatgcaatgattaactagtggacaaagctattatttatggcaggtatgtaagcaattggggcagcaatgttggaggcccctcctcatcaagcagctttgccagtacagactggatgcctggaaccaggaaagacacaaaaacaataaaacctagagccagctaagggagattcaatgcaatccatctccaaattttaaatattactggaaatctacactgaagaatgttttcccttgggattggcatacactgtggttatagaatgttgaccaacacttacctttatttatctcactatgcagagcaatatgcctaaaatacctacttagaaattctcattatattacagaaaaaggagattctaacattagttggcaaaaatttttgttgataggcatgaacatcatgtcattacatgaacagatcattaaagtgagtccatttcattgacagtatatattgtgggtctttttattctgaacaaccaaacaaaacaaacacacaagaggtcattgtgccttccctcatttggttggcagctttatctgtaaaatatgaaaataaaaaactaacatggactacaatcctgcatgtaccattggtacctgcatagtaccatttctgcataagatttaatcaaatattttattcatgttctgaaatcctgatatttgtgaagatggaaaaatacacgggatatttttaactttcaacttcatgatctccagtaaaagtagaaaaataatcatatttcatattatttggttttttgagctagccaaaaaattattagtatacaagaaaaaaggaagttaccactcttcacttgtcttcaggtcttttaatgtaatctcaggaaaaaaacatatttaacaaaaatggaaattatcatgttaaaatctattccactttgaaaagcgatattctttctccctctcagataattttaaatataaacctgaaatgttcataaccaaataaatcgtctagcagataaccaatcaccaaacattaattttacacaatgaggtttctttaatttctctctgtctctctcacagacacacacacacacacacattcacacagacaggttgctaacttgattcttagtatggtaacttaaactcataaccactccaaaatatactttaccttgattttgtgaataaaaataaataatcttatggggcaaggcagggataaaaattagaagtatatttctaactttaatagctaataataaaaagaacagcagaaattactgaaaattatattgctaaaatgtatctgtacatgtggctgtgaaaacttacgtgcaaagagaattctcgttaactaccttcagaaagaggtaatgaaatatgaggtttaagagtacatctttagtacttctgtaccttaaaatattgccgagtattaatttttcatcaagttgtcattttctctgacatttggttttattaatcaaggcatttatcattaatttgtagaaaatatcgtaattaagccaaataaaataaaatccttaaaaggttaaaattagaaagcaggtgaattagaactttgacattaccctgttgacatacaggagctttctggaagtatgagaatgaagtttttttcagtgagtttggtgcctcgatcttggggctggctggtttttaaaaaatgttataaagatttgatttaaacctctctgacagttttgacattcaggtgaaagtactgctgctgcatttggaacaatttgcatatcccactgctaaacggaatgtttgaggtgtgcactggtgtaaagaaattaaaaacaagctatcacacatgcttaagtgtatgtattcacaaaactgatggttggatcgcaccaccccatccccctccaatgtaatctgtgatttactcttctataataaattaccctaccatgttagtctcactggaaaatctaaccatgcatgtaagaagaaaagtaattacagccccctcttgtctaagaagcctccttcaatccctgtgagctctttatacacaatgcagccacacgagtctattgtaaacttcttgcctgaaattctggacttctgactatcagtagccactaaatctcatctgaagagtttcaatgtccccaacaaatacaattttatttcttatagttaattgtaaagctcttcctcaggagaaattgttactgacattctgactttaagccaatatgtctgtttaacaaaagaacacagtttaaaatcatgagttccaaaccagttaaaaaaaaaaaaaaaaaggaggacagagggacataatacataatgaaatagaaggaacaagagttagagcaacacctaattaagctgaaatattcagaaagagtataaaatttctactttttaacttacaatttcatattatttttaggtatacatagaaaaagatatttaatgtgtttaaggacaataaaagaaaaataataaaataaaagaaaagttgaggtagcaaatccaagaccttaaatattataagacaattcaagaagataaagcccattcaggaaaataccactggacattaccttcagccttcagagtcccaaaggcaattcttaacacttctttttatttgtctgtaaaaaaaggaatacttaaaattagaaatctgccaaggaaaacatttgcatttctataatatctttatgacccaggtagctgagtttgtgtatgccaactaatatctatagttttaaaaagaaaactgaaagctaacacattcatatgtgtacaagtactcagtaaaacgtggcccaaatatacaatctaaaccactgcatatacatttttgaggaggcatagcacggtgtttgctatagtatcataagaagttatcttaactcataaggatatttgcatttttatttcatgttttcttttaagaaaagcaaatcccaaattgcttttaacctatttacttgctcattcttattaacagagagttcgcaaagttctatgatgtataatgtactggtcatcactggtgagtttaaaagtatgcaaagataaaacacaagccctattctcaaaatagtaggtaaggttagagatatttgcataaactcagataaaccaaagaaaataaaaagaaaatgggtggaaagaaataaagatgcaaagggtaacatgttcagtacagcttagtacctaaggcattgacattaaaacatggcttaatatttcctgttttagcagaaaggctaatagtagggtcctacccatatttagatgcaaggatgccaaacaaatggatgggttgcttttaaatttctttagtaaagaattgaagctggatgggaacaggcaggatgttgagtttactttaaagccaatttggtgattttgactatagaaagatttaactaaaaacagctctcctattaaaaattgaatttgatgttgtgttcccattagaaaatgatctctctaaatttgctatgaaatctcaatgatgaccttgatgccacatttactaataatctccacagagatttaggcattcaaagtttcaaaagcagttttaataatggaaatgcaatacctaaacatatgcttgattatataatctagtacatctacagtaaaatgcccattaaaattttaaaaatctgaggattttaattgactatatcattaatatgcatgcacagtatttttgcaaacaacaaaccacactagtaaaccaaaacaaacctaaggattggttgcactaatagacaaatagggtccagaaaaggaatctgacactcctgttatatttggggtgcatcagcattattacagttattctgcatcagcaaactaggagggatgctaaaagttagtaactgctaggaggagtgagaccagaacaattaatgatgaagaaataggatgattaggaacagaaaagaaaaaatgttctgatcatagagataaagtggaggacacctttgagaaaattaatttggtaactacatgatatattacaaaagttacttttattaatttattacctgtctcttcctctagaatggaagtaacataagggcaggcactttctctttttcactgtaaccccattttcttgaatagtgcctgccatatactaggatatcaatgaatatgtactcagtgaatgaatgaacagcctaaccaataaaacaggcactaaatctgtatctatttacagatgagaaatttaggcttaaagaaattaaatcatgtacaccaaattaaattgtcattctgcaactacaaacttctacaatgcattctttattcttccattcaatattcattctagcaacaggagaaacagacaataaacaaataaactgttagacttataatgtcatataattagtactatgaagtcagataaaacaagataatgacactgagagttacctggcctgatattttagatagatttggacagggaaacttctcaaaggacgtaagaataataagaaacctgaatcaagtaaagaagacagtcaaaacaaaaaaatctgaaggactggctgggtgaggtggctcacacctgtaatcccagcagttcgggaggccgaggcaggcggatcacctgaggtcagaagttcaagaccagcctgctcaacatggcgaaaccccatctctactaaaatacaaaaaattagccgggcgtggtggcgggcacctgtaatcccagctactcaggaggctgaagcaggagaattgcttgatcctaagaggtggaggttgcagtgagccaagatcgcgccactgcccttcagcctgggtgataagagcaaaactccgcctcaaaaaaaaaaaaaaatctgaaggaccgtttgaattgttttaggattaaataatacatatttccttgcctagtataatggccagcatataccaaacagtgtactcaatactttttattatattgctaatatttttataaattatgtttccccactagattacattgtcaaaggcatttactgttattttccttaaggttccttaaatagtgcctagcaagagctcaataaacacttagagaacaaaaatagaaagacacaattttcagttcattaattagaaaataaacagactacatgaatatgaaaaagtcaccatctttcgtatacctgaatcaatcaaactctgttaaatcaatttcacataatatttcacctttcctaaattaaaaaaaaaagaaaaaggggaaaatatattaaatggctagggccaagaagtcatagataacaaaagaataagaaagaatcagaagaaaattaagttattaacatgaggccactctctttactatttacatgctgtctgactccatcagattaacacatttttccagtgaagggacattgctacacagatatctgattcatttatgtattcctaatgcaagcacaagccttgctatgtaacaaataatcaaaaaaatctttgttgtcctgaaatgaactaaaatgatgtttagtagttttgatgctttaaagctagctcaaaacaataacaacaaaccaggggactgacaaacttaaaaaacaaatttaaatgagaaaacatcaagcattaggtttgagtcctatagcaaagaagcagagaacaaggtaggttctttccaaagagttaaatataagtgacagtgtgatattggcattggaagagatagatcagtagaagaggccaggggaacttaggtatggggtaaatgttacaagtaacatttccatgaacaatgttgagatagctgactgattacctgtggcaaaataaattctgttctctaattcttatcagtactaaaatataaatcaggtcaataaaactcaatataatatataaaacaatcaaggacctctaagaaaatacatatgtataattttctgaactccaatgtgggaaggacttttaaagtacatacacagtggtatataatataagcataaagatttatgatgtttactacttaaaattaaaaattttagcctgggcaacatggtgaaaccctgtctccacaaaaaatacaaaaattagttggacatggtggtgcacaactgtagtcccagctactcaggaggctgaggtgggaggatcacctgagcctggagaggtcaaggctacagtgaaccatgatcctgccactgtactccagtatgggcaagagaacaagacccagtctcaaaaaaaaaaaaaaaaaaagtgtaaggcagaaaacatctttaacaaaattcaaacttaagaggccaataaaaaataaatatttttaaagtgtataatgttcattgggttaagagtctttataaataaataaacatattattctactttttaaaatgagcaaaatacatgaataggcaattcacaatagaattgtgagttctcttctaaaatatggaatgcatttataaatatatttaaacatatataaaatatattttaaactatatataaaatagtaatacttattactatttattattaaataatattattaattctaatacctataagtaataaggtgaaataagaagctaaaatacatatgaaataatattaatctgcaatagcaatgaaagaaatgcaaattaaataaactaaaatattttagaatagtgaactggttagataaattatatgtaataggatattaagtgttcattagacatggcaagtgaaaatatataatacatcattaagcttagaaaacaggttataaaatggtaataatgataacataccataccaatatttaataatttttctctatataatataaatacagactatgcacaacttttggttatgtgcatatgtaagtatagatctgtatgtaccaggtgtgtgtgtgtgtgtgtgcttgtgtgtgcattagaaaaagtatgtatgtgactgtaaaaaacttaaactacattattctttgaatttatcttaagattatgacagtttttttcttcttagaatttgtttccaaattttctgtaataaaaacaaattactttttataaacataaaaagcactaaagaaggcacctagtttatgtttcaggaaagaaaaatttaatttatattattagaattcctgaatgttaagaaagacatttgaaaatgtctatctgtcatttttggtgaaacctttttaactgcatagatttttttagagaaaaaaaaatgtaaggaaggaaaggagaaagggcaggtatcgtgaggaagggaagagaacaacaaagaaagaaaaataggatttataaagataacagcaactactcagaatggtatctattaggttcctagcaaccaaattttaactggtaacatctccaattaaactttcaaagaaaagcacagcctggaatgtagaaaacttaagttggaggttacatttatactgtgaacatacttttacaagagaaaatagatgaaatgttcatcgatttcaatgataggactactgtataaagagagacaaaatacaccatgagaacataagatgctccaaatcagttttggaaataggagtagtataaatttcaattaagtaaaagtttaaagtaagcaaattttaagtagctataaaatcatgctgttcattcccatataagaaattttcaatccatagtccttaacatgtcattcaaaacatatgaccctacaacatatgaactatgacttctggttaattgtttcaatggacattattttgtataaggccttcccaatgagtacaaaatgaatagaaactgttaaagaccattatctattaataattatagcaaacaagtcttcattaaataaaaatttaaacataaggtttaattgtattttattttaaaaggcaaatgaaagccaattgatcatcctgaaagatcataaagaacctgtacagttccatcgtcaagaagacaaggatacattccttcaaagactggaaaagctttaatttcagttcatccataatcatgcatcctaaggtggaggtattcattttggatttggatatattattagagtttttaaaacaccagggaaatctggtaagttctatggtatattctcaaagaacatttcataagattggtctggctaaaccccatactaaagccatctgaaataaagtcaaattccatggagctggagctcgagagcaacaacaaaagaccattcactgactcagttatacttgctcttaggtatttcaggttcgcttctaaatagggggaaaaagtacagaaagattaggtactaaatactgtttttaactctaaaatacaatcaatttttttctttacttgtctgtttaaaagtaacccgagcccttccttttattatgtgaagcttcattctgtttatttttatttcccaagagcagaatgccttaaataaattcttaaaaaccaacacatcaacaaataaataaattaaaactcagtgactataaaaagtacacaatctaacctgcttaattattaacaggtaaacacaatgaacttctaaattatttacttaatccccttcaactaaaaactttaaagtttttgggcttgaaatgtatatcctttctaagggtccataaaacaattatttaaaaatctatttagccattttagtaaaagcaattttaaaataccaaggtaaatatgcacttaaacatttacataagttcataaaaaatagaagactttttttaaatttcacaggtcagtaaaattatttttcttccagctttccctagtcttctgtcagatatttcactccaccatgagcagaaatattcagtactaaattatattagattgatataatagttttgaagtaagcatttatagaatactcttattcctgagtataccataagaaatgtataattatgaaactataaaaatattaataattttgaaacttcaagaaaaaaagaatgaataaattaaaaaatcaccattttctccagataagactggactattttcaccagcgtagctaatcactgaagaaagattgctgcttgatgcaagtaaccattgattacctgaaatgttggttagttaaatgttctggttagctaagggttctagggggaaaggtgtttttgtttttagatcattttaactaaaaatataagatgttctactagatttctctgctttagtaaatagggaattataattttatctttcacttaaaatgaaaaaattatgttgccttagaggatggctcttgaacttttgggaagtcagaagggcctctgggacgatgaaaaaaaaccaagaatcttttttctctagaaaagtgcatatgatcacgaaattttgtatgaaatttccagggatccagagacccaataaaaaccccttgctttctaattttacagaattctaaataactagacataggagattgcactcatacagtaacccccaggacaaaaggagaatgtttgaagttccttcagaagacaggcctaataatgagctattttgttatgatttgtaacctttcttctaaaaggggtgtgtaaaaacaattcttgttaatttagtcttggttaaaggttaaatatgtttcctttaaggacaattgcattacaaggtatttgagctttgaaacaaaatagtgctgctttaaaatcattccacattttagaagtgacagcaattttcttcctatatttttgtaacaatagaaggcagagtcaaagagaaatctatttaattttcatctttacttctaaagattaacagataatagcaaatacatgagcagtccccatattcaggttctgttcaaagcgcttttatttgtatttacttatttaaacctaacaaaaactctaggaggtaggtaatatcatcatacccactttatcaatgtgtaaactaaggaacagagggagtaagtaatttgccaaaggacacccttttactgagcggcagaaccaggatttatgcccccgtcaatctggttgcagagttcggattcctacagaccatgttccatttccagctttaatctttcatgagttcttcaatctttcatgagttgatggtttttcttgtgtgttattatatttaacacaagtctacttcttcactaccatgcaaggaactttcatactggttttcccagaaaaattcatttggtgaattgttcataagatgctgacaaaactggccccacctttgtgcagctggcagttttataccatagtaaatttcccagagtcaatgccaaaaattaaaaaactaaggtaccaccagctagtaagtgtggaattatacaatcaaagctgacctctcatttcctttttggaaatagttttcatgggataaatatgtgaatgattatattccaaaggcaaccaagacaacagtataaatgggcaatattatcataataacttctcaaaggcaggattgtctgctattcctaattcatctgatgagaggtacaccagtcgatacaacttttaatttctagtcctaaatcatttctatgaaataacatgtcaaagtaaaatgcatacttaatgagggccagcaaggggccaaatttgcagtatgactattttcttgaaatatcctcttggcagattgctaccaaagacagcaaccaatttgtaatgcaggatttgcttttagtgtaccaatctttacacattgagtaattccatgaagagaaaaggctgacttaaaaaataaataaaataaataaatcccatccttatggtttgcacagaacaggttttagttataaattcattccatttaatttttattgaattactccctaaaataaatgcaaacaggcaggtaccagtgagacacaagtataaaagggcacaataaagcagaatgttcaaagtcctgtgggtacatgtgcacaacacgcagtttagttacatatgtatacatgtgccttgttagtgtgctgcacccagtaactcgtcattttttaaaaatctttgtccttttctcaaatcctccctccaaagtccaaagtttttttttacattagacctatagacttttatgaagaaattcatttcaatgcagccaagctaggctgggaatgagaacctggtttaatataaaagtatgcctggaataaaatatcatcctttgcctctatctatctctatatcatcctacacaccataataaaacaaatatttggaaataatctagttatttcctataataattcctaatgatttacagtatcaagtcctatatacttggttttcaaattcctccataatctagttccattatatatcctaattccaaataatgcagaaattatactgtctcacccaatgaaataagattttaaataaatatacattgtttcagcaaacaattattgggtttacaatgtgtcatgcaatgttcatgtagctgaaatattttcacatatatatcaggcttttcctatgccctcaacatgtccttcacgatgtccttcctatatagttcagcatgaggtattcgtctctactctgtcaatttctgttaaattcatagtgaactcaaattaattttaactcgagaaatgccagttagagaaattaaagcatgatatataattacaccgaggaaccagatttagaaccggagaagcattgtttctcaaggccgttcttgtcttcatatttcatggtcaaaggtcaatgttgaaaaagctgatgaaagctaatagtaaaactctcaagtctgtacccaagcaaagcacctgatcagtatctgatccaagcaagtcaaaaaaggaaagaagtttgtgtgtaacttttggcttcagactgatatgaaaggcttcatcctttcaattaaggcatagacttttgcctatctgtgatataaaatatattaacagctatagactaggaatttttacatttaagccaaaatacagccaacagagtttaaattttaagtaatttgttaaactaaattaactgaattttcaattataggttttaaatgcttagaaattttccatacgtttgttatagacctcttgttattttctagtttcaaaaatgtgtctttgcataaactcacggttttcaggtttttcacaactgcttcaataagcattacagtaatgctttttaaaacgaaacgatttcctttgctatattattgcccagttgacgttcttatccaaagccagttttgctctctgaatttacttttttctttcttctccccaaaggtgtattgatatgatacacactccttccatttcctggtttaatttgaacatgtcatcctcccacatcataatccagtccatctaccaacaacttatttttcttctgtgagactggcattgatgatggagatcacagggtttaggatgtctcttttcagttattgagcctggcccattcccagtcctaatctttttcttgttaaaaatcaattatacatatatatatttttattatactttaagttttagggtacatgtgcacaatgcgcagtttagttacatatgtatacatgtgccttgttggtgtgctggacccagtaactagtcattttttaaaaatctttgtccttttctcaaatcctccctccaacaacaggagacagctttctttaaatgtccctgctccgtcaccattttctgtgaacaagtctctgctccatcaggatgcacaacaactacccagacccatgtagtgacattccaaataagcttctctttggtcttggagccaaagaaccaagtcctaattcccaatttctcccaaactttcactatctcagtgtattctctcttctcactcttatttctatcaagacacctatgaatggccttctctttcattgaacaacagttgattcagatacaatcaattcaataactctcattttagatcagaaacatacatttatgtttagaaaagactaatcaattgagtacctaagaaaacaaacaaggagctaatttaatgtcctgttcccaagagcactctcacacagacacagaaacaaacatacactcacacatccctacacaccaactgttttactaaaatccagccacactaccttttttgtcttccttcatcaggccatgcttgtttggggcttttgaacacgcttttctacaaggctcttctcccagatcatttcatgatggcttccccttctcatcattcagtcctcaactcaaatggcacgtggttactctttatcccactatccaccctatctgacccaagtcacttttgatcccactgcccagatttcttttcttcacaggatatcactatctgcaactattttacttatttataaactgactcattgtcgattttcctacattaaggaggctatctgtcttattctctgccaaatcacttgcccctaggtgtcatgcctggcacatagtaagcactgatagatctgagtaacgaataaatgaatttacagaaatcgttagccataaatagttttcaagtgcttacaatgtgcaaggtagttcttttttcagttgaatcctaggatgaaaaatgctctgtctctcagcattaatggggcacagtaagtccatttaagagataggtccaagatcaagtggatgaagcttattttgaaaaagttctaaacaaaatatattcctaccacattagacctaaaatgtattaatacataagattaacaacattgttcttctcagctattgtttccttcacacttccccattaaacttttgatatgtcattatgtccttttatgatgtcaaaaacaattgaatggaactgaatgaaagtagttacaacgacacatacccaatttgggacctttactgccaaaatagatgggtcaaaatgatgaaacatggtaagattcggggtgagaccaaaccctgaatctttacatgttcactccctcccacattcatacaatgtacaaatatcctgactatacctagccttgacaagcgttctaatgcctctacaggtgaaaacatccattcatttaaaccaggacctttatctataaagtgccaaataataaatattttagcctttgcaggtcataaagtttctgtttcaactactcaattctgctactatagtctgaaagcagccataagcaataaacatataaacaaatgaccatggctgtactccaataaaactttgtttacagaagggggtgggatgcatttggcaaaccctgatctaacccatcagtgaagcctccaaagtttatatatggggagatttagaaagaaaatttgatcagaaagtgtgttaggaggacttgtgttagaatctgcttttctgtgatacacattttgcttttatatgaaatatatgtgtatgggggggttggaaaagattacgggaaaactgaacccctcaggtcactcttatcactgccgcctaatcctgcaatccatttgagggtgttcttggcattacattttggccttctatagattcatcagctttctctgcatattttatccatcagattatttatatcgtaattctacaattatttttgaaaagctacaacaaacactcggttgaagttcaaaatatacattccccttaaccatgctaattctgcattctatttcaaacattattaattttgtcaggcaagatttgtttataataaactcatttttttcatcgctcatgattcctttgtcttcaagatgtttactgatttctcttacaatgttttatgagaatgttgtcagataccctgtaagccattcaacattacatttacatctattataacaattctttctccctcaaaatcttttaggtcttccaaatttcccaattggaatatacctttatccaaagtataataaatacacctttacctgtttctggttgatagctactttcaaaaggtattttaaacgcattatatgtttttcaaaattgtgttttaacaccaaaacagccacacaattaaactaaaatttagtaaagattctaaatgataacacactgtcataagatacattacatattaattagcaatgttatcattttctattctccatcttatagtttctgtaataaatcctactgccaatcagctttcattatcagcccgtctaatcatgataaccaataaattgtactctatgcttctgacatccaattctgctttatctattctagctatagtgtcaaaatatttttgtagcttcaactagggtttgacaaaaatgctaaaactataaaatctaaatgtaaagtttaccattaaattatatcagcatgtcatacaaccatgatttttaaaataaaatgagaaaatacataaagtaagattttagataacatgataaagtctgcttcagtttgattcagtattcaataaataaaaccacttgagaatcccagtaaaagtaaaccttgagatggttgaaatatccattttaaataacgggaacttttaggtaattgtctctatgaaacaagaatcaggcttttgaggtcataaaatgcttgaccttcccaggtacaatgaatgcagaaagcttactactaagttacacaataggggtaagactgttgaatctatctgaaaaattacattttcaaaagctccacaaagtaactgattcattaaagaaataattggaaagattctttctctttcctcatatgaaggagaaatcacaaaacgttgcaatattttcaaaagaggatgaagtgctcacatttcacttgtgaggtttcaatagctttattacctatgctcttgctgtttgttcagcatgctgaagaaaagtatttccaaaataacataggtttgctaatccttggttcctgataatatcacatgataggataggagctttcaaacacagtcaagctgacagtcacttgctctgtactcagagggaccaatttctccctgtagacatgaatacagcacaaataataaagtgccaaaagttgagtgtaagtgcaaacccttcaacatcactcaggtatcagcaaaaagtacctgtttagctacatgtagaagtcaggtacaacatgttgaaagggagggaagattagaattgaaataatttatctgcctctgctagtttatctgcatcactgaaaagaattaaaccaaccttgccaaaggtaagtcttgtctaggtacaaactgtcttatcaatgccatctcatctattccctatcgtcttctttttttttctttttttgaaagaaactttttatttattgtttttttcacattgcaagtgatggtatccagtttctttttttttttttttttaattatgctttaagttctagggtacatgtgcacaatgtgcaggtttgctacatatgtatacatgtaccatgttggtgtgctgcacccattaactcgtcatttacattaggtatatctcctaatgctacccctccctcccccctcccccaaccccatgacaggccccggggtgtgatgttccccttccggtgtccacgtgttctcattgttcaattccccacctaagagtgagaacatgcggtgtttggttttttgtccttgtgatagtttgctgagaatgatggtttccagcttcatccatgtccctacaaaggacatgaactcatcttttttatggctgcatagtattccatggtgtatatgtgccacattttcttaatccagtctatcattgatggacatttgggttgattccaagtctttgctattgtgaatagtgccgcaataagcatacgtgtgcatgtgtctttacagcagcatgatttataatcctttgggtatatactcagtaatgagatggctgggtcaaatggtatttctagttctagatccttgaggaattgccagactgtcttccacaatggttgaactagtttacagtcccaccaacagtgtaaaagtgttcctatttctccacatcctctccagcacctgttgtttcctgactttttaatgatcgccattctaactggtgtgagatggtgtctcattgtggttttgatttgcatttctctgatggccagtgatgatgagcattttttcatgtctctgttggctgcataaatgtcttcttttgagaagtgtctgttcacatccttcgcccagtttttgatggagttgtttgttttcttcttgtaaatttgtttgagttctttgtagattctggatattagccctttgtcagaagagtagattgtaaaaattttctcccattctgtaggttgcctgttcactctgatggtagtttcttttgctgtgcagaagctctttagtttaattagatcccatttgttaattttggcttttgttgccattgcttttggtgttttagacatgaagtccttgcccatgcctatgtcctgaatggtattgcctaggttttcttctaggatttttatggttttaggtctaacatttaagtctttaatccatcttgaattaatttttgtataaggcgtaaggaagggatccagtttcagctttctacagatggctagccagttttcccagcaccatttattaaatagggaatcctttccctatttcttgtttttgtcaggtttgtcaaatatcagatggttgtagatgtgtggtattatttctgagggctctgttctgttccattgctctatctctctgttttggtagcagcaccatgctgtttggttactgtagccttgtagtatagtttgaagtcagttagtgtgatgcctccagctttgttcttttggcttaagattgtcttggcaatgtgggctcttttttggttccatatgaattttaaactagttttttcccaattctgtgaagaaagtcattggtaacttgagggggatggcattgaatatataaattacgcaggacagtatggccattttcatgatattgattcttcctatccatgagcatggaatgttcttccatttgtttgtgtcctcttttatttcgttgagcagtggtttgtagttgtccttgaagaggtccttcacatcccttgtaagttggattcctaggtattttactctctttgaagcaattgtgaatgggagttcactcatgatctggctttctgtttgtctgttattggtgtataagaatgttcgtgatttttgcacattgattttgtatcctgagactttgctgaagttgcttatcagcttaaggagattttgggctgagatgatggggttttctaaatatacaatcatgtcatctgcaaacagggacaatttgacttcctcttttcctaattgaataccctgtatttatttctcctgcctgattgccctggccagaacttccaacactatgttgaataggagtggtgagagagggcatccctgtcttgtgcccgttttcaaagggaatgcttccagtttttgcccattcagtatgatattggctgtgggtttatcataaatagctctcattattttgagatacatcccatcaatacctaatttattgagagtttttagcatgaagggttgttgaattttgtcaaaggccttttctgcatctattgagataatcatgtggtttttgtctttggttctgtttatatgctggattacgtttattgatttgtgtatgttgaaccagccttgcatctcagggatgaagcccacttgatcatggtggataagctttttgatgtgctgctggattcggtttgccagtattttattgaggatttttgcatcgatgttttcatcagggatattggtctaaaattctctttttttgtggtgtctctgccaggctttggtatcaggatgatgctggcctcataaaatgagttagggaggattccctctttttctattgattggaatagtttcaggaggaatggtaccagctcctccttgtacctctggtagaattcggctgtggatccgtctggtcctggactttttttggttggtaggctattaattattgcctcaatttcagagcgtgttattggtctattcacggatttaacttcttcctagtttagtcttgggagagtgtgtgtgttcaggaatttatccatttctgctagattttctagtttatttgcatagaggtgtttatagtattctctgatggtagtttgtatttctgtggaatcgatggtgatatcccctttatcattttttattgcgtctatttgattcttttctcttttcttctttattactcttgctagcagtctaccaattttgttgatcttttcaaaaaaccagctcctggattcattgattttttgaagggttttttgtgtctctatctccttcagttctgctctgatcttagtgatttcttgccttctgctagcttttgaacgcttttgctcttgcttctctagttcttttaattgtgatgttcgggtgtcaattttggatctttcctgctttctcttgtgggcatttggtgctataaatttccctctacacacttctttgaatgtgtcccagagattctagtatgctgtgtctttgttctcattggtttcaaagaacatctttatttctgccttcatttcgttaggtacccagtagtcactcaggagcaggttattcagtttccgtagttgagtggttttgagtgagtttcttaatcccgagttctagtttgattgcactgtggtctgagagaaagtttgttataatttctgttcttttacatttgctgaggagtgctttacttccaactatgtggtcaattttggaataagtgcgatgtggtgctgagaagaatgtatattctgttgatttggggtggagagttctgtagatgtctattaggtctgcttggtgcagagctgagttcaaatcctggatatcctttttaactttctgtctcgttgatctgtctaatgttaacagtggggtgttaaagtctcccattattattatgtgggagtctaagtctctttgtaggtctctaaggacttgctttatgaatctgggtgctcctgtattgggtgcatatatatttaggatagttagctcttctttttgaattgatccctttaccatcatgtaatggccttctttgtctcttttgatctttgttggtttaaagtctgttttatcagagactaggattgcaaccactgcctttttttgttttccatttgctccgtagatcttcctccatccctttattttgagcctatgtgtctatgcacgttcttatctctctttctctcctaaactttttttttgtaataatctctctctccacctaaacttttcaacttctctctctttctgtcttttttactccctccactagacatacccactctctctcacaaataaatactcactgtatgatgctaactgctaacttaaaggagatgtaattttatcactcacatatgattattgatgtgaaagtgcaagagtaaatatgtcagcaactgaaaaattagggcaacatgatccaaatcaagtgctaaatatattaatcatatacatactatgcacttctatagaaaaattattaggctataagcaatcataaagattagcataaataacctaaaaaaactattaaaagtcaagacagggagattcagctgacagagttgtatctctctttcttttcatataaagagatattcagtatgatgttgctaattaagaagtgaaacaagttagaatgaaagctataaagggaaatctctgggtgtcagacaaaaagaaagaactcaaagccagagcagaaggtggggctgaactcttggtgtccccctagagcaccatagccacatatatccatatatttgtccgcagtgtggggaaacagacaaagcctgaagccaatgagaggagtggaacagaagctgagactcccacttattaatggatgtcccctcacgcatctgtaagatttagactagaaaagtctataggtctatagactagcccagagacagagtaataaaactagaaatcttcttagggttctgggggaaaaaaaaacatagaaaatgaaacccagatacgtgccatgagtgccttaggaatcagcattgcattatttgggacagaaaactcaaagctaaaaattaacacaaaaccaattaggttttctgtagaccagtacaggcacagatcatgggtcacagaatagaaggaaatactaaattactttggaaggacccaaggcactcacagagaaaacaactttcttcacctgagaatgagctaaccataggatcaaaaactgatactcttttgttcaattcaacatctacctattaaatgcttttttaggcagataatattttagaccctgaagatatattagtgaataaaacataattcctgtttatactctcatgaggaagacaatgaatacagaaatataaaatataatgttcagtactaacaaatgccacaagagaaaagcagtacaaaagaaaatagaagaagagatggagaaacagatatgtagaaaaaatatttatagaaagactctaagaaggtgatatttgagcagaaccctgaacaaagtaaaggagtgagtcatgaggcagaagatacatcaacaggaaagaatacaattagtaaagatatagaagatttaaattacatcattttgaactaactgatgtgtaaaaacttcaccttttgaaaattgcacattctttccaactaatgtgtaatatttataaaattcaaccattatgatctaaaaagaggtgttaacaaataccaaagaattggtattacaaaataaggtatctgaccacaatggaataaaataagaaattaagatgaaaagatagattaaaaagccctatatatttagaaactaaaaaaacattcataaatattccatgagtcaaagaagaaatcataattgaaatattaattatttaaaatgaacacaataaaggcactacatatcaaaacctgtgggatgcagctaaagtggttcttagtggaaaatttatggctttaaatgcatatattagattttttaaatacgtaaaattaattagtttaggatctcacttagcaagttaaaaaataatagcagaataatccatgtaaaagagaaggaaagaataatgattagaacaaaaattaataacatgaaacaaatgtacaatagagagtatcagcaaaaccaaaatttgttctttaagaagaggtgtaatatattaggctaaaccatattattttttcagtattcaacccatagtaaaacttatgctgatcaaaaaatattaatcattaaatatttaagaaagaaaatagaggcactgattagaaactttaggaataaagagaatgtatctcaaacaatataggaaagatttaaaataacctgagaatatactaaacaactaaatggcaatcaatttacaaactcaaatgaaataagcagtttcctagaaacatgaaatgtaagaaaaatatgtaattagaaatagaaaacctgaataaatttatgatcaataattgagagaaaaaataatctcctgacaagttacatctcacatggtttaacagttgaatcctgccaagcctttaaggaatggataatcgtagcctgatataaactattacagaaagaaaaataaatatccaaacttcactgtcttcttacttttttctcagagcacttagtgtcttagtaatattttcacaacaaacttagcttaaaagtatgtaacagatccattaatttagtacttaggtctaaacaattaaataagtatttttgtcccagcaatacagccatatagaaataataaacacaaatttttaaaaattatttttacttcattcttatatagccatctttaagtttattattattgggatgtgtgtgcctgtcaggcactgcacaacttttcaaaccttgaaatctgattggacactgccacacttatttcctgttctatattgattttcatgcagtacctgctttctatgacagcaaccacaaaaaccaagcttcacgaagacatgacaccatcaggatgaatttactgaaatcccacgctaaaactgaactattcagggtagtgtctgacctggtgtctgacagatgttgaatattgctacgtttctcttaaaaattttaaatagctcatggcccacctgtgagttcactgtggccctacaggagtgccttggaacatagattgcaaaccatggcattatggtgagaaatgacttatgtaaatttttaagtaaacaaaactgcaccgaatgttcatggataagtgtgtgcgcatgtgctgcatgaaatgaaatgaaaatataaaaatagtaaaaatatgaactgaaagcatatgcattaacttcagaagagtggttacctctagggacaaaaggtggaactgtaaacacaagggaacttcaactatttctgcaatgactaatttctgtaaaaacaaaattcaagcaaatatggcaaatgctaatgtttttaaaatatgggtgatgggtatttggtatttattacattaatttcgtgccttattatacttttgaaatagttcataaaagaaaataagaaatgacaagcattgtgagttttcaaaagcttcatataggttgctacttttagcatgccattctaaatcccaggacatctggttactgttagacctgcttttctagtttccatttagaatcattaaactatccattcagagtagtcttaacatttaaagacaaaaaatcatataaagacccctatttcataagcttcaccctaagtcacaaatgctgcttttatttagtaactttgaaaaaatctcagcagaaatcagatataagtgctttctattcacttcttcaaaatatacttattttctcatttcagttattgaaaataataccatagtatgatagaacataacatgtattcatttagtgctatcccaaaccccacaaatctctggtctattgcaagaaatatactcattttcaaacttagtattaatatatttattttgtaggatactaaccaagtcaaaaatgaaactacattgaattaactgatgattatgccagatgtacattaagtttgtgttagtcacgtatgccagttcctcacatccatctcccctttaccttctcccaaccccaacttttcaaaataaaattaatattattcattagaagcaggaaactatagagggaatgtcagcaaatgtcagaagttccatgtatcagtcaaggatcaaagaagttccacaataataacatgagctacaataataaagtaaataagatagcaattatcccaccttactctgaactggccagatcatggcacatgtcttttattatgaggacactgccttatcaaaaagcctaaagagaaaaacatgtagaatggtgagaaatcttatttttttcttttcttttttttattattatgctttaagctccggggtacatgtgtagaacatgcaggtttgttacataggtatacatatgccatggtggcttgctgcacccatcaacctgtcatctacatgaggtatttctcctaatgctatccctcccctagcctcccaccccccaaaaggccctggtgtgtgatgttcccctccctgtgtccatgtgttctcattgttcaaatcccacttatgagtgagaacacgtggtgtctggttttctgttcttgtgttagtttgctgagaatgatggtttccagcttcatccatgtccctgcaaagaacatgaactcatccatttttatggctgcatagtattccatggtgtatatgtgccacattttctttatccagtctatcattgatgggcatttgggttggttccaagtctttgttattgtgaacagtgccacaataaacatacgtgtattttttataacatacacatatgtctttatagtagaatgatttataatcctttgggtatatacccagtaatgggattcctagatcatgtggtatttctagttctagatacaagataaaaacaaacaaccccatcagagagtgggtgaaggatatgaacagacatttctcaaaagaagacatttatgcagccaataaacatggaaaaaaaagctcatcatcactggtcattagagaaatgcaaatcaaaaccacagtaagataccatctcatgccagttagaatggtgatcattaaaaagtcaggaaacaacagatgctgaagaggatgtggagaaataggaacgcttttaccctgttggtgggagtgtaaattagttcaaccattgtggaagacagtgtggcaattcctcaagaatggtgagaaatcttaaacagtaggggcagttgaggcaactagagaggtttaacttggaaaacagaagacaaagagagaaatctccagtatcaccatgtttttggtagagtattatgtggagagataatcaggtagttacaaatcactggaagacaagagcatggatctccaggaatgactgctagatccacagtgtagaacctttggggtgattaaaacgttctggaattagatagtggtgatgtttgtacaaccttgcgaatatgctaaactctattcttgaaatgtgtgaaattttatggtatgtgtaaaacaaatttttaagtgtccattagattcagtaacatgattagtataatccaaataatacatgaaaagtcaaaaagcaaacaataaaaacaatggtttccaaagaaataaagtaatttttcaagacagattgaaatgttaggaaagagttttctttttcttttctttaaaaaaaaaatagtgaagggcttgaacaagttcgaatgttgataacaaaggagtttacaaagagacaaagcatgaagacatagaaaagataaaattaatcaatactgcaaaatttctaaaaaagtagaattagtgttcaaaacataggtaaacagattagtctttttaagtggtaggttaatttctttttacaaaacttcatgaaaagaggataccactagctagtcccacccagctgacccaggatatttacagattttatcttgggatgttaagcatgtacttagatggatgtgtctacttttttttgactagatgataatgtagtctgctggggagaagaaggagcaaaggtagaaagggtaaataatttgttcaacattagccagctagaaatggatagatttcatttttgaaatcatttatttttttaggatatatttaaggtgctcagcatgttttgatataactataaatagtgaaatgattactacagtcaagcaaattaacttctttttattttgaagtgattatatacacacatgaagttgcaaattagtatagataggtcaaatttacccgttacccagctttccacattggtaccatcttacataaccatgtacattatgaaaatgaggaagttgacctagtacaataaaataaacaacaaattttatttggatttcatcaatttgtgcatgcactcattttttgtacgtctttgtatcacatgtattgatataaccaccaaaaaaatcaagatacaaagctgttgtgccatcacaaaagaatttgtgacctctttatatgcctgaccttctgaaacctctgaaaataactagacttaatcataagagtaatgggaaactactgaagagtattaagtgataaagtcacatggcagactgtttcatgtttccctttatctcaaataaaaacaggggtgcataactgaagaaagaagaggcattagaatattatttcaataactaaggtaaagcatgatgatgtagaatagaatagtgactctagatatgcagcagagtggataatttcaaagatgtagattcaaaagaatatggtagttaactgaatgtggtagtcaggaagggatcaagctgagcttacctgacttggatatctgggttggtggtaatatcattcacagagatgtgaatcatgagagaagtggcttggatgtgctaagtttatttctttatatgtcaagttacttatgggttattcaaatgaagatgtctagaaggtaatttggtattggagtctgaggttcaggaagaggatcttgtttaagataaagatgtggctgtaattgatccatatatagtaactgaagccagaaaattgggtaagatcaatcagaatatggtatcatcgaagtcaagagaaaagaatgaggatagtggagggaaaaggaggggaaaggaggggaggttggggaggggaggggagggaaaaggaggggaaaggagaggagaggagagcagaggagaggagaggagcagggaaatgaaaggaggaaggaaagggaagggaaggggaagaggaagggggaaagggagagggagagagaaagggaaagggagagggaaaggaaaggaggaaggaaaggaaaggaggagggaaatgaaaggaaaggaaagggggagggaaatgaaagcaggaaggaaaggaaaggaggagggaaatgaaaggaaaggaaagggggagggaaatgaaagggggagggaaattttcagggcaaaacagaaagaatggaaggacagaaagatggaagagaggaaggaaggaacttgcacaaattgagggcacatgtaaaaacttcaaatatcatgtactcattacatataatttgtgctatataaaacttaatgcaaacttatcagcttttctttctttaaacctactttttttttacttactgtttttccctcgaaaagttctttattcttagaaggaatttcctcaaatatttatattcgataccaatattttttctaaaatgaaacatctctattttcttggcccaagaactgtggtaactagcttgaaaacagtgctatatatttgttatgtcaggaaaaatatagttgaatgaagtgttctctttcccataaagaaaaaagagtttcaagctacatttaagttttctttatactaccacctctccaagcgtttcagctatcattgttttttaactgcctctataatatacaatatgcagccaaatatttggagatattttggtcaaaaggtatgttagcaacaacaatagaaataataaaacaattctcaatgataactgaagctattgcataatttaaataaaatggaaaaagtcagcatcaactttgaattcattggcctttgtcaatttatgttgcaatgttatatttgtttaaggcataactctgaattcatttaatgacctagactatttagtgttggactttcatttaaaaaaaaaatagcaaaataaaatgccatctcgtagagtgctatttaccatatgagatccatctggcaataccatctaatatttaactttgaaggcactgttatcaaatagttgctctaaagtgcttataagaggcaaattcttctggtttttcttctaaggcatattatattactgataattttaggataacagatctgaatgtagatgattttaaatgttgattacagcacattatttaatattttaaatattgactaattcatttttaaattatttgtaaattagcagactatttcttttataaaattaaatattttgtattctcccaccccaccgctagaagtctttaaggggaatattataattttaaaataaaggatttaaagtaacagtttcctgttagttttgtggactgttttcttttccagtaatattttgagtccagttcaccataacttaccaataccctttcacattgcccaacccctagaaacacttaacagatttttctctccataggttggctatattcaaaagaaacattggcctatcaggacctctcagtatccatgttgtggacaagaccaaagagaacttaacactttgaaaacagctactttaccttatgtgcgactcataaacatttaactcagtgttactcagtgatgtgctgccaaaagtaatttaccaggttccaaatgctatatatctggataaactggtctccaaaagcaaacaaacaaaaaacctcattatatatttttaaagaaaaatgtggcccccactactaggtcagcagagaattctgagaatatataacaagtcctatgacttcagtcccaaaagctctggcacaggaaaacactataaacttcttgcaacaagagaataccatcaatactagcagggacatgcttatgtctacatttaggtgaactagcaaaatctttcatctgatatgtactaaattcttgaccattacgaggaaaaaaattatatctgaagtggcatattctaaacctgatgaatttcccacaaatcaaaaaaaaaaaaaaacaaatttctcacaagttaaaaaaaggagcctatatttcaaactattacttgtattgtaggcttctgaacaattttattatactcttcagtgttttccaggtttgttaaaataagcactttaaaaacaggaaaaaataagtttgaaaagataaattctagcactctattcctacaagataaagaagtcagattactcttttatatccaatggaatacatgaattagacttataagatggttggaaacacaccacaccacatttaatacacattccagaataaacttcaaataaaaatatgagctgttgaccaatagcagtattataaatttaaaatggggagctttttttaaatcacatattaaaaaagaagaattgggaaccatgtggaagcaaagagcaatttaatatacatacacaagtttagggattttttttttaaagagaaattgagagtcaggcattaaaggtatacaaaatttgtgtctcaatatattaccaattaaatattgaaatgtaaaattgaaagcacaacacctacactaaaaccaaaaaattaaataaattcttcatataaaatctaacaaaatatgtataagatctattatgaagaaaactacaaaactctgatcaaaggtatcaaaaaagaactaaataaactgagagatattccatgttcatggatagtaagactcaatactatcaaaatattacttcttcccaatttaatttttagattcaacataatcccaatcaaaatcccacaaagttattttgtggatattcacaaactgattctaaagtttatatggagaggcaaaagatctagaataggaaacacaatattgaagaaagagtcagaatgctgacactacccaaccccaaggcttactatatagctacatgagtcaaggtactgtggtatttgcaaacatacaacttagatcaatggaacagaagagagaggccagaaattgacccacataagtacagtcaactgttctttgacaaagaagtaaaggcaatacaatagagcaaaagtcttttcaacaaatagtccaataactgaacatccacatgaaaaaaaatctagacactgacattaaattcacaaaatttaactcaaaataaatcatagacctaaatgtacaatgcaaaactgtaaaacttttagaagataaataggagaacatctagttgatcttgggtttggcaataaggtcttagatataacaccacaagccagatttatgaaagaaataattgacgttagagtttattaaaattaaaacttccatatttgtgaaagacaaatcacagactagaagaaaatatttgctaaacacatttctgatattcgaccgtcatccaaaatacaccaaaaactattaaaactcaagaagaaaaacaacttgattaaaatgtgagcaaaagatctgaacagacatctcaccaaagaaatgcagatgaaaaacctgcatagaaaatgatcaacataatatgccattagagaattgcaaattaaaacaatgagatatcactaaacatctattggaacggctaaaactcaaaatactggcaacaacaattgccgtcaaggatgtggagaaatacaaactctcactcattgctggtgggaatgcaaaatgctatttggcactttcttaaaaaattaaacatacacttaccatatgatctagcaatcatactcattggtatttcattgaaaattatgttccacaaaatcctacacataaatgtttatagcagcccaatttataattgcaaaaaaattggaggcaacgacgatgtctttaagtaggtgaatgcatgaacaaatttctacatccatacaatggaagattattcagcactaaagagaagtgagctattaatcatgaaactatacagggaaaccttaagtgcatactgctaaatgaaataaaccagtctaaacagctatatcccgtatgattccaactatatgacattctggaaatggcaaaactatagataccgtaaaaaagatgccagggtttggaaatggggagggataaacaggtagagtacagaggatttctatggcagtgaaagtaatttgtatgatattatgatggtgggcacataacatcatgcatttgtcaaaatccattaaatgtacacccagtgaaccctaatgtactatagttataataatgcatcaatattggttcattagttgtaacaaatgtaccaccatagttaataatggggaaaagtggggaggagaagggtgaatgggcatacaggaactctactttctccccaggttttttttttgtttgttttttgtttgtttgttttttgtaaacttaaaactgctacaataattaaaggctattgttttagttaaatccatttatttctaaaatttaaaacaggaaacataaaacaactaagtttaagaagctgagtgtggtgatatgagcctataatcccagcaacttgggaggctgaggtgggaaaattgcttgagctcagaagtttaaggttagcctgggaaacatagtgagcacgcccctactaaaaaacaaaacaaaacaaaacaacaacaaaaacactaagtttaacaaatattatgtttgcaagtgtcaggtgacaggcatgtttcatttttttcaatattacctgtctagtgaaatcaaagataaatatgtagctgaattttacttactgtgaacaatcaggtggtttgaatttctcttttcagcagtagaaacaaacgttttggaaatcaatatggatttttaaaaactccaaaaaacattaatttgtatttattaatattatgtcttcattattatattgtcagaacaaaaggattcaggttatttataaaatttttaaaatgtgtgtttttatctaggaatatagtcattttaaaattaatgctactgtcaggatgaaggcagggagctctgatacttttcaaaccacctattctagcacttgagatctctgcagaatttgggcctatactgtcatgagaacttgggatttcaatagatctgctcgtggtttcaatctctagttggtctgcaaagaaattaactctgtgctactgcccaaaactatcccccaactttcaaggtttcctgccttgaaaacatgcacattttgtcctcaaaagagtacagaaaggtacctataaaacctgcactgctatggtctaaaatgaccaaaaagatgccttgcctataatctccgtatatgcaagactgaacattacattacatggaagtattctgtaaccaagagtctttgcctttaaaacaaaatatttttttttccttagaggatagctatttggggacttagcaaaactggacaactctcagaaacaagtttttcttcagtagaacacacactagggtttgtgcctcttttctttgttcagttttatacatgtataaaggaaagacaaaaaacaagagggtctttcatttttccacagttccctttcttgggtgccattcctctcattgttcatagatgaatattcagcgtattcttctcacacagaacacttggccagttttttcttttgctctatattaaagggcataatatttctttaactgaggaagacatatttataatataattttggattaagatttttatttacaaatcatttcatagaaagtttctctaaatttttagcaagagatatttggctataattggtcagatttatctgtcttcatttcaaggatctctatggtactgaaatttctgtttaaagaattttaagtaagttcatttatatacagttcatgcaacttatttacttatcccccttcaacatgccagccatttctttccaaatgttaaacagagttactaaaagttatgtgtgtgtatgagtgtgtgtatgtgtgtgtgtgggcctgtttatgaaggagaagcagagacagagggaaagtgggtagtcattgtattcaagccaacaaccccatttcaaaggagagggattcttaccctgaaaatttgttttcaattcttcacttttaaattaatacatttagaaaaggtttaatagaatgtggctgaacctcaattaaataaaaatttccacctcttgattttatttttttgttgtaattaattggtcattgggtttatctgtatacattttatctgtatttgtatttattgtatgtgtatttgtatttatttgtataaatttatctgtataaatttttaatgaccccaaatatatcatgaaaacatttaaatgttttcctttatctaggaaattatacacatgtttgaaaaccaaacagtttatatctgactagatgtttagttgctattactattttgaacttggaatggacattattttaaaataagttatttgtaaagaactgagatttactgcatcctaccttatgtcaggtactcatgtcttgtctcaaatcatgttctgaacatctctttgcattaatataattaatcccagtttacagaagacaaaattaagaaccaaagagagagagtaggtaacaatcaaggtgattcaggacttaactgacaaatctatcaacttctctctacctctactgctgccttcttagttgaggtcactgtgatttccatcctggaccactgaaccactgtattcaccttctaactggattcctcactaactgccttgataattccaatccattctgcaccagaagcaggtttattatgggactgtgtcatacttccctggcttcccatttcatttagggcaaaattctatgaggtctgtctctccatttctctttaacttcatttcaatctactctctttttagctcacagcattctacccacgttaatgtcctttttgttcctagacattgccaaatgttttttttttcttttttcttttttgttattgctttctgatctactataaaatgcttttcttctatggaggcttcaaacatcctattccttgccctggatttctgcatcactggatccttcttatcatttgagtctcaacagaaacaccacctcttaaaatggtcaccctctgattcttgcccagacctttgttagttactgtcagaaaaaaataacttctttatgtacaatgaactagtttgcttgtttgtttgtttgtttatcatctattcctccactccctctccattccccctccatagtaggacaggaatattctattttatttactaccctcatatagtttctagcacttcgggtactgaataaatatttgctggatgaatgaagtctttgttttctccactctaaaatgtgctcatattaattaaatatagtcataaaatttatccagttggatatatatatatatatatataaccatttgtccttagtaaagcttgaaatatgtgaaatcatggcacttcttttttttcccctgaatattatttcttggtcagaacattatcttcctccttggcaaaaatatattgtgcctttatgttttagcaaagtatctcaaagaatcatataaccgtagcaaaatggagctgaagggcaccttagagcccacctacccctatcatgcacctggcacctgagcctcttctacagcatcaagtggccactgagacataccaggctggaggaactaagtaccttttaaggcaacacatctaattcttagtgttttaatagcctaatatttgtttagcgttttggtactaatacattccaagtttctgctgtctactgacttttcactatttgttcccttagatattcatttgaaatctttttagtttaacctgatttagctgtttctttttattaaaaaaaactcgaggtaacttcttttctgatttaatgtagcaataccagaaaatcccttttgagtttagtctttcagattgttagtaaacttaatgatgagaataggagtatttgttatttttctgcaaaatagttctatctatatttctttctacttctcattgtgcaaagtctgttctttcattaagacactgtaattacattatagtcagtatgttttaagtaaaattctgagattcctttactttttcttgagtcgtctaaaaaaatatgttttgataaaatcaagtgaaatatcctttatgacttcaacttcttctggaaatacttgtcctctatatattttatcacttaatttgccaattatgtctactccttttgaataaggaggaaataccattttctgaaataaaaaaaagagaaagagaaaaaacagaaattagagaatattttaaacaatgtgttttatgtgttttttaaatgtcatcaaactcattcttcaggactttactcataataagctgttcaatgaatacttatttaacaatcgctctgtgttctattacttatccctttttctcacttatatgctcaactttttattctttataagttctttcttcttagcatataaacatgcatgattatctcccatcaaatatacataaaaataagcatacaatagaaaagaaagaaaatccttttttgaagatttgctctgttaccactttcttctctattatttctagtcaaatctttgaagagagtttttacttctttacccctcatcctgtttacagtccactgaaaactgacttctgcccttataacataatttaattattcccaccaagatcgcaaatcacaagacggtcaaatccaattgaatatattttgacttgaccttactttatatctcagatgttttgacattcttgacaactcctttctttcaaaaacactgtcctctcactggcttcatactttttggctcttctcctgcccttttctcttcctttgcaggctcttctgcttcttcttgaccctatatatgggttcttcttctgctttccaacagtctcttgctctcacatcatccttttccttgagtgattatattcacatcttcaacttcaaacatcacctttattttgatgactctcaagtctgtagctcctgcccttatcacagctcttctatatctctccagttgtatacatactgctgactatggaatatctttagctgaatgccccatagatacttcaacttatgacatatcaaactgcagtttttaaatcttcactccaaaatgatatttttctgttattcccgtctcttttaatggcactgtcatccaccaaggggatttggaagaaccttgagttcaagccctttcctttgtttccctacagttgccctgtaatctgtatgctgagggttaaaggcagggctaggagaaaatatgtttctattagatgagatgtatcatcaatattcaactggtattagaaaaataaccataaaaatgctcctgataataagcagctaaaacataaagaacatctttttgtaagtaatcgtgaacaatgtttgagagatagaaggatcattcaataatctaaaaattctaaacataattttacatatgaaaaaacagtcctagagaggaaagataaatgtctaatataaaagtaacttaatgaaaaagtgtggactaaaatctagatccacttctgtaagttttgtatttccttggtattagaagtaacttactcctccctgtccctgatctatgtaatggcaaacattttttcttggtaggagataaatcaggtcattacaagcatagaaagcaagatttaaacaaagtatatctgtaatacaaatttctgctagtagaatgtacctacattttaaaaagtgagagttctttctcagctgctttctaagtaatttacactatttatgctcccaccaatcctgtatatttcctatatgctcacaaaccatgaatattatctaatttgtaaaaccttgtcaatctgataaggaaacttagtatgtgtgtatgtaagattgaatatttttatacgttattggacacatatttttatgaattatgtttttagatcctttgaacattatctactgggttatttatatttcttgttcttgaattttcttctgtttcttggataatgttttcttctggaatgtattcttcaaatttttttaatgctatatatttttgttctgtattatttttacagttatgtcatctcatttgaatgtacaatcactatatagcccttaatctatatggttaaaaattgtgtgagtaaaaactctttgccactctccccaccccatctgaattcagattgacttatcctgtaagcttttattccaggactaaaattttgctttaacaaagccaataagcccaggtgcttagtttctcctacatacctattctcccaacaatgctttctcatcccctttcaggcagtgagaataaatccagtaaaataattacgttctatcacattattagtccagagctggcaagtagaggttacatatgtgcatgttcatgtgcctctacaccagcttcctcttcctgagatgactaggtatttactgtgatttgaatgtatccctcaaagttcatgtgttggaaactcaatctccaatgcaacagtgttgaaaggtgggacttttgagagatgattaggtcatgagggctccacactcttgaatggattaatgttatcacagcagtagctttgttataaaagcaagtttggctctttcttgctccccatttgatgagctctttcaccatgtgatgccttctaccacgttgggatacagaaaaaaggccctcactagatgcccaacacccttttatagggcttcacagcctcgagaacagtgagcaataaatttttctttatacattacccagtctgtggtattctgttatggcaacacaaaataaactaagacagtattatgtattttttcttttgttttacattttactaagtgccgacttattcgaaaaggtaattagctttggttaattatcaaagttttgtctttcctttcctacttttgtcccactaagcaaaaaacaaaacaatgagcattgacctttacctttctctggtaagggagtatggaaggttttctactactttgtaaaaatactgctacagatggtacttctggacccatgtggaacctgggggtccttgctgtcctgaagagaagtacacaggcctggctggcttttccacttactgattgtagaatctcaggcattgagcaaatataggcagtagccagggagcagttacatcaggccttaggtgaaacccactgctgtgctggcttcaggtctgacccaacacagtcatagtggtgatggccacaagggagcttgggttactccaccctgcaaaggagcttgggtcactctgagctttgcatagcttagagcagagaaagaaggactctgtattcttgggagaaaacaaggaaagagaacaagagtctctgcctggtaatcaagagaattctcccagatcttagccaagaccataaagcttatacctctataaatcagcaagaaccacagtgttattaggcttgggatgcccctaaagtagatatttcttagatcacaacattcaggtcttttcaaatatctggaacatctttccaagaagggcggctacaaataaacccagaaggtgaagactacaataaacacataactcttcaatgcctggacaaacatctataagcatcaacaccatccagggaaatgacatgacatccccgtatgaactaaataaggcaccagggaccaatgctggagaagcagagatatgtgtgacctttcagacagagaattcaaaatacctgtgttgaggaaactcaattaatttcaagataacacagagaaggaattcagaattttatcagataaatttaacaaagagaataaagtaattaaaaagaggcaggcagaaattctggagctttaacatacaattggcctactaaagaatgtctcagagtcctttaacagcagaatggatcaagcggaagaaagaatcagtgagcttgaagacaggctatttgaaaatatacaatcagatgagacaaaagaaaaaagaataaaaaacaatgaagcacacctacaggatctaaaaaatagcttcaaacaggaaacctgattattggccttaaagaggaggaagagaaagagacaggggtagaaagtttatccgaaggaataataacagagaacttcccaaccctagagaaatatatcaatattccaagtacgagaaggttatagaatgccaagcagatttaacccaaagaagactacctcagggcatttaataatcaaactcccaaagatcaaggataaaaaaggatcctaaaagcaccaaaagaaatgtaacaaataacatacaatggatctccaacacatctggcagcagacttttcactggaaactttataggccagcagagagtggcaggtaatatttaaagtactgaaggaaaaaatcttttaccctagaatagcatatctggtgaaaatatccttcaaacatgaaggagaaatgaagactttcccagacaaacaaaagctgagggatttcatcaacaccagacctgttctacaagaaatgctaaagggagtacttcaatcaaataaaaaaggatgttaatgagcaataaaaaaatcatctaacagtacaaaactcactggtaatagtaaatacacagaacaacacagaacattttaatactgtaactgcagtgtataaactgctatctcttaagtacaaagagtaaatgatgaaccgataaaaaaaataaatacaactttttgagacatagtacagtaagatacaagtacaaataataaaaagtttaaaagctagtggacaaggttaatgtgtagagtttttcttagttttctatttgcctgtttgtttgttcatgcaaacagtgttaagttgttgtcaccttaaaataattgcttataagatagtagatgcaagctttgtggtaacttaaactttaaaaaaatacaatggatacacaaaaagtaaaaagcaagaaattaatcatatcaccagagaaaatcatcttcacgaaaagaaaagaggaagaaaggaaagaaggaagagaagaccacaaaacaaccaggaaacaaaaaacaaaatggcgggagtaagttcttacttatcaagaatacattgaatgtaaatgaactaaactctccaatcaaaagacacaaagtggatgaatgaacaaacaaacaaaaaagatccaatgatctgttgcctataagaacacacaatacctataaagacacatacagactgaaaataaaaggatgggaaaagatattccatgccaatggaaactaaaaaagagcaggagttgctacacttagaccaggcaaaatagattccaaggatgaaaactataagaagagacaaagaaggtcaccacataatgataaaggggttgattgagcacaaggatataacaattgtaatataggtacccaacactagagtatccagatttacaaagcaaacatttttatagctaaagatagagatagaccccaatactataatagttggagactttaacaccccactttcagcattggacagatcttccagacagaaaatccataaagaaacttcagatttaatctgtgctatagaccaaatggatctaatagatatttacagaacatttcatccaacagctgcagaataaacattcttttcctcagcacatagttcatactcaaggatagaccatacgtcgggtcacaaaacaagtcttaagacattcaaaaaattgaaatattatcaagcaccttttctgaccacaatggaataaagccagaaatgaataccaagaggaattctggaaactatacaaacacatggaaattaaacaatatgttccagaatgacaagtggtaaatgagtaaattaagaaggaaacttaaagatttattggaacaaatgatagtaaaaacacaacatgccaaaatctatgggatacagcaaaagcagtactaagagggaagtttatagctttaagtacttacatgaaaaaatagaaaaacttcaaataaacaacccagtgatgcatattaaagaacttcaaaagcaagagcaaatcaaacacaaaattagtggaagaaaataaataataaagattagagataaatgagtagaaaatgaagaaaataatacaaaagatcgctaaacaaaaagttgttttttaaaaaaaggtaaacaaaattgacaaacttttagacccaaataagtaaaatcagagatgtaaaaggagacatcacaactgataccgcagaatttaaaggatcgttagtggctgctataaatagctatatagaaagaaatagaaaaatttggaagaaatggataaattgctagacacatgcaagctactaaaattgaaccaggaacatatccaaaacctgagcagaccaataacaagtaatgagatcaaaaccataataggaagtctcttagcaaataaaagcccactacctgatggcttccctgctgaattttaccaaacctttaaagaacacccaatcctactcaaatactctgaaaaacagaggaggaggaaatacattctaactcattctatatttgacagtattaccctaatgttcaaatcagaaaaaggcacaacaaagacacatttcggatcaaatggctttgatccaaaagacagtaacaaatgctggcaaggacatggagaaaagggaacccttgtacactattggtggaaatgtatattagtacaaccactatggagaacagtttggaagttcctcaaaaaactaaaaacatctaccataagatccagcaatccctatatgtgtgtgtgtgtgtgtgtgtgtgtacactaaaaagaaaggaaatgagtatattgaagatatatctgcactcctatgtttattgcagtgatatttataatagcaacctaagtatccatcaacagatggataaagaaaatgcagtatttaaacagaatgcagtactattcagccataaacagaatgagatcctgtcatttaaaacaacattgataaactggaaattattaggttaagtgaaataagctaggcacagaaagacaaacttgatatgtttgaacttatttgtggaagctaaaattaaaataattgaaccatagagataaagagaaggatggctatcagaggttgggaaagatagttgtttggggtagggggagaagtggggatggttaatgggttaaaaatagttagaaagattaaataatacctagtatttgctagcacaatggaatggctatagtcaaaaataatttaattgtacattttaaaaaaactaaaagtgtacaattggattgtttgtactacaaaggataaatgcttgaagtggtggatactcgatactccatttactcttatgtgattattactcattgcatgcctctatcaaaatacctcatgtaccccataaatatatatacctactaagtatccacaaaaattaaaaataaaaataataaataaatatttttattgagtttttttctgtgaattatacaatctcctaggctcttagtctgctaggagatgtagcgatgaaccaaaaagtgctcttatggatcttagggtatactagttaacgtagaagggttgctctaaatttcaaagtgtctgtttatcaaagcatctatgattatcggtgtcttttttgttttttgtttccttattgtttgtttttcatttgagtacttttctcattaaaacactagcttaagcaacatgtcaaggagaaagacaagacaatacaaaagacaacaaaacaagctcttcactgcattgcctcacccataaacttataaagtggctgtcactttataaaaggctaagaaaagctatttcgctgaaaaccttattgactgttttaatgacatcacatttgtagttctgttatgaggaaataaatcatggaaggagtgaggagaagtttagcaatagttgtggtcttacttgctgtgtggtgggtctcagatgccctatatgctatgcaagtagaaatcattgcttatcattttaatgtaagtttgattggaatgtgactaattacataatagttatacaaaaaaacatattctagatcagctaattaagcaatataaaatatgttttgtgcacaaataaagaaacatattgtttcattcctataagatacataaataaagttattttggactgataaatatttttttcaactttcaaaagttccagggtacatgtgcaggatgtgcaagtttgttacgtgggtaaatgtgtgccatggtggtttgctgcacagatcaacccatcacctaggtattaaacccagcatccattaactattcttcctgatgctctcacttcccccaacccaaacccctgagaggccccagtatgtgttgtccccctccccatgtgtccatgtgttctcattgttcagctcccacttataagtgagaatatgtgttgtttggttctctgttcctctatcagtttgctgaggataatggcttccagctccatccatgtccctgaaaaggacatgatctcatttctttttatggctgcatagtattccatgatatatatttactacattttctttatccagtttatcactgatgggcttttgggttgattccatgtctctgttattgtgaatactgctgcaattggcataaacgtgcatgtatctttataataaaatgatttatattcctttgggtatatacccagtaatgggattgctgggtcaaatggtatttctgcctctagatctctgaagaatctccacactgtcttccacaatggttgaactaatttacactccccccaacagtgcaaaagcattcctttttctccgcaacctcaccagcatctgttgtttctggactgtttaataattgccattctgactggcatgagatggtatctcactgtggttctgatttgcatttctctaatgatcattgatgttgagcttttttcacgtttgttggctgcataaatgtcttccttgagaagtgtctgttcatgtgctctgcccactttttaatgggattgtttgttttttcttgtaaatttgtttaagttccttgtagactctggatattagacctttgtcagatgggtagaatgcaaaaattttctctcattctgtaggttgtctgttcactctgatgatagtttcttttgctgagcagaagctctttagtttaattagatcccatttgtcattttgcttttgttgcaattgcttttagcgtttttgtcatgaaatccttccccatggctacatcctgactggtattgtcagattttcttctagggtttttatagtttggggttttacatttaagtccttaatccatcttgggttaatttttgtataaggtgtaaagaaggggttcagtttcaattttctgcatatggctagccagttctcccagtaccatttattagagggaatcctttccccattgcttgtttttgtcaggtttgtcgaagatcagatggttgtaggcatgtggtctcatttctgagttctctattctgttccatgggtctatgtgtctgtttttgtaccagtgccatgctgttttggttactgtagccttgtagtgtagtttgaagtccagtagtatgatgcctgcagctttgttatttttgcttaggattgtctttgctttttgggtgctttttgggttccatatgaattttaaaattcaacatcccttcacgttaaaaactctcaataaactaggtattgaaagaacatacctcaaaatagtaagagccatatatgacaaacccacagccaatatcatacagaatggacaaaagctgggagcattcccctttaaaaccagcacaagacaaggatgccctctctcaccactcctactcaacatagtattggaagttctggccagggcaatcaagcaagagaaagaaataaacatattcaaatagggagagaggaagttaaattatctttgtttgcagataacaggatcctatgtctagaaaagcacatcatctcagcccaaaaccttcttaagctgataagcaacttcagcagtctcaggatacataatcaatgtgcaaaagtcgctagcgttcctatacaccaacaacaggcaagcagaaagccaaatcatgaatgaactcccattcacaactgctacaaaaacaatgagatacctaggaatacagctgacaagggaagtgaaggacctcttcaaggacagctacaaaccactcctcatggaaaactagaaaggacacaaacaaaaggaaaaacattccatgttcatggatagaaagaattcatatcacaaaaatgaccatagtgcccaaagtaatttatagattcaatgctatttccattaaactatcattggtaaatctttttaagaaaaatttatagtataaattaatagtttaaagatggcaatttttatttagatagatcaaaaaaaatgctgtcacagagagatgtgaattgaactacctattgaggaagtatgttatcattaatgctttctcacaatttctttcatattaaggattttaaaaagttaaattatatacaatttcatttgtatcatcactatagtttctttatcaaatatgtgttgagtaaatgctgtgtttcagacattgtgctggaattggagatataatggtaatgaaatgaaggatgcctcatggatcttacagtctaattgaggtagaaatacaaatacacatacatatatacaacacatatgcacatactaaataatcacacaaatatatgaatatttactttcagataatgttactaaattgtggttatttctgtgctggcaagaaacacccagtttcttgaaatttacttttcaatgacttcttccaaatttaatcctgtttatgcctaaggatttttgttgttgtttttttaatctcttaaagttgcacattgaatcactgctgatttgtatgcatgaagttaccaggacttctaattttgtaccaagtttatatgtgctaatattttccattagtaaagaagactgaaagatgcctcagttgcctggaatttatgccaccaaggaaaaacagtgattagtgtgtttaaagagttagatcattgggttaatcatgctttgccatagtatcattgctatcctttaaataaaaaaaaaaggtttagttagaaaattttttaacaagataaaattaaccacagactataacgaaaagtaatttcagcaggattatttattctcccaaagttgaaaaaacaacaaaccaaaaaaggtgtatatgtgacatctacttaattttttaaatatgattatttccatcttttgttctttgatctccacatgagcagagacacataaagtggcaatggggccaagggtgctagatggcttggcattcattaactatggcaattagcaccatttagattgatatgttcccaagatgaaagtaagaattggactagacaaaaaaaatgatgatcgcatttgtgaaagtggaacaacactgaccaacaagaaacaaagaaacagagctcaccttaaaagacttggaatatttgaaaaattgattatgagataagataatttcaacataactacaattccttgaagagttattaatgcttcggtagcattaaagtaaaatgaaaagacaccagggcagtctgctttaatagcttgctggcttgaaccctaatacataatgttcttgtaatagtttatgggtgactgcagtaaattggtagtgaatgtttttcatttttttggctcttcatatcagatctgctcttggagaacattttgttctgagaatattatgaaggcagttcatctactttagaagttgcttgacaattttaatacagtgttaacttttctcccctccagattgtgtgatttttttgtcctttgtacccgacatcaatttatggtttgaaattcagcaatttgctcagttatactttacctaccctgactaaatattttaagtgctgccacaagaaaagaaaaaatctaatttttcccaatgttgttgttacccctctctgtttatatagcagtttaaatctgcccttcatcttgacagagaaaaaattttagatggattaattttgaacctaaataatttgttgacaaataatttatgatcatattcaggggttgttttgaggtaaaaagaaaactgcattgaatgaattataccaagtgaaatcatggtattttaaacaaaatgaggtttataattacctgggatttagtgaacaaaagtatgtgatgcagggctccctgaagaatttagtgcatgtcctatgttttagtgcttcaagcagcaaatattatgtatatacaataaaaaaggaagttgcagacttaatacatactgaaatggtctcaatgttaacattagactcatgaaaaattagcggacatctaagtactttattcgttcttttagtctttgctgtacctaggaacatttgtttcatataaaagttatattacaaaattaatggactgagggtggaaagagaatttgaaagaatgtgaaataaagtctggatatatactgaatgcaggtggaagatgtctgaggaacattaatgacaataaagagaagtctcttcctaagttacagacatccaaaaccaaaataagagccaatgtggttacataaaactgcaaagaaaatcttggttggacagagaactccgaagaggtagtaaaaggaaaaactgagcaaactagggaagacaaatgcagagaaaagttagaaataattagagaagaaataaaatgcttccacaaaaataagaacaacaaaaattcaggagataaatgcagaacagtccagctaacagaaaaggatttttgaactgtgtatgcaagaagcagacagcatgattggaaatgaagtatttgctctttcctctaagagtggaagaacaagacattcctgggcagcacaactctgcgtaggattagttgcacttcctcaaatgtattttcaagcaaaaagctgaaacccaaatgtcttgagccaccagaagtacccaggctcttatgtaatacaggctttagtgttttattgcttattcaaaaagacaaattatattttaaaattgatatatgtgtgagcatggttatgctacacctataaattaccaaacgtaataccaatagcagccaaccaacagtttagcctcagtattttcacaacagttcaaaatgttttgttaaatcccatgaaagtagcttcagtgacaaaggtttcagatctttgcaaatgataattaattcagaggcatataatgggaaacactacagtcaggtctagacaggtttagataaactaatggcccaactagttatggcagctacagtttttaacttcaagtaaaggaatcttaaagcagttcaaggaagaaacattttctttcttttcctttttaaaacatttaattgtcttttttgaggatgataaaagataaaatctagagactttattgtactgtactcattatagtctctcccctgcctcatatgtaaatctagtttgcttcttcatgtttattcatctctactttaaataaacatattgtacatatactctatacacacacacatataatacctattctcttccatttatgcttacattgtaagtcttttaaacatttattgaaacatttttgttggattgactctacattgaatagctttattataaatgaaagacttcccttctattaaacagaaatttcttttaataccactatgaggcagaacattattgctatggtataactttgtacgatcgaatgtcctactggttagatctgtgagttaatttaaatttttacaggctgttagatggagtaaaaggcaggatacagccatggactgtaggttttttatcctttagttacttctttaacttttaatttacattaatggacaagtttcatctagtctaattttatgtattacttgagtctttcctcatatttttggaatgccatttttaatttagagtgttttctaagttaaagtcttaattgttcttttcctgaataatagcttgcatgaatacaaagaactttatgtttgaattttggatttagtcagcttgatttttcactgaaatcaggcctaaacatatgaagttcagcagcaaaaacaaaagcaagcttacttactgaaaacgcattgtctttctataacaagcttactgtaaagactggggtagtatgtatatttccatagatacatatatatagtatctgtgtgtacacatatacacgtaaagttaagaaagtttgtaaaaaaactacacatacgcaacattagaaatactgttaaatatttatgtgtaatgaagctgttcttttcaatgatgtcctacattgtaaaggttttatttaaaaatttttatataatgaatgcaaacttgagtcactgttcaaacatgaatattttctcaaatgaacatatttgcatgtgttatgctatataaactgagttctgtaaaaaggatcctttttcttctgctaccaagaaattctacttttataattcaaacaatctactctctcccacactcaaaataagtcatcattacttaaaatatgtgtagtgtaacaatggaaatgtttgtatatttgtcaaactaaatattatgttaaaatattttatacatttccactgagaatgctcttcttagttaaaaataaataaaatttaaaaaaatttgaatggagacattttgaaagtggctattccaggtaggataaatatttaatttactccatagcataataattttaggaatcacttcattttgaaaaattattctgaatactagcaacattttggcctttaagacactttattaacagttttgaagaaaaagttgagacatttgttcaaaagatttgaatctattcacataatagttcagacaatctccatttttaaattcctaaattttgaaaatttaggatacgtaaaaaagataaattaaggaatgatggtttaccacatggaaaaagtattatttataaaaattttaaaagtataatttatttacaaaatttagttatttaataacatatataaaaagactcaagttgatattctaaaacatacttttaaacaaaaggaactgtctattacataatgaaaatttatgcaaccaaaatgagtattattctttgcaaagtagttgccttgggagacagttctttaaacagtatagctattgctctaaatattgcacaatgtgcgaacaatgttgaccttcagtgccaacaacatatcattttgaatattttcactgacaactgctctttaattttcgttgctttttagaaatagtcaagagtaacttagagccatgtttacctgacagagccaagtttattgccatagcaaaacctggcctgtatagttatagaaatcccttatcttcatttcttcacctccaactctacaatctactccaatttgttgtcctttgcctcctctactcccttcaaactaatctttctaaggctgtaactatctgttttcagtcaccaaatgggcaatcatttaaaaaatattatggaaatgataaaagccatttatcttgggtggttttgtgcagtttctaaaggcagtttcaaaagaggtaagtaactttgatagtgatagaatcattggaataaatatattaccttcactatgacaaggatatttggatgtttaacttttggatatctgatatgtattttccattcagtgcagtatttattgagcacctatattatgcaaaacactgtgcgagatgctgagacaaaatatgaagatgaagaaacaatgagaccagccctgactcatgaacaaatagtgaggtaaggagataaccttcaatgactctactgtgagacagatttaagtgttctcttggagttagaatgcactatataaatagagagggaagaattcattttaactgaagcatgacagttaaattgtgcctagaaggacagagattgaaaccttaacaggtagaaatggaagaaagaactaggaagaggaagtaagttgttcaatgtagaatagggtttctatctttttttaaaaaatggacagtttactttctattcatagcttacacagtaaaactgtgcttgtttcaactttgctggcactacacaatatgcctagattcaattctgttgaatcccataaactctctttttttgttttgtttttcattccatctttctatgcctgtgccccatgtgttctttctcagctctcatgtctgtgtctttttcagttctgcatcaccttcttttcttctacatctgtttctcacctttccctgtctctgctatcccctctcgtagtcatctttccgtcttgattgccataaggaattgaaatatgctatacttctctttgacaaatccaaacttgaataaactcttacactatggagttttcaacaaatccttactctttgtacttttttccttttttaaattgttccttcccttcacttaattccttgtaatctgtccaaattttatattctcctcccccacttttctcccttttctttctctcctttttgattcttacactacactactggtgtactcagaggaaaaaatgatgctaaaataaagaaaatgttctttacaatcagaatattattaaccagtacttccaagcataactagttcaatcataaaagttcatttaagatttcaatgattccaacttatatctctttatctctttttgagtcaagtattaaatgactagtacttcaaagttaaatgtattttactgtataatttttgagactgatcatttatatttgatatctatatctcatttcataactatactacatggtctaatgtatagcatatggaaagtttttgtagcttacctcttcttgcaagactaaatgagaggactactgttggcagaaagcaaagttggtcaaggccaaaaataggactgactgttttctttagaccctccctttttcttccttgtaataatcttgaactcctagattccagtttttcctttatttagccaataaatatttactgaatcctaactattttccaggaactatggtaagtgctattgatagatgtattaggccttctttgacacggaagagcttacaacctaggtggagagggagaaacataactgcaatataaattgataaggcccataatgggacgaagaacaggctactatcctcattatacatctggtactcagagacctctacgttattccttggattttccccatacttgcaacccacctttttatcctcctcattaaaacttacctgttattgaatcccattttcccttaaggcaccccttttggataggtgctttgggaaaacaatcccacaaattaactcacactggatattaaaagagtaaagcatatacctcacatccctcttgcattttaacaagtcagtccatttgaaaagaactggttgctagtgatgggaatttcaagaactgtacagtaggccattagaaaagtaaaactttcctcatacacttcaatcacaacagagaggggttgaccgtacaacataaaacttccttttagatgccctaacactattattatttaaacaacatagcagctacatattcactaagaaaatacaattgaatttaattgttgttagtagtagtagttaccgctagtaactactgttactaaaatagaaattatatatcgatttaaaattataaaatttgccttattctttctttaacttttattttaagttcaggggtacaagtacatgtttgttacataggtaaatttgtgtcatgggggtctgttgtacagattatttcatcaaccaggtattaagccaagtatccattagttatttttcctgatcctttccctcctcccaccttccatcctctgatgggcccagtgtgtgttgttcccctctatgtgttcatgtgttctcatcatttagctcccacttataaatgagaacatatggtatttggttttttgttcctttgttagttcgctaaggctaacggcttacagccctatccatccatgtccctgagaagaacacgatcgcattctttttatggctgcctagtattccatggtgtatatgtactacattttctttaaccagtctatcattgatgggcatttaggttgaatccatgactttgctattgtgaatagtgctgcaatgaacatacacatgcatgtgtctttataatagaatgatttatattcctttaggtatattctttgatattattatgaagattcacatgaaatagcaaggaatggttttctagttggaaaagtatgattcccacaataaaagtaataaaatataataagaaatatttacatatatcaagaaaaaatgattcatgggatcacaaaataaaaattatacaaattgaggaaagccttatttaatataatgtctttaggaaaaaaattagtatctgtggacctgggattcctcccctgtaaaatgaagggtttaaataagaaaaactccactttcttgcttccaggcttaacacatatgtgaatcatttgcataaatatttctcaattttcctactacatgaaattttagttgctacaatatcacaattaggcagtctgcataaataaaggagtttctcttatatttctaaatataagagaaatatataaaatatactaaaatactaaatatataaaatatttaaaaatactaaatatactaaaatacagtactaaaataatgcctaacacaaagtaactgccttagcataatttaggtggctgattggatggattaaagcttggattaatagaaaaacacaatgatgcaaatgtgaagtcaggtatatgtctacacatctaacaacatttaatgagagacactgaagacccagaaatgagtatttttacaggcttacaaataaccgatgttcaatttgggggtcaaaacaagaaatagagaaaactgaagtaagttaggtaaggtccattttgactaggattatttctggcaatttcccctcatctactttctgcaaattcatgcatgttcactgtactgtgcttactgacaatctgtaccaaataactcctggcagtttgaaatcatttcatctataacatataaataccttatttgcttcaactgtacaaatgctggaccccatctcaccaaagttttctagaatttaattgttcttcacctaacatctttaaaactcaatttattggtctgtaaaacagtaagacctacattatagagttattgtgacaatcagacggactcaaagcatgtcatagtttcacttacgtatctaccaacccactatcattagccttctacttgagaccaacccctttacctaagtactaaatgtggtaatccttgaagtctctgggacttttctatacaattatcatttttctctgcttgacttcaatgtcttctctgctggctctttatttttcaaaacatgtaaatcatttgtattctaacattaccttgactctgtgcctctttttaccaacaattctccctcctttcatcacctgtgtatattgattaaataaacaaaaaacaattcaaagtaattttatatgaaaaacattgcgggaggaaaatagaataaaaagcaacagtaacaatataaaaaaaaaatcacctgttgtcaaccacaggcatttcttcccaggtgtaatatagttatataaaataaacttgtcatcagaagttttgaatctcagtatttttgcttaatattaaattttatatagcattaccttttctaaaaaaagtgttaaaatagtattttaatgactgcataatatcctatagtaagaatgaaatataattcatttattcattcctacatttagacatttaggtactgtcaaaaatttttgctactataaatggttctgataaacatgcttgcagataaatctttgcatacgtctctgaatatttctacaaaataatcttcaagattggaaattattgactaaagtaaaataaacaatgtgaatagcttttacctttctgacacaagcttaaagtctttgttctttcattaagggaaatttttccatttaaatttatactaaaaatattgtgttattgacaaggcaagtaaagaaaagaaatcaatgctactgaatcaggcactctgatggatattctgtctcttcctattcaacacattttcctttggcaatctcttttcatgagcttatcaactaccaatgtattgatggcttccaaatttctcttcaggtatgaattctcctttgagcttgaaactcccatgtccaaaggcttcttgactatatcctatggtgtgtcatgcagtcctttggattctgcattaataaaagtaaagtattcttacttcacaaaatattctgtaaataattacccaattttgttaatcaagtcatatggaagacaatgcataaatatacaaaataaagaataagaaatgtactacaaatattcagaaagcattaaaatatgtcaaaatactgttacagatatatactaataaaattgaaaatctcaggacataatcttctaagaaaatatacattttcaaaattgactctataaatggaaaattttaacaggccaataaatttaaaaattaattaagaaaggttccagaaacaggtggttcaagagcaaattctatttaatttcctttttcaaaaattgatagataaaattctatgtattttccatgtataacatgtttttaagtatacataccttgtagaacaactaaatttagctaattaacacatgtattacctcacagttatttctgagtaaacatccattcattatttttcaagaatacatgtattattaactatagtcatcatgttgtacaacagatctcttaaacttattccacctaattgaaatgtcatatcatttgaccaatatctccttaaaccccagttttaatagaaaattgaatttcattaagttttcaaggatcaaaataaacccataacatagtaacaaaaacaaaatatttccaaattcattttctgaagctagcaaaagcctaaaacagtacagcaaaggaggctactgagcactgttacttcactccattgaattaggactggatgcaagtgtaaagcatcagatttatagaacttactataaaaaactctaaaatatctcattaacattttcatattacatattaaaatggtaatatcttggctatattgttttaaataaaatacattattaaaattaacttcatctgtttctttttactttttaaaaatgtagtcacaagaaaattttaaattgcatatatggctcacattgtattcctattagtattaatatagataattttgcttataaggatacaaaacttctcagcgagttaaatataacaatatattaaaaataatttgtgatgaccaagaaagttgaaagttttccattagaatatctactaatatatatgataaatttatataagtatgattttaaaaacaataattttgatagtgctgaaaatgcatgcaataaaaatcaaccacaattcttaattttaaaactcttaataaactatgatgaaactctttaatgtaatgaagaatatctacctataaaatggttgacactacacctaatggtgaaaacattagtggtattcccagtgaagccaagagaaaaacaaactcttgctagcacttattattataatttggaagctccagcaataccacctaacatgaactataaacatgagaaaggagtagaataaaaaaattaagaaataattagaacttataaatcagtaacctgcttgtttactatacacacacacatacacacacacacacaccaaaaacagccatttaaaaatgcaaaggaaagaacaatctcttattaccaatgataaaaaataaaaactacatagaaactaacactacaagaaaaatgtcagacttatatggaaaaaatgtttttctaagtaatgttaaaaaattttgaataaattaagacatcttccagatgagaaacctctatgtcaattctccctaaaacagttcataaatttaatgcaaccactctcagaagtccaataaaattgaagggggggggcagtggtagagagaccttgattaaataattctaaatctcttataaaaaattggttaagaatagccagtaaccttttaaaatgaaaaatactaaaaagaaacttttattagcaggtttaaactgtattgtaaaagccacaataaatagtgtagtcctagtaaaccatatagaaactgatagaactgaagagaaaaaataggctggaaatcaaatagaaagacaagaaacaagcctatttgtaaattaagtatttagcatatgataaataatgcattttaaatcagtgggaaaaacatagattttttttcaattgatggtgctgagacaactggttaaatatttagaacagagtaaatttagagcctatctcacactgtatatcaaaataaaattccagatggtttgaagagttatatgtaaacaataaaaccataaaagaaatagaagcaaatacagaagaatttttaatcttatcttgggttggagaaggtcttcctaagcataaaagcaaaggcagaagccataaaaaatgtaatatggtttttaaaaatagaatatttgaacacataaaaatgaaaggtcagtatagcaaaaacaaatgaaactaaaaggcaaacaataaatttagaaaaaactatttgcaacatatgacagagtatcatatagcagctgaaaacaatgtcctatgaaaaataattaaggacctgggaaaaacaactagcacatagtgttaaacggagaaattgttataaaacagtacatacattattataggaactttgtaaaatacacttacatttgggtataatggtttcccacatataccatgtttataatttccatgcttttatacatatagtcccctttgactgaagagatcctccttccttccctgtctatacatctcctattcatctttcaagcatcatttctgacatccctttagacaacaagaagtcttctttgaattatcaggctggaatatgtgcccttcctttgtttgcccatagtacattgttgtacaccatcaaattaatgctatttaatattatctgtttacatgtattactccacccctatgattaaagttccttaagagaaagggtaatattttacctctttctgcatgctcatttcctagtattatatctgtcaattagtacacattcgaaaatattggtttgaattattgctaaaatgtcttctaattaagattattccaaaatgaagctaacatcaatagggagacaaacaacacaagaggcatcaaactgtataagaagtctgaaagaaaaaaaagacttaacgtcatgagagatgattctgtcctcattttcacgttaaaccagaagcttccttcagggtacagctcaatgagtcaccctagagtattctaggtatatattgatattcctaaaaatctaaacatatgtaccatatacaaaccgtgtcccacaatttatcacttaaagtttattgtttttaaatgatttctcatttatgagtcttttctctcattagacgttaatctctgttatgtgaagaggtcatgccttatctaggcagatatcctacaaagtgtttggctaagtaccctagtactttaataaaaattcaatatgcacaaattttctatacagctttaagtaattttctgtttttatttacatacatcccttcataattttctaagaaaatcaggatctactccaatttcctcattacccatcatcatccagaatgatgaagagatgtatagattattaagaaaatatttgcgtttgctgagtaaacccgatattatctaatcaaaagaacagcttcggctgtgctgctcctagctgtgctagtccacacagctttcccagttttcatgaattagtggaggtaatgttaaaccacttttctagtaagagtgcataaggatatttaagtgagctcatccctctaacaaaggaaagaataattttcattaatcattattcaacagtacatcttcttgaactaaatcatgagaggaggaacttatgatgttttttattagtcaaaacattttctatatatagcttagtatatgcaacgtgccaaattacagaattctatttactgctaatgtcaatttaccaccacattgcttgatataattcaaagttttccaaggagctatttgacctcctatagactgaaaataaaatcatgagatttaaattacttaatgccaaaaaggaaagtcatctttttctccttcttatgtctttgtttcataaaactattatcagacagtccatgcaaacaactaaaaacaaaaaattatatggtgtagttaattgaaaaaatgcttttgctacacacagaaattgacactaagtgctgtattagaaggaaatcagtgattttcaattgacattgcacaggaaatcatttagtgtcaattgatattaaatgggtaaaattgtactgaattagtacaaaatgatttggtggaaaaaaatgtgcttccattaggtgacttgatattaagtgggcttaaatgtaataagttttagaggtcactagtcaacaaaaattggggcatgctattcaaccctgagtacatcagactgcttgctcttaataccctcatcaaaagataagttagtgtcatactatcatgacaaaattgtcttcctttgggctttcaagggaagtgggaaaattcaaattgtttaaatgagctaaattagccagtggtaaggaccatgacttcttagatttatctggtggtcctaatcctttaaaaatatttttttttctagaatttttggcatgaaatgaaaggcaacataacagcacgtattttatgtaatatggtccagattgcgctttctttataaaatggctttgacagtaagcacacaataaattatattgtgttagggagtgatatgattatatataatgaagtaaccactttattgatcttttaagaaacctatgtttttaaacctgagtaatgaggaaagagaagtgtgtggctgcaggagacacaaggaaggagaagaaacaggaaaagttacattacacagtcactacaagaacaaattgaataaaatattatagatattttctgggaagagaaatgggggtttgtgaggtacagaaaattgtaaaactcatttgttacttagtaatacaagaaacaataacaataaaacagacatactgggaacactccacccaacaaaaacagaatacgcaatcttctcaagtgtatgtaaggcaattaccagtgtccaggatagaccacatattaggccacaaattaagtctccatagatttaaatagacaaatatcatacaaagtatcctttctgaccacaaagggataaagttagaaatcagtaacaaaatgaaaacagttaggcaacatactcttaaacaaaggatcaaaaaagaaatcacaagagaaattagaaaacacccagagatgaatgaaaaagtattatcccaaatcaaaacttaagaaacacagcaaaaggagtgctaaggggaaagtttataattataaatgcttacattaaacaacaaaaaagacctcaaatcagaacctaactttacaacctaaggaactaaaaaaaaaaaaaaaaaaacaaactaaacccacagctagcagaaggaaagaaatacgtattagagcagatgtaaaatacagaatagaaaaataagataaaaccaataaaaccaaaagttggttcttcaaaaatattaataagattgacaaacctttggatatatatactaagaaaaaaagagaagactcaaattacaaaaatcagaagtgagagaggaaacactactactattctacagaaataaaaatgattataaaagagtacgatgagcaattgctaggccaacgaattggataacctagttgaaatgtagaaattcctagaaaaacaaaacctaccataactaaaccacaaaggaatagaaaatctgaatagacctatataacttgtaaggagattgaatcaatattcaaaaatctcccaataaagaaaagtcctggacctgatgacttcactggtgagttctaccaattatttttaaaaagaataatatcaactaaagtttcctcaaaaaacaaaaaattgagctaccacatgatccagcaatcccactgctgggtatgtatatacccaaaagaaaggaaatcagtatatcaaagaggtatctgcactcttatatttgttgcagcactgtttacaatagctaagatttggaagtgtccatcaacagatgaatagataaagaagatgtggcatatatacataatgaagtactattcagcaataaaaaagaatccctctcaaacttttccaaaaaaatcagagaaggaaacactccctgattgattacatgaggcctgtattaccctgatgccaaaaccagacaaaaacacaataaataaaaacaacagaccaatatctcttatgagcattgacaaggattgaaaatccttaacaaattatagcaaaccaaattcagtagcatattaaaaggattttaccctatgaccaagtaggatttgtcgttgaaatgcaaggatttttaacagatgtaaacccatcaacataatacaccacattaacaaaataaagggaaaaaacaataatcttgattaatgcagaaaaactacttgacaaaatctgacatccttttataataaaaatcctcaaaaactaagaataaaagtaaaaaaccctaacataataaaatccatgtattaaaaactcacagctaaaataatactcaagggtaaaatactgaaagctcttcctctgagatcagcaacaaggcaagtactattccacataatactgaaagtcctagtcagagcagttaattaggaaaaaaagaaatgaaaggcacccaaatcagaaagaaataagtaaaattatctctgttcacatatcatatgatctcatatgtaaaaaacatattccacaatttccaccaaaaaaaaaccctgttagaactaataaataaatacaacaaagcagcaggataaaaaaaatcatcacgcaaaaatcagtcacattgctacacactaacactgaacaatctaaaaagaaaactaagaaaacaattccatatacagtagtatcacaaagaataatactatttagaaattaaccaaagaaataaaatttttaccaataaaatctataaaacttttctgaaagaaattaaagaagacataaatgaaaagaattgtgttcacgaattggaaggcttaacattgtcaagatatcagttctgcccaaagtaagatataatgtattccctataaaaatccaaattatgttttcacagaaatagaaaaactcatcccaaaattcacacgaagtatcagagaacccccaaacagccaaaacaaaactaaaaatgaagaataaaaccaaagcactcaaacttcctggtttcaaaacgtactacaaagctacagtaatcaaaacagcacggtactggcgtaaagacaaactaagaaataaaatagagtccagaaataaaccctcaccagtgtggttaaatgatccttgaaaagggtgctaaaattattcaatggggaacagacagtcttttcaataaatagtgattgggaaaagtgggtatccacatgcaaaagaataaacttcaatccttacctaacaccatatataaaattaattcaaaatagattctaaatataagctttaaatataagatctaaaactataaaactcttggaagaaagcatgaggcaaaagcttcatcatactggatttggcaattatttgagtatgacaacaggccataggcaatgacaacaaaaaagacaaattgagcttcataaaaattaaaaattaaatgcacctcaaaagtcaccatcaacagagtaaaaagccaaaccactgaataagggaacatgtttgcaagtctcatattggataaggggttaacatccaaaatatacagagaactcctaaaaacacaacaacaaaaatctgaatcaaaactgtgcaaagaacttgaatagacatatttccaagaaagatatacagatggcaaacaagcacatgaaaagatgttcaacatgactaatcatttgggaaatgtaaatcaaagctacaatgaaatggaatctcacaccaattagaattgctactatcaaacacacacacacacacacacacacacaaaacaagttttagtgaggatatggagaagttggaaccattttacacctttgatagaaatgtgaaaaacagcatggcagtttctcaaaaagttaaaaaatagaactaccatatgacagagcaattccacctctgggtatatattcaaaagaactgacagcagggtcttgaagagatatttgttaatatgttcatagcagccatattcacaacacccatattcacaattactaaaatatggaagcaattcaagtgtctattggatggataaatggatacacaaattgtgatatatatacacaatggaatattattcagtcttaaaaagtaaggaaattgtgacatatgctacaacatcagtgaactttgaggacactatgctaaatgaaataaagccaaacacaaaaagacaaatattgtatgatccaatttatatgaagtacttagggaaattaaatcataaagacagaaagtacaacggtggttgccaggttgctggtgggaaggaaaaatgaggagttgttcttttatgtgtataggctttaagtttgcaagatgaaaataattctggagatacttggtggtaatgggttcacaataatatgaatgtacttaatgccaccaaactgtacagttaaaattgaataaggtggtgtattttatgttatgtgtattttactacaataaaaaagttgaaaaaaaaatgaaagaaaagctttgtgatttttttttctttcttttttttttccgagacggagtctcgctctgtcgccaggctgaagtgtagtgtcgcgatctcggctcactgtaacctccgcttcccgggttcaagtgattctcctgcatcagcctcccgactagctgggactacagtcttgctctgtcaccaggctggagtgcagtggtgcgatctcggctcactgcaacctccgcctcccaggttcgagcgattctcctgcctcagcctcccgagtagctgggactacaggtgcgtgccatcacgcccagctaacttttgtatttttagtagagacggcgtttcaccatgttggccaggatggtctcgatctcttgacctcatgatctgcctgcctcggcctcccaaagtgctgggattacaggtgtgcaccgcagcgcccggccactttgtgattttttaaatgtgacctgccccaccccaaaaatacatagatagggaactcttcatggtaatcactgggcttgaagagatagcattaaccttttttctaatttggccctgagactgaaaaatatatatatccataggaacccatacagaacttacgatgaatgtccacgaagtaaaccaagaacattccccctagcattagcagagagcattctaaaatataatttagtttcatcacagaggaagcttacaatgaaactggagctacattcaggacagtctttaaggttcaggagaatgatttgctgattcaaatggacaacagagaaatctgattaaataataatatatttatgatcattactgtttattaagcttttactaatagtgaggataatcttcagcattcttcattaactatcaatcgttttgcttaacaatctgataaggtccacctatttcagaaacaaagatcatgagattaagaaaactgaccaaagtaacaagcacagtaaggtgttaaacccacatctatctgaatccaaagtaaagaaatttttggggggggcggagtgaggaggtggaaacagagtctcactccgtcacccaagctagagtgcagtggtgcaatctcagctcactgcaacctccgtctcccaggttcaagcaattctcctgcctcagcctcctgagcagctgggattacaggcttgcacaccatgcccagctcaatttttggatttttagtagaggcagggtttcaaaacgttggccaggctggtctcaaactcctgacctcaaatgatccgccagcctcgacctcccaaagtgctgggattacaggcgtggccaccatggtgggccccaagtaaagaatttttaactaggtaatttggactttcaaaactgggacatagttggtgatttaaaataaaaatcctcttgcaagaatctgaagctaaaatgttccaaagcacaacaggagctgtgaacaagttagtagtctataaggagaagtataaatacattggaagaattaatctagggggaggaatgtggtttaagcagtaattgataggtgaagatgagcacaaaaatcagaaaacacataactgtacctgtaagttgctattcctttaaatcttgccttatttttaaataaataaatatgctagaaaacatttattctttgtggttttagtacatagaataatattttaatttccaaataccacaaatgaggtctaaaacatgattaaataattaactccattatccttacaatagaaaacttagctattcaaacaatgaagtttcacatgggtgatgccacctcctacattgtcacacattaaaaagttatagtcacaggtttttaaagaaataacagcttttccgggttaaacttccaatctcaagcctattcatgatgataaatgtcacagggtcaaagacctacagggaaaatctacgttagctctaaggtgggttaaccagtacacactgattaatccaaaatccatttgttaggaacaaggcaagtactacacacccttcattttgaagatactcataaacccaattaacaattttcaatgacaaagcttgtccctttgtatgtatgtataataacatcatagaactctatacaagcacatacaaaacaaggtgaaaactgacttggccatacaggtttgcaatctaactagaaagcataaatatcacaaataaatagatgtaaatacaattagtacattgataaacatacttcatactcttatgcagtaaatactcaaaaaaataagcaatgaaaataacatagaatacttgttgaactgactaaactcatcccagtgaagtttcctgaatacattttccttgaatttttattataaaactgcagctaaattttgcctaaacaagtttatccctaaatgtaaacaatgcatccaacattatagaaatcatcaatttttaaaaatctgttgttggtaaactattaacgtcattatattcaaaggaaatgttaaaattattaaaattttaatattttaattctaaaaactatatactactatcaacatttgcttcacacatctgcaatatgaaagtggtaacgtctaaaggtttaacattttaaaataatattttcaccttttagccattgcattatatcaaagttatgcaattttttacctttttattattattttttgcattctctccctttactggagattattgccttcttctctgacatcataactagataatatctcaatgacctgttactgtatccttggataagaggagatagcatctccagtaaggtcaaatatgagtcaaccatgtgatatgggtactgaaaaattccaattaaatcttaaactgacctgacagaataacagtatctagaatgagggagatgacattcccactctcatcagcaatggtcagatggcatgatcaatactgtgatacatgacccagaagcacaataatatcctaagaagggggaagaggaagggtgaaagactagaatcataacatatttggaatggtagaaagaatcaagggtattacatgttgactatgcgattaggaaaacaatcgggatagaaaacgtttcaaatgtttgaaaacttcaaatgagattactctgtatgttcccaaggcatatactattaataaaatgatgggttgagaatactagatacaggtttcaactcaaagtaaataagaacctcttaacatcagaattgctcacagatgacgtgttgcttgaaatattagtgaacatatttcaagcagagactggaggtgtttaaagcagttttacaatatgattctattagtcttctcaaagctcagaattaaaatatttaataatgctgagtggtggatgtttttacagtgtggcctggaatctgcagttatcaacctacaagtgtctgatttttattagcaaagtattaaaaagttgttcattttcccaatttaagaagaagtttatgcactggacattgcttttcaaaagttattttttgaatagtggtaaccaaaggttggggcttgcgtagtggggagaatggggacatgttggtcaaagggtacaaaatttcagttaggagatataaattatggccatctattttacagcatgaaaacacatagttggtaacaaataatgcactacacacctgaaaattgctgaggatagattttaaatgttatcaccatacacacacatatacatacacacaaatgataagtatgtgagatgatagatatgttaagtagcttgatttattatttcacactgagtatatatatgttaaaacatcctttgctcaccataaatatatacaatttcatttgtcaattaaaaataataacaaagttacatatataattttttttatttcaagtggtatggctttatataatgctgaatgactcactgactgattgaatcactgtcattcattcaacagacatttattcagagcctggtatgtgccaaagactgcaaagtggcatacaaaaagaaagaataagacaaagcctatgcttataatatgtcagggtaagtagacacccaaaaataatcattttcaaagtttaagatcttattctagaagcctgtgctctgggagcacactggaatggcatttaactttccagaagaatcaaggaagacttcactgaggaggtgatatttgagctgggctttaaaagattaataggatttaactagatagcaagggaatggaatgatatttcaggcagaagaagcattatgtactcagaggcatgaaagtacatggtgtggttagtgaaaaaggcaagaaatttggtaaagctgaaatgtgaggtataaagtatggaaagagtgaaaataagactgacaaagtagatcatgactaaatatttggggtcaatataagccatgctaaggtgtttgggtttaatcttgggcacaaagaaatgttttcaagtagaaaggtaacatggttacatttgcattttagacaatatatgtgcatcatgtgtgagaaactcatttctataaatactagtttttgccttgaaacatttcagggggagtggaatcctcgagttactggcaccagcaagggtaaattaatgggcactagatggcggcatagagtgcccaattcttcataatatcagttactatttctgagcctgtatttttgacttaaataattcctttattcaaaaatcccattaaatgaatatgcactatttagactgattggcatgaagtaatagactactgtaaggggaacacgcattttttaaaagaggtaaagcccatgttggtgcatgatggaaaaggcagttgaggattataaaaatatttggataaaattaaaaatacaactttgagttcaatggaatcttaaatttctcttgcagaagttgccattcgtctttaaataataatacatatatgtgtaaaacacctaaacttcataaagtcatgttatattcaccatctgtcctcttcttcaattaccaccattaccacatggacaaacattacaattcacattttacaaggaacgaaactgaggctcatgtaaatgtttttcccagtttatatggtacagttaataaataatagtaccaaaaccaaaactctagtttttttattacaaatccagtctttggttcactttgtcatgtttcacaactgaaaaacaattgggaactaggacaagattaagacaaggaaatgatagaaccaaatgattctaatgccattctgtgataaacagagagcaaatactgtaaattggattgtatattcattaagcccatggtttctgacaattattttggaagaatttacatgtcaaagaaaattatgaccaatatttagttataccaaggaatttacattggagaagctctatatatttttaatgtttggttgataatatgttaacaagatgattagtaagaaacacaaaaatagtttgtaacttaagatgtaaaagattccaaataactataaattccctatggagaagccatctctgccccatgtcatcatgcctttaaaattagacgcaaaagtttgaatactcaacagtagaattgtttatttagtagtgtggaaggtctacctctgtctatttcctgagggaaagcggctataatgagcctgcctgaattatgagaataaagttttccttttttaaagagtttattctaacagataggaggtaacttttatttctgccttcctctcttgccactccatccccagctaagaatccaatccctcaagagctgtcatcgtttttgttgttgttgatactctccaccaagacaaactaaaccagactgagaccatgccattttagcattatgaaacaagaaagaaagcaaaagtcaccaacagagcaatacaggaatttgagatgtacagaggaactgaaaaaagaggagctgataggagcattctctttcaaagctcaatttagtgttccaactacttaaaaccctatcacaatatactctatgccatcagggaagaaaaatgccaattttaaaacattattttcacttttttataaaaggtaaaacatgttaaggtccatacgtaaaatctttccaacacatcagttcatctgcaaattagtagctgaagtctgctcaaacgcagaggaaacttccatttaggtcttgaaaaagaatagagctcattttaaaacatctttatttatttgtgcaacagtgagtttagaaacaaagtatccagtgtattttcctagagttaaaaaaagaaatatttttattgagtacattccaaaacaattaaatattctcttaccccacccttttcaccaactgaatagttttcgtttgactttgaattaccacccacttactgatttacaaactggtcaaattcagcatatatacccacactcatacaaaatgcatttcaggtttccctttttggattaaaaactaaaattttattttacagtgagagctaatttgttaggtaagacacaattaaaccaagaaagataaatctaaacttacttacttcttccaaatttgaaaattgtccatgagatcttcaccaataagctacatcttttccatgctttatgatcataccccattttttgtatgcaaagaagaaaggggactaatatctttgatcataagtgttgagatcctaaattaaatctaagatttggggccttattaatacaaagggagaaaatagttaactgaagatgtcattagtaaaaattttcattaacttctatctctataatttctggcctttccagttttcggttgcatctttctagaaatgcatgtccttttcctagccttagctctgaaaatattgcttctacccataaaatgtcatgttgataatgctttaaatattgaactataaaatttctatatcagaattaatgagcctatttcatgttttaacactgaaaatacattctaagagtttagaacttctttaataatttgtttaaaaagtagttgaaggccaggcatggtggctcacacctgtaatcccagcactctgggaggccaaggtgggcggatcacttgaggtcaggagtttgaaaccagcctggccaacatggtgaaaccccatctctactaaaaactaaaaaaaaaaaaaaaattagccaggtgtggtggcagccgcctgtaatcccagctactcgggaggctgaggcaagagactcgcttgaaaccaggaggcagaggttgcactgagccgagattgtaccactacactccagcctgggcaacactcagcaagactctggtctcaaaaagaaataaaataaaataaaataaaataaaataaaataaaataaaataaaataaaataataaaataaataaaagtagttgaaaccagaaaaaaagagatcatctaacatataggagtagaattttgagatataaagttttactccacattttctttgtcactaatatttccccactattccttgcactcataagcccttattttcagaatttattgtctattatggttttaatatgtgtcccctccaaatctcatgatgaaatgtggtctccggtgttggaggagggcctggtgggaggtgtttggatcatgggggttgatacctaatgaatggcttggcaccatctccttggtaataagtgagctctcactctaagttcacatgagatctggttgcttaaatgcatgtggcacctcctcacctccttgctcctgcttttgccatgtgaagtacctgctcctcctttgccttctgccattactgtaagattccttaggcctccccagaaaccaagcagattccagcaccatgcttcctgtacagcctgcagaactatgagccaattaaacctcttttctttataaattaacttgcttcaggtatttctttatagcaatacaagaatggcctactacactctccaggaagtttcaaatcacgtaagactaaatgttagtattcttactgcaagccaaccagcgtaggttcaccctcttttattttgcagcgagaaaaacaaaacaaaacaaaactaaatccatagagctgattttgatttacagatacattcattttatttataggtatcaggcatacttttttccaagcttcagacctccaatgagaaggcaaagcctaatgtggttcagtcttattacctggctaatttgaaaggcaaaataaatgacagtgaagaaataaaagacagctaaaccagatgatgttggtttgtaaactttaatgactacttattaaaattttgcaaaaaatgaaattggttattatctatatcagtgatttccaatggtggctaccagaagaattgcttgggaaccttttaaaacataccaatgccagagccctgccttacaccaattaaatcatatttggcagtgccaagtttaaaacatacctgaggtagcattttgttaagactgtttaacaaagttatcgagaacacaagctactttcaatctgaacttcatttgcctcatccccaaaatgggcagaataactacactatgtggatattgtgagaattaaatgaaataatgcttaagaagaatccagaacaatgactggctcacagtatgtactcatttgtaggtggtattgctattagagctcctgttgatctgcactggtaaaacctgtaggtgttacagaaaggaaatggtatgcctatgaataaggaaaaggaagaacactctttaaacatcaatcgcagccagcaatgtgctatacccatgagacataggaaatacagcagcaaatcatacttagcattcctgtgatagatgttagccttaatgaagtatcttcatgccatacacaggaccacaaaagcctctgtgggacccaacatacaatttcctataataactcgtgaatcccattcattaaattagtcatattgaacattcttattcaatttctctatatctaatgccaataaactaaaaaacatgtagtatatgttcctatttatatctgcatataaacataaatacatatttttacatatatatgaaacattaaaaaacagaggtaatttttttgtctatataattttcccgtagtggccgaatttcctaaaataagcatacatcatttttataagtaagatgctgatttcattttaattaaacaaataaaaagtcatatatatttaaaaatacaaagaaactacacctttctacaattaatttattagaagtttgtttactggtattgttattgtctgcactgaccttaagcctccttaaagaaaaaaaaaaggcaaacaactaaaatgcaatcaatccagtcaaattcatggtgttataaagttcttcagaacagcactaacatggaagacttttataataggaaaggaaaaaccaaataagagagaaagagaatataaataaattattcagccctccctttcaaaaagtaaagaaaatattttcagaatagattatttctttcattatactactgacatattctttccctaaattctaattctgatcctaatctttttctctacttcttttttctcctcatattttaagattctaagattgttctcaaactgttggcaactgctagatcacttgatgagggttcaacaagcatgtggaccaccagttttagttggaagaatgccattgtttacaatctttcatcaaggtatctcttactggctcaatgataaattgtgtgagccatagatcaggtgaaatttttatccagaaaaataattttaaaacatcttcatttgtactgaatcagaaaatcatgacatacttagaggtcactgggattaatactgaattcgagatggctctgtcaggtagttctagataatttgcaataagcatcaacccagaggttacgaaaaggtttctcactgaagactaccttcaatatgtaacagatgctaagtcaaaaattatattacacacaaacctaaaacgttgaaggttttaactcggaagatggagaaaaaaggattcttaatccatcttttgacagcactcagtcctataaagttgttagaaaaaaaaagtcttcatgttttgcacctggaaattatttttaaatgggcttaataatgtggcatcaattcctttcccccaaaatgagtaaacacatcaaatgttgggtaaaagtcatgttctcagtgatcgttgagccatatgtaccaaaattaatattctaaagaaattctgctatcttgtcctcaactaaaaatcttgttgaccttaaattaataggtcaaggctacttaagaattgatatgtatgacttaataagactacttgaaattataggaatagtttttataggatttacaagtattatgaagaaatagtttttcattttttcattcatagttgcaaaatgtaggttatgaaataactttaaaaaacaacatttccattcatgtaaaaacctccctctccttgctatgggcaagtctggttctccataccgtcacaatgacactttcgcagtcaacatcacagctcaggaaataattattaaaaacaaacaaacaaacacaaatatctattatagagtatgggtttttagtgataagaaaaacaaaagtcatcaagcatttcttcacatattcacagaacaaatgccaagagctgatttagaccttccaacttaaaatttaattatctgctaccacatacgttagatggtatctgtttttccacagtacagtaatatgttgatataatgcagaatccaacaatttggtatgataaaggaattttatcaatactttcttctgctttctctctgaacatatttgtcatcatctttgaggctgatttaccagttttgaagcaatcctgcgcattacttgtaactgtttttgctatgaggagtacaattctgaatgaagtctttgtagttttgatcttttcacctttagtaataaaagtcatctattttgtaccagaaaacagtaaaatggcaaaaacaaaaagtttcaatagcttcctttgattatttgacaaagtttgagaaaagacaacatacttggaaccagaggaatcaggaagaaaaaggactgctggtatttgtcagtgggctttctatttgtgcttcttaagctgattgtacgaaatcctcacacctccatgttcactttacccagcacttattaaatgtacattttattgctccagaaaactattcactatttatacttataatcattattgtacattattgttagaattttcatatttttatattttaatgaatctcctttaaactactgatgtatttttgtgaattggaaatacaacagaaaagtaacaatgaataatgcaaaatttaataaatgtaaacaatctgcaagttatgtaaaacatattaacccggacatattatatactgtatcctgttaaatgcctgttggttgagataaacacaagcaaatcagtttcaggatctaattggtggtgaacagctttcactatagtaaagttaactttatgtataacgaaattgtttacaaggcctgcattccacacaatgacctggaattgtgacagttcctcagtcccagagatgctatattcatgattttgcaataaacaaaactaatacttattaagagctaagaaaattttctggccgggcgcggtggctcacgtctgtaatcccagcactttgggaggctgaggcaggcagaacacgaggtcaggagatcgagaccatcctggctaacacggtgaaaccccagtctctactaaaaatacaaaaaaaaaattggccgggcgtggtggcgggcgcctgtggtcccagctacttgggaggctgaggcaggagaatggcgtgaacccgggaggcggagcttgcagtgagctgagttcgcgccactgcactccagcctgggcgacagagcgagactctgtctcaaaaaataaaaataaaaaaagagctagcaaaattttctaaattaaatcctaaatcttttcttaattgtatcacatcttcacatacacacaaatctactatttctatctcaattcagttagctttatattcctgaattggtttgactcagatagaaaagttcccacaacaactcattttgagaccatttcaaggtctgcctatttaatgtagtttaaatcctatgtcaaagtcagggccttgggtttatataatttatactgataaatcataatgataatcataataatatctcaacagaaatgtctgtcatttcaggtaagataaataatcttgactaaattaaaacaaatgttgaggtaattattactatgtacatttgaaagcaaccataagcttcacaaaatgaatcaaattcacaatcgctactctcacaaagtttatgtattaaggactattgcaaaagtcatccattagtcttttcttacacaaataggaagtgaaaccaatgatttaccctttgtttacaaagatgtgactatttttaaattgttatttacatttaaattgagcatttatttagcacttgtcttaaaacagtaatttttggatgatatataaaagagtatttattaaagacttctatctaaaaaaaaggatttataccaatccatgcacatattagcttacttctacaacctcacctttcacaggtacacatacttgaacctccaaacttactccattcatactgaactatgtgaactatatgcaaacccatgaacgggtcatatactttttttttaatgctaaactttttaataagctgtttctcttcttataaaacccttaatacttgtaactggctaattcctactcaccttttcagtgctctcttagccatcatgtcctgtaggaagtcttccctgacttgggttaagtgccccttcttgtgactctatacctctctggtatatagagagaggaattatcactcaacagcaattattataagatattgaaaatgtccagtgcccagcctgtctctcccactataccatacattctcaaagaaaaggagtatctggtggttacttttttatttctagcatctagacaaataacaagtattgactaaataaagtatatttcagaatacaagttgggtattccttgtccaaagtgtttcgtatttcagattttttcagattttagaatatttgcatacacataatgaaatattcttacaatagaacccaagtctaaacacaaaatttatgtttcacatataccttatatacgtagccttaaggtaattttgtacaatattttataataattttgtgcacctctcaagtgaagttaggtgtgaaattttccacttctggcatcatggcagtgctcaaaaagttttggactttggaatattttacttcagattttcagattatggatgttcaactggtataaggcaaactgtttagtcaatgttatttctcagaagaaagactctcatattatgggccacacttccaattactttcttataaacaacaaagtagtatttaggaaagatttattagcaaggaattacctcagttggtactggtttgtcatggctttagaggtcaatctgctagaatagttaaaaatagaggcaaaataaaatgtaatacaagtttagtttttatttctggaatttttttcacaattgcaaatgttagctgctgatttaaatatgcctttcaaacatcatataaaacagccaaaagattatatcattacatagtacagatcgtaaatatatgcttaaggaacaagtgttgaaaaaaattcccctagtgttatggaaatggtatttgtgtcttctgatgaaattttaagtgacagtatcaaagatgaatttaaaacatgttataactaaaataacttaggtaaaaccaaaaatgatgtggttcggaaaacattgaaaaggtacgaattttataaatgtatgtgacgaatatgaataaaacgttcataaagttaggattgaaaattaacattagtaaattaaaatattattttatatgactttagttataattatgtatatgctatgaaattataagtaaatatttgtctctcatatctaaagctcccttcaaaagagtttttttatgataaaatataaaattcattagcttagagttatttgggggcatgtatgacatttgataaatacatgattaagtgaatgaattaagctctcttcatcttagaaatcaaaactagaattatattatcaaacacctttatgtttgtttatataaaaataattttaatacattttataaattatgatactttaaagaatgtatgcattcctaggggtcctctgaatctctcaatgatttattaacttttatttcactttctataatccctaccataaatattcagtcacataccatctcacgcatacaggcataactggcatgtaaacttaggtaacttttcaccgaaacttttatgtgcagatgacagttctgattaaaggctatgatcaatatgtcctctgatatggacatatggttaaaatatcactgtgtagttttccctacagaaaagggtaataataaaaggatggtaataagatgaaaggtactctacaactctattagaaacaatagaaaaacaaagtcaatccaaaatcataggaggacaaaattacaaactattgtttttaaaataatgatctatcattttttagcacaatcttcaatttcaggtataagcttcaattcctatactcagaaattccaaaacgctgttatttaaattattaatgatttaacggaaattttataatactaaaacttaaagcttaaggtatcttggctaaatttttttgctaggtacattcattcaataattcattcagacatttaggtaataattaaatgactattaaagtcctactatattttgggtagtatgttagttcctatggtgacaatgagaagaaaaaagcagacacaattccgttttcatattactaatgccttgtgggaaccagacattaatcaataatcataaaattattatataactataaatagattttggagagaaaaatgagattccatgatagcatctgaggaaaaaaaattgacatgcttaagaagatttcactgagaaagtgatgtttaagctgatatgatagatgggtaggagtttagagactagcaaattaaagctaatagggaccaggattaatattaagaggttcttttttaaatgaatacataggtattcataggtagtaagagctgttgattagtaaattgttgggacaggaattaacgttgttacagtaataccttcaaaatagtttgttttcctaaattggcgagaaatcattctagaaatgctggccataggatctttgtgtttgacaaacccgtgttttgtaagacaaatttcagcaagttctttttccaattatcataaatttagaattatattttctgtcttcatccagtttcacactgctctaaagaactacctctgattgggtagtttatgaagaaaagaggattaattgacttaatagttccacaggctgtacaggaagcatgcctggggggcctcagaaaacttaaaggtgaaggggaagcaagcatggcttactatggaggagcaggagagagaaaatgaagagggaagtgctacacacttttaaccaaccagatctcggtgagaactcactcactatcatgagaacagcaagcgggaaatttgcacccatgatctgatcacctcccatcaagtccctcccccaacattggggattaaaatacaacatgagatttgggtggggacacagagcccaaccatatcagtgaaatcctaattgatgagactttagccacaatttaatgatataataaaactttctaaagataaaagtgtggttaggcatggtggctcatgcctgtaatcccagcactttaggaggtggaggcgggcagatcacaaggtcaggagatccagacaatcctggacaacatggtgaaaccctgtctctactaaaaatacaaaaattagctgggcatggtggtgcatgcctgtaatcccagctactcgggaggctgaggcaggagaatcgctagaaccaggtagttggaggttgcagtgagccaaaattgcaccggtgcactccaacctaggtaatggagtgagacgctttctcatggaaaaaaaaaaagtgactagaccacagtactatcttgtatactaaagaaatacagagttaaagagatgagattataattatattgcactaataaatggaaattcgtcatctttcctcctgcaaagtttaactaaaagacaaatatcttgttcaggaagaagcttgtcaagttttcattcctatcactgattatcctacaaacacacacacagacacaaaagtgagctaatttaagaaatcataaatttaaattactgagagttttgttataatgtttgaggtatatctaattttcactataaactgtaaatgctattataggagactcagaaaatgcaaaaagctagaaatttcagaagataaaattattcagaatcccatcactgcaaaatgagcactgtaaaaattttcatgtttgaattgtttttagtaataataattttcattctttaattgaatttttaattaatttcaaaaaacgtttatagctaatcaaactctctggtcattcagttttttgtactcttcagtaaagtccacagtaaaggctaatctgaatgctgacatcactgcctataactctctctgttgtggtttagccattttagctcccctttcaagaacagtaattccccctgaactaaatattgttaaccacagataaagaagtacaaaacaaagcctatgttgttttcctgtgaatccaaatgagaaataacgactttaaagcatttgatctatccctttaaaagatgtaacacattggagactataaatcttctccctataaatccaacagagcttttcttatccttcatcgttggaacagtttcttgtttgtttgttttgctttgttttgtttttatttcagttcagaaccatataaagtaactgaattggttttaggtcaaagctatgtattttttggtgtcatcaaatattagaatcactcagaatggcaagatgctcacatcctgagaagtaaacagggatggaagccaaccataactccaatctcactcagggtggtgagttcactaatcagcaagagcttatttaagtggaatagtgagagtacttgctcaataatttgataaaaatttcttttttaaatgaatgcatatggttaaatttgtgtaaattaagtatgtgtatattaactcacatttattgatgagattctactgtatttcatcccaactttcattagaatacatattctttctataatttaagaatttccatattgaaacctgcaaataatttgttctctgcttatattatccgaatgccctataaacctgtctgatacttaaattctgaatgaaacttctaggagatgtaagatgataatatccagaaaaataaagaggaaaaaggatgaaaacaacagaatgtgtcggtataaggacatgttacaaagtttttactgggtttagtctgtggttggtttatcattatattgcaaaaaactctcccataaactactaatgattgtaattcctattaaattgggctttcatattaaattgtttaaattagttctttactctgtaagcataatcataatccattgtcccccattagtcaatttctgctttgtaaaattaaatattctgaattttaacatgtgaggcattgaaatatacaatgcttttcacatacccaagacagaaagcctatgactaaacttatgaagaaacaaactatagagaaatagctgtgaaaaaatacttcttattgtgataaaaatatcaaatgatctgtttacagggagcaataaaaggcaccatttcaactttcaacataggttgttccttttcatttgtatttccaggaaagcgctgaaataaccaatagtcatccagtttaattattctttaaacttttttaatttaagctcaactatttgaatcatagcaagtttgtaagtttcacaaccaacgtcttaatattaaaaatgaagaacttaggcttagagagattgtatgaattatctcacatttttgcacttactcagtagcagcattagaacccaaactcaaatcttttccccgtcaagtattccattagaacactacagcatgttctattttgagtctctctaggctaagactacatagttcaagtgaaaattaataatgcataattaattatttgccaaacaggaggaatatttaaggttaacctttatcatgcaagcaacaattacttagataatacaaaatcaactgatttgacactttgattattataaatcacaaaacaaataaaaaactaggaatggctcccaggttggcccatagagggattattaagatccctacatgtattcataaaagtaatgcaataattttgatttttcttagctctttatgcttttcacactcaatattttactcttatagtgacttacaggcatcaggaaaatgcagaaattaattataagaagtgttaggacttgcctcaattctcctgctaatccatgtagaaggtcttcaacctcaggtctgagttcttatagaaatcaaaacttttataggagtccatgctttcctgacaacagacaaacattccaggggttccttgagacaaagccatgtacacaatgcaggtcccagtttcttggacttctttctattatcactaatatatatagccatagagtaattttaacttacaaacttttgctccctccaacttacaatcttttgctccctcctggtaatctctctctctctctctctctctctctctctctctctcactgtccactagccttggaagaaaccaactgtcatgtcataaggacactcaagcagccctacagacaggactttgtggtcagaaactgagacttcctaccaagaaccataggattaatccattttggaaacagattattctttagatgaccactgacctggtcaatatcttcactgcaacctacaagaggctctgaactagaagcacccagtaaagcaggtcccaaattcctgacccacagaaatagtgagataaatgtttgttgttttaagctgctaagtctgtggtaatttgttatatgacaatagatagcaaacacccactatgagaaatccaggttaactactgaatctgtttcttcaccgttacaatgagataatagagatataaatatctaacatatcgcattgttgtaaagataaagaatataaaaaacactgtccctagaagacagtaaaagctcaatgaatgtcattttttatttttctattaatattataactatcattatcaatctcagaagtttgccatgtttcataatcttttgctggctcatgtttacttcattagctgagcaagtgaaattcatacactaaaataaatacagataattgaaattaattatagagaacagtacaataaacgtattataagaaaacactaagaatattttcatagctttggggtagaaaaatgttccttggcataatccaaggtaaagaccctcaaaaagttgagagatatgactacataaaaattgaaaacatctttagagtaaataattccatataaaagttagaagtcaaatgccaaaagggtgaaaatattttatatatgtcaaaaagtgagtatctttaaaatacagtcttacaaaataatgagagatacatataagcatgtatgggagtgtgtaaaacattttttacagcagaataaaacaaaaacatgcaagtaagtgaatggaaatttcacagtagttcaaatgactagtaaacatataaagagatgctcaaaaaataaaggaaatacaaaatgaaaaagtcatgggtatcactttttaccttggcttagactgaaaatgtttattatcgatgagagggtagagaaactagcacaaccctgtgagaggtaaagaattcttgaagagtattctggcaatatgtatcataaccttatatgtgctccctcatgcccctgcaacctggcaatgattttatcctaaagaaataatcataaaagtcacacatgatttgcaaagagtcatggacactgatacacataaatacttgaaaaacaagcatctttcatatttttgcattttaacaagttagcttatagaataatatgtattatatgttgccatttttgtattttaaaaagtgtcttctcttcaaaagttattttaaaaataccgaactatactaatgattgcgtgagggtatgtggatagcatcaggaggatcttctgtttatatccagaaaataataaaccataaagctacctagttgtttaatagtcaaatcttaccatctcaattttatggtacaccatttatgtaagtggttatccatatttcattatagggtgtttgggcttaatatgagaaaaggaagagcaaagaagtagaataaggaataatgtactctctttatttaaccagaaaatatggattgagatgtagctacttaacaataacaggtttgtgtctaatgagagcctcaaggagttggagtcattctgttgtagcacatatctattccagaatatatgtgcttgtataaattctgttgagaataaaaataatctacatactctaattacttaaacataattttcaaaattattatagagtcaaaacagttaaccccttttcattatccttctgtcttctctaacacctctggtggatgagctgctattgcaactgtcattgcaattattgattgcaatttttgtcattgcatttattgatataagaaagtttaaatccattaactttaacttcgtatttcttttctgtcccatgtgttctttatttttttttctctttgtctgcctttttttgaaatagttgagtattcaatgttccattttatctctattttggccttactgttatatctctttattttgtaatgattattgtagggtttacaatatgtaacttttaacttatcaaggctaccttgaaataataatataccacttcatatataatatcaaaccatttcaacaacacacttctatttccctgctccaattatttatgtaatttatgtcaaacatcttactactatataacccacaatacattgttaattattttgctgcaaagtgttaccttttaaataaaattttaaaagaaaaaagtgtgttatatttactcatatatttaccatttctggtactcctctttactttgtgttattacaaatttccatcttatttggtatcattttccttcttcctgaagaacctccattaacacatcttgtagtgcttgtctgtgggtgatgatttctctttcagcttttatgtccccaaaagtctttattttatagaattctaggttgactctttttatctttcagcattttaaagatgtctatattagtccgttctcatgctgctaataaagatatactcaagactgggtaatttataaaagaaaaaatttaattgactcacagttcagcacagctggggtggcctcaggaaacttacaatcatgatggaagaggaggcaaacacatccttcttcacatggcagcagcaagaagtgctgagcaaaagggggaaaagccccttataaaaccatcagatcttgtgagaactcactcattatcatgagaacagcatgaggtaaccactcccgtgattaaattacctcccaccgggtccctcccacaacacggggattatgggaactacaattcccgatgagatttgggtggggacatagccaaacatatcaatgaaattctaagtcttctagtttatattgtttctgacaagaagtatttaatatttgtgtcttcctcctgtacataatgcctccatttcctgtctctttctgggattttcttgttatcaattgttttcaacaattttagtatcatgtgtcttgatgccatttccttcatttttctcctcttacttatagttgaaatctctagatctttgtaaatacagttttagtcaaatttgaaatattttcagtggccaggcatggtgggtcatgcctctaatcacagcactttgggaggctgaggcaggcagatcacttgaggtcaggagtttgagaccagcctggccaacatggcaaaaccctgtctctactagaaatacaaaaattagccgggcaaggtgggggttgcttgtagtcccagctactcaggaggttgaggcaggagaatcacttgaacccaggaggcagaggttgcagtaagccacgatgtgccactgcactccagcctgggcaacagagcaagactccatatatatatatttcagcctttgattgtccaagtaatttttcttccttccttccccacctcctttttaggactaacatacaggttaaactgcttcatagtgtcccataaatctctgaggttatatttgtgtgtctgtttcaatcttttttctcagattgtgtgtgtgcttcagattggatagtttctattgctatgtcttcacattcactaatcctttttctgtagtatctaatatcctgttataccataccaatgtagtaaattttttcattccaaatatatttttcatctctaaaagttccatttagttcccttttatgccactcatttctctcctgatcatagtcaagctttcctttaaatccttgatcacatttataataatggttacaaaatatttttcttctaattccgtcatctctgccatttctgaacgttttttcattggtaatttttttcccagttacatgtcacattttccagctttttcatgtaacataaattttattttgatgtcattcatcataaactttttgttgttgactgctgaattttgttgaacttcacaaagtattagacatttttctggcaggctggttaatagcttgcagatcagtttggtccttttgagtcttattcttaagctctattagggcaggcttgttaggccctactgaaaaagaattatcctttttgggatctcatttccctggctattaacaaagtgtctccactttggctgaacaaaactcaaacacttccaatccgcgaaagctccaggagtggttcaccttttcagctctctggttgttctttgccggccttctggaggtttacccaaagtatgcacagtttaatattcagcattcaataggctcaaggcaatccttttgcagatttccaaagttccttgtctgcatatctcccttcctccggtattctacctgcaaattctactgcctcatctccctgaatttcaatttctatctcctaatctcagtgtgatcactgtgctctgtttaggtttcccttctgtacattatgatcaggaaagtacatccaagcataaaattttttctatgcaacagaagaagatattatttttaagtgtatacctctccctattatgtcatacaaatttcagggcttattttcaagaaccatgtcttttatatggtatctggttatgttgttactattttgaaataaaatacaggaattgaatttattcagtgtttcatctttgaataacctgaaaattgtatagtaattccttatcttctcacccaaaccactgatatataaaatactatttaagacgacaagatcaaacaaggtcacttactatcttcctttgggcatacctatattttagccatgcttaactttgtatcattactcaaacaacctcttttaacacccatcttcttgattctatttttaagagaatgagatctatggtaaactgtctaagttcaaatcctgacccaactagtttataaagcaagttatacttaaagcatctttgacttcatattatcatgtccatgtagaaataataatatagtctacctcaaaatgattatgaagaataaaagaaacaatatacagtcaatgaatgtgagctaatgttatcacttgcaaaccttttccctatttctttatatgcaaaccctatccgtaattccatttcagttaaaatgccatctctacaggaaggctttcccgggatccatgctgagaggattctttcttaagatactcatcacagggcatttatgtgatttatatttttcttcttagcttctatactaagcaattaagttcttgaaaggagcttccatgttttactctctcttttttcaaaaagatatcccacagtggacagtaaattgctttgtatttagtaggctattcacaaatacttgcctcagaaaagaaaattaaacatgactatatgggggaagtttttcaaataacttatgaatctccctaaatctactgccatcattttatcaaatcccttgtttacaccaagatacatatgtttgcaaaattttcttagctaacaacccagttaactttatcagaaaaggagaaatgagattagtatgacatgacttgttcttggtaaaataacaccttggtttctacatggtcacaaataatctattcaatatttcagaattttgcaggagataaagttaactctgtaggttagagaattcacctttatttcatctttaatattttatatgtttgcttgtatccattattttatatcttccgattctccaaatatgatcatttctggaagttatgatgttcagtcaaagaaagtttagactttggagcaaaagtccttaggtttggattccagttgttctgatagacagcagtgtggcttgaaaaagatatatttactttcagttaacacatctataaatggagataataaaattttcttggagcatggtgattattaaatgagaataagtgaaaaggtatgacctactgcctactgctaaaaactttttatttgcttccttttggtttcctcacctgcaaaatgcaaatagtcatccctgtttacttttcaggattcccttaaggattcagtgaatacatacattgtgatactttgaaaaacacacattatataaatatgcaagtttttaaaaaaattatggtcattattattcttgaataaaagttaccaaactctgtggacttagattgtaaatttgccaaaatagtctcctattaaccaatttattgatttccattcatttcttctaatttgaagattattcttcttggaaagaaaaatataggcaaaatatttgttcatcatctctgccttctctgtgtcatctctgaaaattatgtcatattctcccaagtaatgcctctatctattcagtctgaggtgacttttcaaatctcttctaaaagtttacgattttacaagagtaaattagagtgttcttgtacacacacacaagagaccaaaaaaaatcagaacacattttcacaaacagctgaaactatttaatatgggtatccttaaaaacaataaaatattatgaacagtaaaagtcaattatttattttatgacagaaatatttcagtgtgattatatctgagtatatcttcaattttttttgttcaggcagcaagcattggtcctttttaccaaccactacaaattatgcaccctaaacattatgcactctatgctataaaatgacaatataaaaatataatccaatctacattaattgaacataaagtacattctgatactcagcttagactaaccataacacagaatttgtcattaaacgttcagttcacacacatacactcaaaactgatccaacaactcctattatgccagttaccagcattgccagcccctttgcccttcactgcctggagaacgtccatcagaaacagggaagcagagcaaactgccacaatgcaccattgatgtttgagcaaggctgcctaagcagctgcaataacagggcaactcttcaaagtgtcagcattgaaacttacaattctctctcccatacactatcaatgaaaacctttataagctacaatcaattataaaataaatctttgagacaaatcatgttctttcttcatttcttctctccttcttttcctcccaaaaccaaatgtccttggttaaaagaaaaattcaaggagaaatatcccccctttctatcttggtctctgcctctgcctctcttatgtctaaaaattctctcaaggaggtttaaggatatctgctaaacacttttgtttacaagacaagttctggggttttttgtttgtttgctgttgggtttttattgttggaatgtttttattttaaaaattcaaaaggcacttgatattttgagcacactcatactagatttttggcaaagcatgtttttgattattaaaagacaatctaaattctgaaatgcatgcaccaaatcacataacctccatatttttgtaaaccacaacaaaagtgcctcatattagctacagatgaatagctaatgagtcagcaaacagttaaaaacattccatgagaatagatgcactagccatgcaaagtttttgagggaaaaatatattaagtatttaaaaactacttagaatgaagggaaactattctttctttaacaaagcaactatgtttaatttgtcttatgattatacctaccaaaccaaatgaaagtttatctgtctttttctatttctccttagccatcaatagttaatgcctttttaaattttgtaacatatatttaaggtctcagaattgtagcaacaacttttagattcttcatcattgtttttatcattcaaacagcatgcgaaaaccccttcaaatataatgtcaaggtataactctaattcctgcagataacaaaaatatatacacttcatcatgagttaatctactacctgaacaatcaaagtccaaaatacttggtatctgagttcagggtgcaataataataaattgccatagacttggttaaacaacagaatttaacaacaaaaatgtatttctcacagttctgagggctgagaagtctgagattagaatgccagcatgaccaggttttgatgaatgcctttgtcctggtttgcatatagtagtcttctcactgcgtcctcacatgatggagggccaagagacagagtggaagcaagcttctataagggcactattcccatcttgagggccccaccttcatggcctaattacctaccaaaggccccatgtacaaatgccatcacattaaagattaggttttcaatatatgaattttgaggtgacacaaacattcagctcatagcatttagaaatctgtaagaatttttagttatcatttctcattattgtcaaagcaacacacacacacacacacacacacacacacaaacacacacacacagtttaccagttaaatagtaccacaaagtttatacaaaatacagcatcccgtatccaaaactttgaccctctgccaaaactcattctagtgtttgcctgatttctaaataatatgcttctattgttatttttatttataaattttagacataatatattaacttcctatcatggcagaagacttagttctttgatactacctcatttccctttcttccatccttccagtaatcagtgaagtaatatttttgaatacatttggtaccttgagtagtaacaatatttccttcctattgttaatattgtcactttgccccccacattcccaaggtttgcaacagaaatgtaaaacctctataaatataatatttcacactcttacacatgaagaatcctattctaattctttcccctgaagacatccctttcgggagttctccatcttctagctcaagtaaagactgcttatttttaagatcaatgcacagaagttatccagtaacttcccttcacctttctcacctcattttaatcacctgtttcctgaaccctctatcttggtcttttctcctcagtttttcctcacttggacgtagcatacccttgaaacaattccggagaaagcaagtgtgggggtacatttggagaaccatgtgtctaaaaataaaaatgttttttctacccttatacgtaattggtagtttgggtgtagaattcaaagttaaaagtaattttctctcataattctttttttttttttttttttttttttgagacggaatttcgctctcgtttcccaggctggagtgcaatggcaaaatcttggctcactgcaacctccgcctcccgggttcaagtgattctcctgcctcagcctcccaagtagctaggattacaggcatgtgccaacacacccagctagttttaaattttttagagatgaggtttcaccatgttggtcaggctggtctcgagctcctgacctcaggtgatccacctgcctcagcctcccaaagtgttgggattacttacaggcgtgagccaccgtgcccggccttctctctgaattttaaagccacatcttctagctttgaatgttgtcattaagaaatcagataccattctggttcttgagccaatgtatgaggcctatatttctctcgggaactttctattatcatctatttattactgttattttgaaattttccaattatgcatcttggtgtggaattgctttcacatttttatgggcactcagaagatccttccaaactggaacctttggggctgaaaaattttaccatatacttttataacagtttcctccctatcattttctttgctctcgcctgccttctgaacttcccattaatcagatgttcagcttgttggatcgtttgtttgatttttatctcttctctcctattttccatttatttgacttttttttgctctattttcaggaaaatttctatcatataaaagcttatttcagttattataaaagtgcttattctctggttatttcttctttttatataatcttgtcatgtttcatagtagcagtatcttctgctatctctctgagtatattaattatactttatttctacttcagctactgttttctacaggacatactgcctctaattcttaaacaggttctggagtatgaactgtcttgtttctcattgacacaacactctccagtcacatgtattcggctttcccatttctgccagttcctcctttacatcttccaaaagttgtgtctctttaatatgttgcttcctcttccttatgcctgtggatttatatattttttagtcttttgctcaaaatttttagtcccttactaggaaggaacatggaaaaacatgtgttcaatcacgaagtttaactggaagtctgctgttaaatttcctgaagatgttaatcctagagctataatcatgctattcacagggtcataaaatcatagggctcttactataaaaaggttatcagagatcatccgattcaaccctcttattttataaaagtgagaaaatggaaacccaaagaggttaagtggtttgtgcaaggttatttaaatagcaatccatacatttggtatttgacttgctttcattaccatagtgcctcctcaaatagatatccccttaaagtagtgactcagaagactcccagacacatcctagggttaacacatttgaataagccaatctagcttttggatataaaatggaggagagctgtcattaaagaaaatctgggaaaaaatgtctccaagaataaatatttgactctggacatcctgttttctactagtagaaattccctaatcaatactctcccatgaaactcattccccttattcagcttcagcataacacacttatcctaacttttactctttcaggttacagaatcacatcatattttctcaaagcaaggtaaatctgtgtttgaaattcaaatgaatcttttatatctttcctaagtttctaccctcaattccttcctgacctctggctggccaccaacctcctactcctaaaatagtccttttttttttctgcaaatggcaccacccaggtactcgagaaaaacatcttgagagtcatcctaaacttctctttttctttaacagcatccaacttccaccccttcaccgatacagtacccaaatcttatcaattctacttcctaaaaatcccttgaatccattcctcttaggttcctcatagcttcacagtcactgtttcagttcatgccctcactatacttcaccctgatttccattaattgtcttctaacagtctcacagactctggtctgctttcttcataccccttcttccacactcaattgctgaagtgctttttctcaatagaactaagaagtcatttcctcacttaaaacccttcagaggatcccacctcatttctgacttcttagtatagcatatataaggcacttcatgataggcacctacttatccctccatcttcatctcctgtggctcttcaccttgcatgttatggaactagaaatcagaaaatcaaaagtctcctctcgggtttctattcacactggattttcaacaccaaatgccaaatgtcccttcccctgtcttctcccaaataaaggaatccaacaaaagagagtgaaaagattaaaaaccagttaaaaccatttaaaattattaaagtgcttttaccataatattttacatttatatttataatattttatctttatcttttagggattatagtctgtttaaatatgttggtagtacattaaattattattcagaacactgaagatgtaaattaaatatgaccataacaataataattagactcttatcatgtgaaataattaaggaattaacacattattatagtaagggccaaatctaagaaatgtactataccataccaccagactgcacacttttagtagacaggactgtgtcttaatcatctttacattccctactatgccaaatactatccccaacataatagatgcacagtgaattagtaaatgattaaataaaattagaaataatatcacacccacaaacccgggaagcaattatttgcctactacttgatgaggccaataattcaatgatatttattattatagttgatcgagttagtcaaatgtcatgagtgcctcttaaaaaatttatatatatacacacatttttctgcagatctttatacggaacatcaatctaatctttatttgggcatataaatcattcaatggataacacagtgaaaattttcaacataacagaaagacatatgctatttgaaaaatcagtaaaaaaaaaaaaaaagatgattctattgttggtattcttatcttcagattgtcctccacagcacatccctctgatacagagaaataaaaactttcttacctagaactctgatcaagttactgccttttataccactataatgatattcaaactggcttctaagcaaaatagaacagaaacattgcacatgcacatgcacttgaattgtacacttcttctatcgtatcaacttcatgtaccatgatatgctcgccattaatatgcactaaagctaacttgctagcctgccgcaattttattgttgcagcaaaacaatagtggtggattaacccatcacctcaagtttagcaatacatcctggaccagttatagatatgcattaatccacaacttaaaatgtaaaatatcaaggagctgggccaatccaggcatatgagtcaagaacacagcacttcaaacatatccaaactgaaactggttcttttctctgcctagaaaggtacttaacaatgggttctgaatatcatgttgactgacaggtatgtcatataaagaaggaaatcctcttaaatcttacctccttaaaaatatcaggtttaacagaagagtatgatgtgtagatccctactagatagaagcctgaatacctaacccattatataaatagtatgtattgtatagtatataaaggctgcgattttctgggctgctgcctactttttatgttttactgttgtcttcatgtaaaataactgtatggaaatggtatacctaaagagacaaaacgggtgaaatttaaatcaaccaactaaagaataaacagtataggttaaaaaggatacatgttaacaaaatgatgacacacagcagaataaagaaaatatatgaagaatacacatctgagggcaaaaggctgaggacagttgaaattgatagaatttgtaatgactgaaataaaagcacaagaaagagtagagaagaaacttgaataatattcatagataggaatgaactgtggaaattccaatgccatgataaggcacgatatagaatgattgtatttcttttatccaaaagcttcacgacaggtaaagatagactataatctgaagaacaaatagacctaatttccattataggccccgaaagtgaccaatagtgatacttataatatttaagaaagcaactgggcacttaactttagattataccatttaaatttttttcaacttgggaaaatgtttcaaattccactttgctacctacttgctttattttttaaaaaattagaaaaatgccatgtaaatcactgtagatagtattgcattgcttgtttgaaaaaaaaaaaagttgacagtttgatagtgcattcattcttatgcctccagcactgaatcaaccactataacattcaaaccaagaggaaactttcagcagtcttgatgctgtctcctactctgaagtgtgagtctcttttctacaaagagcacatgcttagggaggaaaacaggatatgaaattacacaaaaatatgtgccccagcattcagaaagaaagcaggtaaaagcttaattctcctccaaaaaaagcagtttctaaatgtggattcattaatgaaaacttacaacctagcagtcagcagaagcatttaggaatggaaggcatacagtacaatgccaactattagaatcagtgttctactaccacacaactattctagcttagctaacagtcttttttgtcacgacttttgtttctttttcctttgtttcctctgttttcaatcgggagagaactgtgtgaagctgagtgttcgtttaagtcagaaacacgttggctagatctaggttcagtgtgggtgagtactgtgtaagcattccacacacctccactaatatgccacgaactctccatatcccaagctttctgataggattcagttgagactacacatagcgcttttacttatgtcacacatgtgatctcaggtctcagcacgtactgacataggtagttaccatcaaacttgctcttctcataaatcctgagaaaaaaaggtaggttggaggtagaaaatggacagaatgtctctgctaacctaaacagaactagtatgtgttgctgctaaaatattccaatagctggcagcaatgatccataacattatatttgtaatataagtatacataaacactacaacagatgatctcagattgtcattgataatgatgatggctaactttttttagtatgttacttgtaccaagcattgctctatgtactatacatctcatttaatcctcatatacaaaaaaaaaaaaatattcttgggtaaagttattttcattttcattttacacaaaaggacattgagatacagaaagaaactgaataaattgattttaacatatttaacttatttaaagttaaaacatgaaattatttactaaccctttgatgtaggaccaatggctgtcactgactcttgatctgctatataaagtttcatgttttccttcttgcttaaactacaccatgatgtatcacctatgatttcctgttttggtttatttaaactcaatgacagcttaaaggtacttggaaagcaaactgaatgagggatccttccagctttttacattttttcacccctacctcaggcaatctttcacagttgtctagcccacacctttttaaactgcaatttgttttagcaactcacctttaaaaagtctttccaaagcaccaacttaaatttcataaaatcaacaactctttatatttttgaactcatattttatcagtttgcataattaaattacaattgcacattcatttggcataaacaaattcaaaaacaaacacaaatgactgtagataagcatggcagcaggtaaacagatgaacagaaacacaccattttttcagagtattctgttggccagaagcaggaataacctaagagggagtctactgtatacctaccatttcctaattataaacaatactatttaataggtatattagctttctggaagaatggatttaccatggaaaaatacaaacaaatttagcagggaggttcacaatgataccaaaattctacactagaaaagtaatacattccttcttatctttctttaattagaaattgtaggagacttcttcactgacaaaaactaagagcacaaaattccaccccaaactcaattcagcataagaagactcctacccaaagcataaacatatatactcacataaaaaataaaaaaaacttttaaaattaataaagaaattaaggttttaagaaagaaactttctccctactagagaaaaccatcacctcttggtggggaaaactgaatttaaagttcaggttcgggcagttactacttatgtgatggagtaaatcaattcacctcactgagctatagtatccttttctgaaaaaaaaaagataataataatggttctctcctcacaaaactgtagtcagaattatataaaataaaatatataaagacactctgcaaactatcaatcatcttatacatataaattgttattactggaaatcctagcttatattttggacagagaatttcagagtcaagggaagtcatttcacaaatgacaaggctgtgattcaaaagcctaaattactttcctacttacagtggcatggatgacggagcagaaatagagaattcttgattaaccaggagaagaatatcataggcatgggtgtgagatcaactggagattcaaggaagctaaagtgcccagaatgaactaatgttgtaatgtagactgtgagcagagataaaattccagaagccaaggagtgttgtacggtaagtcctggcagtgcctttggtgaggagagtaaagaagaaatagaaagattagccaaaaaaaatttcaactataccaaattagtattccatcctgcacagtaaaattttgatgcctttacaaactaaacaaagtagggaatttaagataattcccatgtttatgctgtttctttccactggtcagaataattaaccataggttaggaagttaagaaaacaataggatagacgtcagtgaagttcaagtgctttaattggattcctttgggtacagtttgtttccctttttctctgaccattaatccagcagaggaaagtgatctaacacagcaccatgacatgaagggacggaccctgagagcctgtctctctatgatgactgttcttgtgcatccaggcagcctattgaaactaacaatgcctgctgctgctgccgaagaggatcatccaaactctgaaaatgaaacacatcacacaaagggatgaaagaattcttattccacagggtttagcttgcagctggtcatgcatgccagagggatgtgccacgaggatgacaaagaagcttccaaagagaatggaaggggcagccagccggacattttgaaatacttagaaaactattcttttgaaactaaggcaataaactagacttctttatggcagaacttgagaaatatcagggtttatttcttttatctctgcaattcacccacatttaaacattcttgcgagtaaaagaaatttgaataatttctaattggttatacagttttgagggtttcccattcataagagaccatattatataattgattattttttcctccgagttgaagctctatatcaccccagagtttaaaactgtatggaagaataggtattgggcttttctgtaactgatgtagatacaatgaataataaatatgcttgttataccaagtagcatgctggttaagatcacagactttgaggtctcagtgatgtaactgacggaatactcattgcatggcatcaggtctcatgggttctaaggatctcgaatagctgtgtcaggtaagagtttgcccacaggaagtgctccaaatagaattaagagtcataagaacctgccatacagctgccattgctcttggcccctcagttggtcacagcaacgcataatccaactcttaagctgccttggatatccatgtttaaagagggtcaaaagcagcacctaaagttttgaaagacaatgctgcactggggcatcggccttttctgattaagttcactcattcatagcaatctaaaaagaacactggctctccctctctggcccttctccactactgttccaaaaagctcaccttcctctgtttacaggataaacgtgaaaggctcttttcattgcccttaacagtacacacaatagacttggcaatcatttctaccaattacatcaatgactcatatgaactctgcataaccagatgcgtgactttgtggaagttatttaatctcatttagccttagattcctcattggtcaaatgaaaataatatctgtcttatgagattgttgtgaagaataataagataatatttacctcacagtttagttataagcacaaggggtgattcaataaatgtcagtcattatcagtgtcattttctataacaggagtaacaaatagttcatgtaagaaactgaaatgagaactggaacacagtatcaaaaatattcccctatcctgtcaggatgctgtcattgattcaaacattctgtcatttatttcaggttagaacacagtttaagaaaagcattgcttcctcaaaagattatgtcaaagtgaaaataactaattgggagaaatatttcttttccatgtattcaacttgtttgttctaaataatctacttcaaactactgtaaataagttcttgttaaaagtgttttaacttttcaaatggctactaatatacgatgttttacagataaatctttggcattggagggtttccctaattgttctgatatttcttattcccgactcctaccatccacttgctcagaagctcttccaacctctctcaaaaagagaaaataatttgaatgaaaactcatactacaaaagcaacgttaaaatatatttgagaaaaaatgactctcaccctaggtcatgctacaagtgctgtaccattcaatggcacaaaattaacttttagctctaagttcattaccaaagaattctaaagactaaagaaagcatagggaaattaaaaatatttataactataaacaaagataagagattataatgagaaaaaattgtatataaggagatatttataatataattaaaaattaaccgtatacaataaaatttaactcaaaataaacctttccctaagaattataaaatattttaaattcaaacttaattctagtaaactaaataaatccctaccattaattactactttgcattatgaaactttgctcccaaaattttatgctaaaatcttccacataagttctgaagaccaaaaaaatccctactatttcattctaaaacaattggtccataattagtgaaaatctaagtcatttttctcacctttcctttcagcaatgcccatccaatcaatcactagatcctgtcaattctttatttccactattatagcctagaatcctaaataatctaattattttcagcctcttacctctttcatccatatttatgcttcaagaattaccttctattaaaaagaaaggctcaaagaatttccctcacctcctcaaaaaccttagattgtttacagaataaaatgtatctctaagcatagcattcagtctttcacagtgtggcacagaactacaattaacagtaattaaataaatgtaaaaggtattcattaactgcctgataggttccagactccaaacttgatagtgggttggtagtggtgacaaagatgagctcaacacagtacctgttctcaaagaagccagtttagtaaggaagcaggtaagtaaactaaaacttgtactgccatttagttagtacaaaaaaggtaactaactacactgtgctactagaattagacagtaagtcccaactcattgaaaagtaaaatagaaatatgttggttttctgcttctgaaaatgatgaagtaacagaaatagcatacacctcctgccttaaacaactaaaaatctaaacaaaatatataaaatatttgcttgcagacattgcacaacaggcacagcacagcaattgctgagaaaaggaaattaacaaggttattcctgctattgctgtagtatgctgtcttgagagagttatcagaccatgactcagggaggtagaatcctaacagagattgttttatctagggtcacactaatagtgaggagtggagctgggcctctgataggaacctttctgactgcaaagtccccagaagttttaatttttactcacctctacctttttattttttcttttacactatagaaatcatacttcaaaatttaaatactaatgcattcagtgaatctccccgatcccaactgttcccagtcacagtaaagatattaccatcctctaaatactgtattactttgtgtttacggttatataacattaactttcctgctatatttaataataattttaatgtgaattaacatttattgaagccttactacattattttatgttagtaagaacacttaaaatgagatctaccctcttagcaaatcttaatagtacaatatttttaagtgtgcagtattgttgactacaggtacaatgctatacagaagatctctagaacttattcatctgcttaactgaaactttatgtccattaattagtaacttcccattttccctttccttcagcccttggcaaccaccatcattctattccttgattctatgaatttaattattttagatacttcatataagtggaatcatgtagtatctgtctttctatgactggctcatttcaattagcacagtgtcctcaagttttagccatgttgtctcattgcagtatttcctcttttttaaagactgaataatattccactgtgtatatataccattttccttatccattcatccatagaaggacatttaggttgtttccacatcttggtcattgctaatctttttgagatcccgatttcaattcctttagataaacaacaaagtaccaacagaagtaaagtacatcaacatgataagcacatatatgaaaaggctacatatcagttttcaatggaaaaaactgaaagctattcctctaaaatcagcaacacagcaaggatgttcactctcggcacttctattctacatagtactggaagtcttacccagggcaattaggaaagaaaaagaaacaaaagccattcaaattgtaaaggaaaaagtaaaattgtctagttggtagagtctatgcttttatatacagaaaatcctaaagactccattaaaaaactgttagaattaataaatgaattcaatagagttgtaggacacaaaatcaacagacaaaatcagctgcatttctatatattaacaaggaaccatctgaaaaaaaattggaaaaacattcccatctaaaatagcaccaagaagtataaaataggaagacaattaaggagattaaagattatatactgaaaactacaaaacattgatgaaagaaattcaagatggaagatatcctgtgttcatggattggaagactttaatattgttaaaatgtccatacccaaagtgatctatagagtcaattctacatttctgtaattcacatggaaccacaaataccatgaatagccaaatcgatcttgagaaagaaaaacaaagattgaggcatcacattttattgcttcaaaatatattacaaaacaaaaataatcaaaacaatatggttctggcataaagatagatatatagacaaatgaaacaaaatatagagccaagaaataaatctacacataaatggtcaactaattttttacaagggtgtcaagaatacacaatgagaaaaggatagtctcgtcaacaaatggttctgggaaaaacagcaaaataataaaattggacctttatcttacaacatacacaaaaataaactcaacatcgattaaagacttaaatgtaagacctgaaactaaaacttttagaataaaacatacaggaaaagcttcataacattcatcatagtaataatttcatggctgtaacatcaaaagtacaggcaacaaaaataaaaataaacaggtaagactatacatcttgactgcacagcaaacaacatagtgaaaaggcaacctatggaatagaagaaaatatctacaaaccttatatctcagtgattcccaacctttctggcaccaggaactggttttgtggaagacaatttatccaaggacaggaggatggttttgggatgaaactgttccctctcagatcctcaagcattagttagagccttataagaagtccacaatctagatcccttgcatgcacagttcgcaatagggttcacactcccatgagaatctcatgccactgctgatctgactggatgcagagctcaggcggtaatgctcactggccggacactcacctcctgctgggcagtccagttcctaacaggccagggaccattactggtctgcagcctggggcgtggcgagcaggggtgaattccctgatatatctgataaggggttaatatccaaaatacatgaagaactcctataatttaagagcaaaaagaaaaaaaaaactaataatccaacttttaataatgcactaaggaatttgctaaggtctgaatattacccctcccccaaattcatacgttgaaacttaattgcaatgtgatagtattaagaagcagggcttttaggaggtgattaaatcatgaaggcagatcactcatgaatgggactagtaattttaaaaagagatgatgagctgtttgcccttccacaatgtgtgggcacagaggccaccatctatgaagaagaggcccttaccagatacaaaaactgccagtgccttgaccttggactttccagcctccagaactacgagtaataaatttctgttgttcataaattaccctgtatttccttagagcagcccagactaagagacacttgaataaagatttatttaaagtagacatacaaatggccaagagatatatttaaaaatatttaacatcacttatcatcatcagagtaattcaaattacaaccacaatgaggaattgcctcacacctgtcagggctgttattaataaaacaaaagacaagtgttgatgaggatgtagagaaatttgaatccttgtacactgttggtaggaatgcaaaatggtgaagcactatggaagatagtctgaagtttcctcaaaaaattaaaaatagaactgttatacaattcagaattctcacttttaggtatttatcaaaagaaactaaaattagtatcttgaaaagagcttaccacggtatttctctaaatgatgcacttgtaccaaatcatttaatcctcaggacaacccaataggtactacttttagcctcaatttgtagataaggaaactgaaacccaggctaaataacttgcctgaagtgaaataactagtgagtttcagagcaggaattcaaaacagaaaatctggctccaaagtccatgcacataacctcattgcttccctatctgaatcacctaatagacttcttaaatatagagacaattcatataactaatcttgttatttgtatatctcacactatctagaacaacgtgttattgctaatagatattctatgttgtttttgatatgaatgaatgaataaaagagcaatatgaagctatggaggaataatcacactgagtgctaagccagaactctggtaaaccataaactatatataaagtgtgcctaaaattctttatgagaaattattcttcatcctcacaactcctcagaaattttatccacaagtaactaaagttttcacatgtttcactcataggatcttcactcttagctaacttcaatattggaaaattacagacgattattttatgtctattcttaatgaccattatggcacatatttcatacattttagtctaagtatagaacaacattatcagtaagaatatgtgtgtgtgtgtgtgtgtatatatatatatatatatatatatatgaagagtgagagagagagtggggtagatgatatgggggttgaggtagttgggaatgaagaaaccagcaatggtaataacaagataatagaaatgaaaacaactaacattttctcaaacacctatcaagagctcggcaccttattaggtcttttatgttaatcatctcacctggtcctcacaacaaccatgaggtaaaaaaaagttgaaccctgaaattttgatattccttttctttaacaatagattgtatcaagtgaattaaaagaatgtaaagtgaataaccattttattagagttgaagcttaaaagttattggactgctataatacatgaactacatttttttcaattagcgttttcaccaactttataaaaaaagttatataaagggctgacaatcactattattctgtttatactgataccatcatgagttcacatatgtttaatatttattccacataaacttatttacaagttagtacactgttcactaagaaaatatggtaaagttgtcagattcttgaggtagggcacaataacaagtgctagaatcaacacactgtatgaattgccttgaataatcactctagatgttcaagaagtttccacttactctccagggctaatgagtattacatgcaataatcataattaaaacagaagtaatggaaatatgtgcgcatagctacaaaatatcataatctcagaattaatcttcagttcctcaagtctttcttatttatttatttatttatttatttagagacagagtctccctctgtcacccaggctggagtgcagtggtgcaatctcagctcactgcatcctccgcctcctgggttcaagcgattctcctgcctcagcctcctgagtagctggaattgcagttgcctgccaccacacccaggtaatttttgtattattggtagagatggggtttcaccatgttgtccagtccaggctggtctcgaactcctgacctcaagtgatccacccaccttggcctcccaaagtgcagggattacaagtgtgagccactgcgccctgcccctagagtcttaaatcacaaatgtttatcaagaagtttaagttctgttcattaatttaattcactccattcttcgtaaaaaccctgatatgctaaaccttcaataattcaattgcatattatccatactttaaaaataattgctcaagtgacatattgcattacattacattacattattaatggatactagaaatagagtgcctacaatgtgctggggaaaatattaggtgtttacgatatgatcttatttattctccatcattctagtttggctttcttatctgcattttacagatgaggaaaatagctcagtgttacaaactgaatgttcatgcccaaatttatatgttgaaactatacccccaatgtaatgccactagcagatggggcttttgagaggtaactgggattagataaagtcatgaggtttatgggattagtactcttataaaagagacccccaagagctagcttgatctctttctaccagaaacacaatgaagagttagcagtctgcagcccagaagaaggtcttcaccagaactcaaccgtgctggcactctgatcttggacttccagcctccagaactgtgaggttacagcagcccaaattgactaagacactcagaataagctgtccatggtcttacaaagatcaaacattgtactagaaggggaactcaaatccaccttgggctaccacaaacaataagaaaattttgcaaaataggagactataaagttaacatacaaaaatcaacagccttcctacacagaaacaaatgccagctagaaaatatagaagaaaagagcctgtttagtatagtaaggctgtaagaaagtaagcaagtaaataaataagtggatgcaataccaaaaggcagacttaataataaatgtttaaacctaaagccaaaaggaaaattagaacatttcagcaagatacaacagttactgagcaaatggaaataaaaaacagattcttggataaaaagattcaccctcataagaacattaattgttgtgatgttaattcataaattccttataatttcaatagaaatgccatcagggattttctttttcctcaagatctgctagttgattataaagttcacttggaataacaagtatgcaagaaaagccagaaaacactgaaaaagagtaatggtagaagcagggagggaagctaacatttcagatataaaaacaagttataaagcttctataattaaaataatgtgataatatcacatgcatagacaggtcaatggcacagaatagaagaatatagaaatacatctgactgtatagaaaaacttactataggatatcatgcaagtactagaagaaacattgatgaattcccttacaaactggcactgggaaaactgtttctaattatgcttcaatgtgataatatccaagaaagtcaactaaacaactgggtattaaaggcaaatacctctttttatcaaataatcatcattctctggattctatgtaaagcaatatctaaaacaaccctgggaatcacataaatctcaaaattgttgagtagaacaaactttaacagtttctcttccttcatcatcatttttaaaccccagcagaaagatcacagtaatataaccaaaacctaaaagagcctaaaacacacatctgtagggtttggttggaaataaactacactatcctatatccagttcatatctaagacttttccttgcatttcagtacgatgctgcttactttttaagaaggattacaatccttgaatatctcaatccacaatttatatttaaaaatgcataagtaatttctatgtgctagagggcaagggcccttaatagatatttagatttatactataattaaaaaataataataatgcaaatgtatgtcaaagctctgtaaacaatattttcagaaaatttgttgtggagaaggacccctggtgtccagctggatttaagccagtctataatatagctgttgactgcattgccttcaaatctattatcagacagatctttacttaccttgaaatgtttgacttcaccataaaatatatcaagcttctaaaatttgtaaagattatatttatgaataaaaatattggtagtgctacatttccaaataaacattttgagaagcatgatatagattctttagacacggaatacaccatcactgactggcaggaatgtatctcagacacaatagttacagtgtctgattggtgtctctggaacgtatagatagcatctacatttataaaaataaatactatattcacaagtggcttctggaaaagcttcttttaaaaaaacaacattaaaatggcacattggcaaaagacatcacagccttgctgtatactaacactgccttgcaaatgaaaaacctgcactattccttatgatcagggtttcacccatttatttggttaatcattcaaatggctaaacagacctctaatttgaaaataaaaaccaattgatgcaatcacaaacaagttctaaaattgcggtttataaaaattgaaatcttgttctaagccaaaacacacacacagttaccttttcctaatcagagcattcatttctcctcattatgatctcacaagcacattaaaatcttattaacattaattacttctgagcgcctatgcatgagcagtgacagtcgtgagtgtgcgcgtgtctggatcatatctacatttatataccttgctgcactttgcttataaaacatgtgaaaatatttctgctaacaccaattagctaatttcacacacacacagatagtaaactgctgtctcactgcacagcctatcagaaaccagtaaacatatggacaaacggacgggaaagaaagcagaaacacctcttgaatgtgaaaactaaaatgccttatacttgagcctgaatacttaaggtgaaaacaagttgggaggacaaaataacaaaaatagaaaacaatttaaaatgataaaaccaagcatactattttctacacagatggtttcagtgataaaatgatagagacaaagaaaaactggcaagcaaaaagcagcaaacacaggagaaatatacagaaatgaaaatgtccttccttacatgtgtgtacatgcacacacatgcacaaacacacacatatctgctcctcttaaatatactcatattgtaatttgaataaaaacaatataaactttactctgaccataaggtaatagcacactacatttcaaagtcaaacaggtctatcctcacaagcaaataaatattcctgctcaaaccaaatgctttatggattctacttatactaagaacattatatacaggagccattaatacctacaatggaaactcaaggtaaatgcaaaaaccaaggcaattatagccacaaagctacatataactcttatctctttgcttcacaatctccttctctcagcatacaactattttatcattcatacatatactccatcaatttgtattcttctttgcctcatcatatgtccttcattaggaatattattaaagaataaccattgatcatcgcatccacattttctttttcaatccatgtgcccatcttctcctcacagcctagagtttataaatccaaagtcttattagataccactatatctatatagtctttctgccatctttaatttccttgttgccatcaaactatactgtttcacaaagaaaataccaaaaaagtctgtattccataatgaaattttcagtgatgaaaacacttaccctcattggattacaatacctatgtttgtaaacaaaggtgaataataaaacttaaacctaagagtattatactttttatagaaagttattttagaacatttgactacaaaataaatatagaaagaatatattcagccattcagcacaattcatgttaagttgatttaagcagttaagctataattatagctcatgctataattccaattttctacctattgtccagcaggctcattggcctatagcataggggtcaatgacccatagcaatataggtgtgcatgatagagatgggctacataacaaattcctaagtgctctctctgtagagtaggatatatattggagaagaaatggtagggagcagagagagggtttctaaatatttttgaaatagcattaaaatatatgacattggtattaatataaaatgtaaatggtaaccaagaatatactgtattttgttttaatttagtattattcaacatgctcataactgaacaaagtttagtggatattgtctgtgaaaactaaaacttgctaatataagcactattagctaataaagtgttaaaagtttttttaataaaggatagtaaaataatgttagatgcaataaaatggtatttaaagatgagcaagagttatttcaagtaatttccagtttaccataacaatttacaaattaaaattatcatccttacgatgtttacatagactttgtataggtaagtagcaactgtcacagtaatatttactacttgtaaatattctgacttaaccaggcttaccatactgcatgaagagtgccaaaaaaaaaaaaaaaaagactagagaactaagaaaataaaaagttgaaaacctaacagaattagtggttgcctgtctcataacacaatagcactctatgcttaaaaaaaatactgatttttaattagtaaacactgaaatatttgtttataggccatttatagcccactaaacaaaatctgtgaaccaaaaattaaagtattaacaacaattgccaaatgaaggtcaatctgtttttttaatatctaaattaacagatcagtggaaaaatatgagatttgtttttttaaaagattaatttatattaacatcttcaagaatactttgcattaagatagatccctaatgatcagaaaattatggaaaatcaggagtgaacaaagaaataatcttgagtaaatataaaaagtatcatcatgttaatcagttagctatgctgcagaaagcgtcccaagaatccactgacatatgaccaagaccgaactagcaaaaagtgcacaaatatgttgagacttagaacccaccttctctttcataaatgccccatcacaaactgcaaagattaggtggccaaatttcaacatcaaagattcacttggcattctgaaccagatctaagaatcatggtctttattttccagtaaaagctaataagctgagacttacttaacgctttcctgttttgttttgttgttgttgttgttgttgttttgagcttctcaaggaatactgaaattggagactacatgtgaaaacgatagttcatcttttccaaaaaaagatattcatccagattgccctccaatcggtgaaatctgagatgtctaaaaagtcttctttgtgaaagccttacaaatatatccaaagatgttgagtcccatatggctctgataaatgaaacccgttattgtgaatttcaagctcttccttaaatcaaaacactattgggtgaatttggtgctcatgaaataaagcactaattgcgtggcctaacaacactgaatcctctgcctagcagacattttaagttgtgccaaattggttttgggatgtgaacaaatatcctggagccagactctctcacatgcacacactactccctggaagtaagttggacactcttggaaactgcattaactctttcaggccaccagggaacctaactctcactaaaggaaaggcctcttttaagataaaaacaagtcatttcatctaaagttaaacctaagaaagaggtaaaagagcaaaaactaatttgtggctaaacactaaaatgtccatagacataaaatagtccttaaaccccagtggatgctttttcaaatgtatccagaaaatcttatttgggcataatttccaagacattaataagagttgtgtgcattcaggaaaagagaattcattttaagcttaatatgccacatttgcctcaggccgagtgataagaaacttttgtttctttggtaatcactctcaagcttattatatcaggaaatttcttgagtttctatttcaccacatgaaatatgatttccacactagaaatttttttatggtctttttgttctggttcagaaagatgcctacaaacatgaagctgagtatttaaatggcaattaatgtaatcccatctcccttgcactcaaatttaggagttcataaaaacaatttttaaaagcacctaaatataagaaaaatgtacaaaaacgggcgttgtatttctttctctattttttagtcttaatttcttcagcagtaatttcttagaaataagttgtttactttggtagggcattttaattaagcattttatttgcagtatgatgaaagcacagcatttctttccccttttatctcactaataaataccctggattatatttgtccccgggattacctaaactaactacaattttatgcttttaggtcactgtcattttgttgctgtcattcatctttcaccttaaaggcttatgaagatatagataaagtaaaaactacttttttggaggtggaaatagctaaatgcttgtgaaaatggtatttttcagtcatttctagtttaagccttctatatttcttagagaaccgtatttattttgtgtcaattggtgtgaatttaagagtattactagaaccctatgttccacctccaacaaagctttatattctaacaattagcctgcatgtgctgctgctattgactcttaataatatataaaaaaaacaacagccttgtcagccaaccctacaaggaaactagctgctatttgcaagtagacaggacacagttgtaaatcaaatgtgtgtagctgcttcgggcttctattggttcaaactgcaattcttagaatggaatacaggctatgggtgtgtttatatgaaggtcctctacctgattttctctggggttttggatctctgaataattcatatatttccaaatcaaaatttagaggatctgtagtgcactagtctgtgtttgtactatgtctgatgtgatggcatcacttctaagttctgttgcatattcagttagtcagctctggtaaccgagtaaaactcacactctagtagaaattgtttggtatctagaaccttactaaggacactaaggggtaaatggtaatattcaacagataccacattaaaaagttttcactaatttttaagtcaaatatttatcatatcagtgagaagttgatccaaaacatattcacaacttagggtgatactagggccaaatagcaactttcccctggggttcaagcacagaggctaactgggacagttataaactttatggaagtctaaaattctgattcgtatttctaccatggtcctcctttccaacttaaatccatctaatgatatcaatttaggaggaaaaggtatcaaaatttagcttatgttcatttcaaatacctcagattaactgtaattaggaggtaaaaataaaaatggcctgtctttaaataggtgtccattacatttttcacgtttagaactctgccatgagctcagaactatttattcaatgacatttcctttttccagttatatcttcattacttacatgatccaaataaaatagagaaaaaaaggcttcacgtggtggacactgtccttacagctcagctaattctaatggttttaaaagtctaaatatatttaataactagcctctacacctgagattatcagcagaatacttttttagatgttaaaagacagtagccaaagaaaagaaggaaagaaaacgtgagtagggatattaggagagcatctttatcagcaaaaaagctggattgtccaatttcctcactggagcaatgaataacctagttcccagtaccaaccccaacactgaaaactgctgtgtaactgtaggcaagttatttaacttcaactggctcctacttcttaatctgtgatgcaagggtaatatagtttcaggcaccaactgcttcctgcatccctatactggctaggatcttttaaaaattatttcctggacaaaacctcacccacatgccatcagttattttccctcctttttcctgcctcctttgcctctgcagggaaataaaattagcagtcaaagttaaacatgcccagtgggcaagacagactttggtttaaggaaagggatggagtaagttgtgttaaagtgcttatttggccccaaatggttcattgttgggataccacctcccacaactagctccactggaatttttctcaggaaaatggagaactgttttaagatagacatgccctgtaagctggtctcaaatcaaaataaatttaggatattcaaaaaatgccctacaggatttttcctgtggagcctaaataaatcactgaccaaattttccaattcatgctctgctgctaaaggggacgttctacaaaatcatgttttaatttctacatctgaaaaaggagtataggtaaagttcttcactttgggttttcattcttctctcttctctgacagtattctaaaagaatgccatttgagaaaagaccactcttagagaagaaaattgaaatataaccccaaatttccaataaacttgtaagtctgctaaagacaagaccataaccctggttagagattttgtgggtcttcctttaaaaaaaatgaaccttttaatacatagagaggtgttaagaatatcccaaaagtgtacacatatctaaatttacaaaatcatgattattttcacaactaaaggatatattttagagctcttttaaattgtgactgcccttactgcattttactgcatatcaataatttgcatattattaaatatttaaaaaatataaaaattacatttttagctatccatacaggataagtgagaaattgtacaagtttgcatacatgtgctgtcattttatactatgaggcattgtttttttcagacaagaacatcaggaatgctcaagagtcagtttttagatgttatgaagcactgaggcattgatgctgttaacactttcattgaaatttaaatgcaaaccaaatattttaagaccaataacaatggatatgccatgaaattgttgtgtttcacagcgtgtcataataggtaaaattggaattttccttcaaataatctgtcccatccaagagttttaactctcaaatataaatataaacaaaagattattcacttcaactgatttccctagaggattatgcattatcaattccaaactttacaagatttaagaaattactggactgattaagtgtggcaaactggtttgttccctacaaaggaaacaaacttaaatcccacaaagtttaattagcatttagtggctcaacaaatggaggaacagcctgattctgaataactgcaaagcagagtcagaaattgtatatactactggttaactttgctgtgaaaattagagtgaaccagaattcaatcccagttctgccacttactagatctgcaatcttcggtaaaccacttaaccattctaaatctttctttcctcatctttaaatagggttaagaaatacttcatagcaaaggcatggtggttaagagatcccataggcgaagttccttaacaattcattaactataattatcactacaatttagaccccttctgaccattgagaacccatgaattctacatccagctaaaaaccattttgcaatagaaaaattttttcaaaactcaatttacatggtctaagcaacaattatgatagcatgtcaggggctaatgtggtgccaaaagttagacattatcatttaacacaatgggaacctggtaaagatttactgaatgaggaaaaaatataataggatgtaatagaaagaacagagactaaatcttggctttgactcttagcagctgtgtgaatttggcaattttttctgtaagcttcagttttttcatctaaaacataggcagaaaaccagtgtatgcaacaaagttgttgtatgcaaagattaaattaaacagtttgtgtgaaaggtgcttagcaatatctcgcttccttaattttagcattataggacaagagttctaatcggttttcaagcctaaacttttcttatatagcagtatcaactctggcctcctacataaagtaagattatgtttagttaaggaataatgtgagagatgaggataaattcaggtgtgacagtaaatatattttaacaatataccctagaaacaagagtaatgattctcaaaccttgcaatattactaggatctttggtgtagtttttgcaaaatatggaagcccaaataccagtctagagactccaattttagatatgtgggagtagaacctaggaatctgtgtattttaaaagcccttggctgattccgacatataataatcaactaaagtcgagttttctgaagtatgtgggccagctacaactcaggatgcctgagttccattccatacccattaataatggagctcagaaatttgaattttaacaaaaatccgaagaatatcttatgtaaactaaagtttgagaaccactggactagaatatagtaagataatattgaaaagaatttttttcatatttggttatttaaacttttttccctctatttttaaataaacattactgtcaaaatttatgaatgatgggtaaaaattttatctaaagaaaatattagttttagggtaagtattatcattattattacaggtttcaaaatcaaaatgggaaatagagataacattttaagtcatctacagagggtccaccagcacagaaaagtatatcacctaggaaacaccatgcgtttcactgtttcttaaatttgtgtgttttgctttgacttagttttttattatccattccttctttaattagagcagtaatgccaataaataatatttgtatactactttactatttataaaaaaacttcatatatattaacttaattaatccttacaataaccttgtgaggtagataggaaaggtaatatatattatcacatttctgccaataagaaaactcttaaaaagtttgtgcaatttgcccagtcataagtttgctggtatttatggtaatacgtggactgaaacctctagatgtaaatttcatgcaaaactgtgtgaaatttaaaacttaggattcatttttaagtgctatgaatcaaactcaaaatagcatgagagtctctgaactgcaagtagtccatagtcctctaccaacctgtgggttcatcttactatataagttcattgtactttatttattatatggttaaagaatagaaggagagtggagctcaattaaccaaaaacaaatgaacaaaaaagtgaaaaacaaataaaaaaatggaatattcatccattataatactatttactctgcctacttgcaattcattcccctataagcccctttgcctcagtttcctcttctaaaacatgaaatatcaaatagcactttcaaaggctagcaatttcattttcaactatgatggtactttaaaaagtacaactaaatatacagctagaataatactaacatttgcccaatccctacaaaaatcctgtcaaatcaactagtccagtccactcattttatacataggaagtagacctaaaaaaacttaagtatgttaccccaaataatagcaaatttgttgtaaagctagaattaaaaattatctttacatcaaagtcaattacaatacacacttgtgaataggcaatgccttgttttcataatcaaaaagagaaaatggtcattttaagataaaaggaagaaggtaatttataaagggatgtttaggcaggaagtggtatcagaagctgtttttccaaagtaaaaaggctccaaacttatttacaacaaagaaatgtgtattttatatatatatatataacacacacatatatataatacatacatatatatatatatatacacgagaatgttataaaccagctagacataatcatttgtttagacctcaaatatttgcatagctctgtgctgaatgccaatagaaggttctggaggatgaataagacacagacactatcctcaagaagctcaaggtttagttggaagatgtgcttacaaacaatggcaatacaatgtgagaggtgatattgccaagttatgcatataaaattgctgtgggaatgtgaaagaaggagcacctcaatgcctgaaatgaccgagcttaagtgagtatctctgacaatccctgtcttctccatttccaattctaaattaaatacttccctgtttatgcctagaattgttaaagaattttttatataccctgataggagaaaagtagtaaagtgcacacatcctaactttttcttgggtaataagaaatttcaaagactaaaacatattatagaattttggtacagctactacgaaatcagggcctgaaacaatttgccaattttttgcaaatgtcctgtttttttgttgttgtttgtttttttcactaactcatgcatcagttacttgcacagcaacagggacacaaggtggcactgtcgtgctgacattcatttcagggtcctttctaaatggacaaatttgtaagagacagaatagaccctattgtgacaactaacaccacagttgtaatactggccgactgggtctaccaacattaacactggcctaaagaggagtattttgcatttcatgaatattatatcatgcctatatagaaataggacatattctctgatgacttctccaaaatgtcatgtgtgtattcatagaaatgtccaaaggcatagagtgcagctttgccattaggaagtcagaagtgaactgcttgctattggcaaggcagtggacacggatcgcctctccatctagtggccagtggagaggagtggagccatagtaaccatgctgcacttcattccattaaaaacagcccttttaccaaatcacccataggcaattaagtcagtttgtctgacaaatgactatttttggtttatggcattcgttcaatcattaaacagactcaataatacattatgatatgtagttaagctaagaaaaatcatcacaaaattaaagtgcctgtgctctctcaagccacataaatgtccgttattcttcctttattacccaccctaacttttctccatttatttgtgacttttagatagaaaatgcaagcaagattatctacatatatagctacttaaaatcacagtctttaagatgaaaaaatattttaaaaagctttctcctcattttacaggaaggaaactgagggacagagagatcatgatgtactcaaagtcacaaagtcagaacaaaaaaccagacctccagatttaaccactttaaatcctttttgatattgattaatacctcctgattccccaggaaatgctttttgtatcacaccataaagtttctttcaacataccagaaaaataatttctaaaaatgttttttattcatatattttcagactaaggtgatataagtgaaactactgtgtataggccgtaccacatcttcatatccataggtatattttgaatgtgttataagaacacaattatttttatattaaggaattacattcatccaacatttagaaagcgaaaaagcaagtggggtagggaataggtggatgtgttggtcaaaattactatacaaaaaatggtttcagaaagccattatgtgaaacaacctgaattcattcagactgctagaaaagttctttttgttttgtttcatacaaattatttgactttgtttttaaaaaggaaacacacgcacacttatccagctaatcacttcatctattttaattcagcatgtgatgctgtttgggggcatgttttgggaatgtgttgttggtaaagcttcttatcaaaacaaatgaaatctgtccaccaactataaaaatctgctcacaactccgaacccaagaattaaagggcaaaaggtatgaaggaaacctggcagtggatgttctagaaatgtgagatgttttgactttttcttctatgatcttctttggtggtaccactggaatctgtcttggagtgcagagggaatttatatagatctgctttagagagatgcaaaaactaatgctgtacagataagtcaaatgctttttaacgggagttagggaagaagtctttttatttcattatacttctaagtttagaagcttcaaaagcaccaacccctcagctaccctcagctttacccctgtaccctcagctttatcccttcacattatctcaacttctctctacttgtttcttaatcatctctagtcgtctcccttctagaaatgaggtgaggggataaagatcactgttgatttggagaactagagaaagtaagggctaatataaaaagtaagttatttttgccttacctaaagctaaggtaataggtacaagtaaccaagaagtggagaaattagtaaatatggtcagaaccagagtatatttattgggccaagaagaattttaatgtgtccagtatttaagaagaaaaaaaaacaaaaaatttataaagtcaccattacaaagtatttgcctagtctatttaaataataaaagagaggaacattttctcactgtttaaatgtcttggtgcctaaataagatatttttgtttatttaaaatgaagccacatagttttcacatacacatatatatcaactagaaaaattacatagcctggaacatttctagttttctgctagtaatagcttttttttttttttaactaagttttaagttgctacctgaacaaactgacaacattaattttctctcaattacattccatttacaggaaagaagttcatactataaaaggaattgcaacaacaaatcacaatttaattacaacagtaattcacagaaaatttttgaaaaggtaaaaatggcaaatatctaagctaattcagtaaaaaacaaaaatgtaaagccttctaaaaattagagaaaattaaaatttaaataattttaaatgtttcattttaaaaagtttaaattaagaattttcccaataacaaaaatagtactactatgtataagattcgtaattattaccatttctacatttttagttacaaccaattgggcatctatctttttgatatcccataaccccaacctcataccataattttatatttgttgaatgtaaatccttacattagtaatgtaatataaaaactttcaaatagattgaccttttaaatgcataatatgaacattaaattcatcatatctcaagacacagaagtattcagtgacaaaattacttccaatatcaagaaggtaaacatattatgctgtaattaccacattttctatcagagtttcaaaggtaagactgaatattcagaattaataaaaaatatgttcttcttccctctggaaactagatgaatcaatgaactcatagtccttgttccttgtctcagtattctcacttgaaagtcagtagccagctttccccaagttaagacaattacaaaggttgcattggttaactgaactacaaaacaccaaggctagagtttcagctgagtgtcaaaagattccagaaaggcaagctccatgtcctcaagctgattactttcaaatgaactatagaattaccaaaaggcttgatcctggagtataagagaggttatgaagccaaagtcaagcataatttttccacagtttagtacagaaatagcatgccacttattcattattacagttgaacagctagagtggcaaaaacaaaaaacaaaacaaaaaaaagccctttttcttataagcccttgaatgctgtttctaacaccggctgtagtggttactacatacatgatagtaatcatagatagcatatttcttcccatagcctcatcagcttgcctatgctgaattagaactaggggagctcaaggatattttgatatattaaacataattgtcatcaacattatttgatgattaatgtataatatctatgtaataggaaaacatgaattcaggtattctctagaatatctaagatatgtatattgccttcaggcttttggtaaagaataaaattgatcttgctagtttatttgacattagctatagttcctggagattatgcaaaatgctagaatttatttaagcaatggaaatgtatgaaatgggtttttcaagaaaattacaagtttcaagttttgtaaaatacctacacacctatacatgacttgaaagcttggtgtaaagtatcaaatgtaaatgctgactgtattagcactgtaaataatccatagtaattgtataaaataacaaaaatgtcttacacagtatgaaacaaattattttaaagatttggtttctaatttaatgataactctggcaggtacacacctgtccgattgctagtgtttattgtccttgatggagggtaaactgtttctatgtaggtaatacctgatttctataatgtccctgaaatagttacacagccatgcaaatgaaaatatttagaggttcttttcagtgctttgtgacttctcatggtaacttagatcttcactggttaagaaagtgagggataaggatactattttacttatgttttacagtaaaacatgtctcccaccaaaaatgtagtttgttaaaatatatttataaagtgacctccaagataaaccagctttaatgtccattttcaacatttagacttcagaggccacccttgaggctgaagaacccaggagctagcagcattcaaagaatatcaacaccagtcattcttttgccagaaaagatcactagttagcaatattagccaggtgctgctgcttcaacataccttgccagatgttggggtaacacgtttgctcagggcctgaatttggcttcctatgtggcggcatgaccggccactgcttagagttgggcaagtccatgaacacatccactgataatttctatatttatagaaagccagaacatgtgtagataatcacacaattagatatttatgtagtgccagattttatgaatacgagaatttgttaattagcacaaggactaatcattaaaattcaaaaatagataaataaacaggaatgccatttatttgttaacatttcatggggaaagtatgcagctgctatccttttgatgaatataggcttctggagataaaaatgtgcagaataaaaagtatctgcaatttttgaaaccctaatgagtaaaatccaataaatcactatatagtctttatattaaaaataatcatagtgattctcctcttaagttaaaaaagaagaaaaagtttaaactggcatatgcttagcatttgaattatatggtctggcattccattttatttgattttatttatttatttgttttgagacgtagtctcgctctgtcaccaggctgcagtgcagtggcacgatctcggctcactacaacctccacctcccgggttcaagggattctcctgcctcagcctcccgagtagctgggactacaggcatgcaccaccacgcccaggtagtttttgtattttttttttagtagagatggggtttcaccatgttggccaggatagtctcgatctcccgacctcgtgatctgcccgcctcggcctcccaaagtgccctattttttttaaaaaaaatctactgtttggtccttttcaaagagccaaagctgatttttatcagcacacacacgttaaaaagcacacacacgtcactcagtaccaaattgttttagctacagggcatggcaaagcatgaagtaacttcttagagcacttcctcatgtgggtgtgttaggtaactgtctgctccaacattaaaatgaaacacactgtgacctgaccaagactttggggatctaaacaggcagatatcatgtgctgataggaagagcccactataaccaataaggctgattaatgaatttttctggcattctatagcgctcctgtaacgcaagcctttcagctttccaaatccctatacagcagagtacagtggtttgaagtttatttatgcacattttataatgtccttctgtatttagattgtgacagtccctcccagaaaaggccaagattatttttcatactaaaaatattttagatctactgaaggttaagaattataatgcaaaagaaaacatatacacattctaaaaattaaaccaaacataaaaatggctacattattacttgcttttattcttgctaaaaggttaaaggaaattttcatttttctcttgaaattctctccattttttgtttgcttgtggttaacataaacacacataaagtgaaatttttaaaaatattgtatctgaaaagaagctgtgatgtatttatccatacatgtatgacttcgtgtcatacatgcacatgtatgcacagatatcgccactgtatgtgtgtacagaaaaagagaatgactaatcaagacatagatgaaagatttctattgataaaaacagtagaattttagatggtcctcacaaggctaacacagaaaatgacaggtgcatgagacatgtacacttttgacatacagtatcagttttgaaacaaatttttgggtcaccgtcagaaatggcataaagtatatataaaattgtatatgaaaaacaaaattatcgtgtaccatattaacataaaatactctcctaaagttccccttagaccttacggaaaaaaatctccgacgggacctgattgagcgtacttagtatttgtactactcttggtcaaagccagcctatccagtttaaaaaaactgttcaggcaagataagcaaattgaaagtctcagaattaattttttaaaagaagaggtaaaaaagtctttcagcagcaaaagttcatcaccttcctgaaataatggatttttaataaacattttactaggtttgaaccttgagaatgtgtttgggaatctgctctagtgtcccaggtgggttaagaatattgctttatggacttctttgtgttgtcagagaagcctaatggaattaagggggaaaaaagtctgccacttctgttaaataaataatttattacaaaaagatgactgttattatcaaagatctctacagatcagcatccattttctaacattgctctgtatatgccgaaacatttgtgtatctatgtgacttaaattttatcaaatgaagagcagttttactttgacaaatctgaaataaaattccattaagaagtccatttcaaatggcccttattaaaataatcctttcaattttgaagaacactattctgggaaaactcttcaacaatgtctgctagtttgaaatgtaacttttcccactataaaaaagaaaaaaagaaataaaggaaaagaaagcaccacaaaactgaatttgaaataaaaattatattatttatgctccccaaaatgttaaatgaatacttacagttgttgtgcaagatggcctgatacacttcatagcttccactttgtaaaaagatggccagcccctcactccaccctccccaagcataaataaacagtaacatactaaaaggaaactgtcctaggataaaaactgcttgttaagaaagttcgcattcttactaaccaaagtgatattcctataaatgtaaaagcccatctgcaaaataaaagttagaaaacagaataccttatttgtttaaaaatacatcccccagatgcaatgtttctatgtgtgtgatgacaaaaataattactccattcttacccaccctcagcaactacccctcaccttatgtccaatggcattaaataaacatgctggcaaaaagtattcaacctgcttcaaggatttaaactgtaaatatggactttaaacttcaacataaaacaaagaacaagagtctcactttagtaatacccacactggcactgcagctaaaactcattggcaaataactaacaaaaccgagttagcaataaataaggacaacatgatatatagacagacagatggaattgcataaacagacaagaaaagcaaagagacaaacatacggaagggtctgttttaaaagagtgaaagattctgatttatttggtactttagtgagaaaaatagatttgtttgtaattatttttaaagtaacaaaactgaatcacaagggcacacccctaagtaagtaggaagaaaattagtaaagggtaggcctcctacagatgttctaaattttaagctagcactagctctgtcaaacttaaatctggaaattaaaattcaagcaggaaagaataaaggcattgggggctaaaggagatgacagagggggcattgaggaagcaggatttttttttttttaagaaagttgtctgccctaccttcttccccagcgctgagtttctcttcttataatcggtgtctccctggaagtacagtgtgagtggtaatgactgcctgcctccctaatgagtccattttcctgctcttgatgttgtgtatatacacacactgcaacctaccttacaaaccacagagacgggaagagagagagagagcaagagagaggagggaggggggaagagagggagagagagacagagacagagcaagcgagtaagagagagagaagaggagagagagagagagagaaagaaaaacagaaagaaacagagagaaaggcacagacaaagccctcctaccagacagcagacagctctccttcccctatccagcaaaatgcaactcgtctaatgcagcaacaggttcagtattgccagactaacagagtgaaaaaggtatattctctatatcattattgcttgcaaataaacagtttaagagcagctggctccaccttctttatttatgctccattatgaggaatgtattgtttcagttctggcagtacatgtaattatcataaatacattttttgcatataagcaggaaatagtgaaatgcatagcttatttgtgcaatcttttaaatttatttttaatgtgagaagaatgtgaacaaatcagctctgacaaaagcctagtaatgattttaaagtcagagcagtcttaaaggaggctctgtaagaaacagactccatacaataggaaaactgatctcagacaaaactgataactgcaaagaagaaatcattgctcagttaataaatcgagaccatatacaaaattgcagacttacaaaattacagaccaaaacagaattaagcttaattaagtaactaataggctaggaacctagaagaagggagattggcttctcatttaaagcatctagctgtacaaacatcacaatgcaatgtactctgtgtgaacaggtgcaatgcgtatagtacatagtggtacaacaacagaaataaatcccataagaagctaccatcacaatcaggatgatatttcatagaatatgggactgaaactacagcagttacccttaatcttttattaggagggaaaaataaaaataatcaatgcttctaaataaacttgccttaaaagagaaaaaaaacagtttttctttgtctgatacttctaaccagattttttctatattctagttccaaaattatgatgttattatactcctcaccccatcacatgcttcccacccactttccccactcctaggtgccctttctcctgtaagtgatatatttgcagctatagaattacaaacatcagaaaacagaaatagttttaagccactctcctcgtccccgaatttttaaaaactagactctgcttgacgagtcatatctccttctagcactattatctatctagacacccaccttccttaatatatttctatacagtttggctatgtgtcatttagatgggacttaagaacattataatagaggtaaaattttctaaaaaatatttacacacaaataaaaaatataagtgcatttgacttattcaaaccctgcgtttgggcaacaataatcctaagtatatgaattgtaaaaatcatcctttttatgtggttttgtgtattaacatgcttcaaaaattagaatatgtccctctgcataaacaaaactaccttgaaacaacagcttcaattcttttgtttaaaaaaaatcagttttcaattaaaaattaaataactttcaatatataacttatagatcaaccgattcttcaccttattcacaaaaatctttaagaatgtcaaataaattttgggtcatgtttagaatacagatcaatattgctttagctattttcagggtggctaacctacagcacagacattagaatgtaatatctacctatacattatacaagctatcctgggaaaatttctagtaagaaaccaagagtccagaccactctagtctcatcgtaatccaccaattcaacctctctagtgctgcagtagtatatcaccctcccaagggtggatgattaaaaggagacagacacacactaaaaatgatttaacagtctcctacttcaggtcacttgtctgtagagaaacttttccaaaatatatttagtgtgcccaaggtaccagcatgtatctcctcctcactatttggcctggcagctctgcttttctactattgccctattgtttctccgaagctttattaaaatgtattaagaaaaatgtcaattaaaaaaacacataaaacttagagtttgacagatggatttgaattagatatttgtattttctgaatttttaaaataaggttctaggtattttattttgtttcattttgtttttattcaaggagaagacgtatttggtttctaccagcaggaatcaaaaggaatataaaggaccatgaaggctcttttctaaaaaacaacctgagagctaaatttaaaaggaaaacaaatcttttggcttaagtgaaaaatgagaccgggcacagtggctcacaccgtaatcccagcactttgggaggccgaggcaggcagatcacaaggtcaggagttcgagaccagactggccaacatagggaaaccccctctactaaaaatacaaaaattagctgggggtggtggtgcatgcctctagtcccagctgctcaggaggctgaggcaggagaatcgcttgaacccaggaggtggaggctgcagtgaaccaagatcacaccactgcactctagccttggcaacagagcaagactccatctcaaattaaaaaaaaaaaaggtgaagaagaagaagaagaatgtacaacatctcaaaacttttcccatatctgtacattttactagattcaaagcacaataagtagtacattgttagtacttactggaattcaagatatactttccctagttgggactggagacaataaggtctgaagaaatcattgtaattgactaccatactatggaagttataaagttatttaattaaattgcttcatgtgttgatatgtcatggggcaatttggttctgtagaaagatcctaaagtggaagttaaaaactggttctgtcccaaattgatctatagattcaattcaatcccaatcaaaatcccagaaagttattttgtggatatgaactaaatgattctaaaatttatatggagaggcaaaagactgaaaataaccaacataatattgaaagagaagaacaaagttggacaaatgaaactaccagacttcaggacttactataaagctacagtaatcaagaatgcatgatgctggcaaagaatagacacagcagatcagtgcaacaaaatagacagcccaggagaaggcccacatatgtatagtcaactgatctttgacttaaaaggaaaagcaatacaatggagcaaagacagtatttccaacaagtggtgacggaacgactggacgtctacatgcaaaaaaataaatccagacgcagactttacactcttcacataaattaactcaaaatggatggatcataaacctaaatgtaaaatgcaaaattctaagactcctaaataggaaaaaatctggataattctgggtttcacaatgactattttagatacaacaccaaagacataatccatgaaagaaataattgataagctggatttaattcaaattaaaaagttctactctgcaaaagacactgtaaaggtaatgaaaagacaagccacagactggaagaaaatatttgcaaaagatgcatctcataaaggactgttatctaaaacatgcaaagaattcttaaaactcaacagtaagaaaatattataacctgattaaaaatgggcagaagactttaacagtgacctcaccaaagaagatatacagatggcaaataagcgtatgaaaggggctccatattatatgtcattggggaaatgcacattaaaaataacaatgacataccaccacacatgtaatagaatggcccaaactcacagcactgacaacaccaaatgatgatgcggatgtggagcaacaggaactctcattcattgttggtaggaatgaaaaatggtacagccactttggaagacagtttggcagtttcttacaaaactaaacacatatacaatccagcaattgcagtggttggtatttatgcaaaggaattgaaaacttatgcccacacaaaaacctacacacagatgtttacagtaattttattcataattgccaatatttggaagaaattaatatgcccattagtagatgaatggataaattatggtacatccaggcagtgaaatattatttagtgctaaaacgaaatgagatatcaagccatgaaaagacatgtaggaaacttaaatgcatattactaagcaaaagaagccaatctgaaaagattgccttctatccactgtacgtatctatacactgtatgattccaactatatgacattctgaaaaggcaaaaccatggagacagcaaaaactcattgtttgcaagagtttagggtagagagagggatgaacaggaagaacacaggattttcaaggcagtgaaactactttgtataatacaatagtgacagatagatgtcatacatttgttcagacccacagaaggcacaacaccaagagtgaaccttaatgtaaactatgggcctggagtaataataatatgtcaaagttggcttatcatatgtaacaaatatatgactctggtgggggatattgatgatggggaggctgtgcatgtgtgaaggcagggggtatatgagaaatctctgtacctccccatcgattttactatgaaactaaaattactcaaaaaaaagtctattaaacaataaattaaaagaaaattggttctggtcccagcattgccacaaatagcttgcgtaccctcgtcaagtcatgcaaccatcctgagtttcagtttcttcctatgctaaaaataacaaatttaaaaggacggaattgaacagcgtatcataataatagttattaaagccaatgcttaagtgcttactatgtgtcaagaactgttctaagtactttttatttcttaactctttaaagcctaacaattaccctataatgtaggaattatttttagtctcattttccagatgaagaaaaaagagagattaagtgacttgcctgagatcacatagcataataataatgataggatttgaacccagcctgtctagcttagagtttatgtgtttaatccctacactatactgttttacccaatacctaaagatagttaaggccccatccagccatgactctgtggttgtgagtcaaatctagtaagtcctgatgatttcttaccctatcttgcttactaacacagaatagtgaaaatttgctgtttaatacccatagctctcaatacgttcaatttaatggtacccagcaactccatctaaagtacatactctatcatgcattcttaaaggttgcatagttcaagattcaaatatctaatagtaatgcaaataattgtttaaagaactaaataataaacacaataaaatatttcctattttctatagcctgagaaaggaattaaaaaagcaagaattcaattgtaaaggatttgtgtattttgggggttttgtttgtttgtttgttttttgagacagctccgtcgcccaggctggagtgcagtggtgcaatctcggctcactgcaatcttcgcctccccagttcaagcgattctcctgcctcagcctcctgactagctgggattacaggcgcgtgccaccatgcctgtctaatttttgtatttttagtagagacaggatttcaccatgttggtcaggctggtctcaaattcccgaccttgtgatccgcccacctcagcctcccaaagtgctgggattacaggcgtgagccaccgtgcccagacaagaaaagtctgggattagtgggtcaaaatgagtaattgctacgctaagtaaatgactttgccattgaggacaccaccataaagttaattgtaagtggcgtaattacacaataattctttttttttttttttttttgagacagagtctcactctgtcgcccaggctgtagtgcagtggcccgatcttagctcactgcaagctctgcctcccgggttcacaccactctcctgcctcagcctcccgagtagctgggactacaggtgcccgccaccacgcccagctaattttttgtatttttagcagaaacggggtttcaccatgttagccaggatggtctcgatctcctgaccttgtgttccgcctgcctcagcctcccaaagtaatggaattacaagcatgagccactgtgcccggccaattaggcaataattcttaaccctagtcatctattttaaaattgtatcccatcgggcccaaggacaatagtaggccaggagtaccatccttaaatgggaagagttgcacatctaatttaaattctaatcaacaaatgtttaaatttaaaactaaaataaagtattacatgtaaactaagtcattggaagtacatttattatggccagaggattttatatgcctctctccctacaagactaagagactccctccccaccatcgccaccttcttcccctctgccccccagagcagagaccctacttattaagctttgttggtctagcatctggcagtacacctgtaatatatctgaagctcaaaaaagttttcctgaaagaatgaatgactaaacaaacaacagtacatagggtttataaaccttggttaattaaaaacttaaataaatttgagatataaggatgatataaacaagtaaatagcatttcaaaaaatgtattgtcacatattaaacacatccttatcttaagatcttgtgacaaacaaaaatagaaaaagtaatcttcaactttgctgtatgtttgaaagaatttcacaataaaaagttggataaggctgcatgcagtggctcatgcctgtaatctcagcactttgggaggccaaggtaggagggtcacttgaatctaggagttagagaccagcctggacaatatactgagaccgcatgtctataaaaaaatcagccttgtatgatggcatgcacctgtagtcctagctacttgggaggctgaggtgagaggatttcttgagcccaggaggtcaaagcagcagtgagctatggttgcaccactgcactgcaacctgggtgacagagtgagactgtgtcaaaaaaaaaaaaaaaagtttgttaaaaaaagtattcatatctcacaccagtcagaatggggattattaaaaagtcaagaaacaacagatgctggcgaggctgcaaagaaatatgaacgcttttacaccattggtgggaatgttcaaccattgtggaagacagtgtggcgattcctcaaggatctagaaccagaaatgccatctgaccccacaatcccattactgggtatatacccaaaggaatataaatcattctactataaagatacatgcacaggtatgtttactgtagcactatttacaatagcagacatggaaccaaccaaaatgcccatcaataatagactgggtaaagaaaatgttgtacatatacaccatggaatactatgcagccataaaaaggaatgagatcatgtcctttgcatggacatagatgaatctggaagacataatcctcagcaaactaacacaggaatagaaaacactgcatgttctcactcatatgtgggagctgaacaatgagaacacatggacacagggagaggaacgacacacaccagggcctgtcggcgggtggggggtgagaggagggagagcatcaggacaaatagctaatgcatgtggggcttaaaacctagatgacgggttgatagatgcagcaaaccatgatggcacacgtatacctatgtaacaaatgtagaggttctgtgcatgtatcctggaacttaaaaaaaaaaaaagatattcccatacaactatcagaatttcaataaacatcatttctgaaaagaaaattcagcttgccttcacatttcatttatctattatttctttcaaatctataacataagtgtttgtaaaaggctgaagttggcttcagagtacttcatgggaatggaattgtcctctttgaggaaaacatcttgataagctgctggagtcagagagtgaggcatgaatatttcttgtggggttaaactgtactacataaaaaatgagtaacaatttgaagttaggggagcacagagatgagagggaggaagaagaggagtagtgggaatttcccaatgtaaacgtggccagattttttaaagtaatgcctaataataaattctatgaagtttatgttttgtgatgcaaatattctccttctctccaaactttcaggaaaggataatgtatattctacagtcttatatagtagtagaacgaagaatcaaataatgaaaaaatgaagttattgcctcacattcacccatatactgtagcctttataatcacggcagtttcctaataagacagaaaatattaccggagttcctcggagtgaccagtggtagagtgaacagtggccagtgaatagtaaatagcaaagagtagaaaatcaaaagtatctttaatatagaatgactcatatctatatatgagtcattttccacaattgtaaaggagaaatatgaccatggggaaaagtggcacggagtttagtatctgaatgataagattattatgctattatagctgttgttactactcctataagctgatcttaaatgatatgattatctttagaaatttagaagagggtacttttgtgacacaatcaataaatgctaaatcaatggattacaaaatataaaaatgttatttgtaatatctccctggctccagaacaacgtattagacacatatactatatgaactcttctgctgcctggtcaatcctctctactaaacaatctacaacaatgccagcaactatcttaaaagtttccacatctacataatttacttatatgtacagtttatatttaatacaaaaggaaaggaaagagaaactacagagtgcattctataggaaaaataaaagtcacagagaagatataaaaggtacatcttaattgccatagatgtttgtcaagcaggttggtgagatccttactgtttgacctggtgcggctatactcaaaaactcaatagtcttcatatctttccaaaatacaaaagttgctactattaataagaatgctttattaaaagttatctctactacatgtgtcagaaacagcccaacatacactttctcatttaatcccccaacagcattaaaagaaatctcattttcagattatacataaacaaaaagaggcccaaagacacagacctaataagtagtaaacgtcgggcctaacatctatccaaatagaatgtgtaaggaatagaaggaggggctttataaaattactccaaaaattatctagaataacagactggtgatattaggtagaaaaagaagactaatgatggggaacagatttgaaaggatatatgttccctagataatttcagaacttaaaattttatatttgtttgaggaaaagtatattaagtatctcaaagtaaaatttaaagaaaggataatggaaaagactagtatattaaaaaatagctttcaaaagcgatgaaagaaacataccatgaaccagtttgattaaagagttggaaacattaggcggggcactgtggctcacgcctgtaatcccagcactttgggaggccgaggtgggcagatcacctgaggtcaagagttcgcaaccagcctggccaacatggcgaaactccgtctctactaaaaatacaaaaaaattagctgggcatagtggcacatacctgtaatcccagctactcgggaggctgaggcaagagaatcacttgaacccgggaggcggaggttgcagtgagcagagatcacgccactgcactccagcctgggcgatagggactctgtcttagaaaaaaaaaaaaaaagagttggaaatattaatagcaatctgtccagcaattttgaagcgagttattaataacggagtcagcatgatagcagcctgctaagccctctgaggcaacaggccatagggatgattcaaaataggtagaaatggtatcttttatttttaagaaaaatcacttagccccaataagctgtaggcttatagccataactttttaaaaaatgtataaggtcagatcaaaagtttttataacataatctacataaaatatctatcttcttcatttgtattaaatacaaaaaattactttacagtatatacattcagaatgtatgtccgatatgtttggtaggattcttgaaaaataaaaatttgaaatgaattacattaaattttattttacacttatattgggtatttcaaaattgtcatttacttaattttgactagtttatcagtttatatctcaatgaagagaattgtatataaaacaaatccggccaggtgtggtggctcacgcctgtaatcccagcactttgggaggccaaggcaggtggatcacctaaggttgggagtgtgagaccagcctggccaacatggtaaaatgccatctctactaaaaatacaaaaattatccgggctaggtggcatgtgcctgtaatcccacctacccaagaggctgagacaggaaaaattacttgaacctgggaggcagaggctgcagtgagccgagcttgcgccactacactccagcttcggcaacagagtgagactccatctcaaaaaaataaaaataaaaataaataaataaataaataaataaataaataaataaataaaaataaaacaaatcctccttcatgttaaatgtccacacatttgaatggattgaatttacttatcactaaatatgatgtactactctatttcaaaccgatggcactttaccactgaaaatgtaataactggatcttccataacacaaataatactcccaacatcacttaaacctatgtgaaatttgaatatcaaacagtatctcaccagttgagaaaattttattagtaatcaacaaaagaacactgcccataatgaaatctgtattaattacaaaaagagttatgaaagaaataaatcattattatgaattttattttaaaaattaaatggtttgggactccaatacatacctcttatgatgttttatctgaaggtcacaaacggaaataaactgcaaaccactgtaagctaatatcttaataaaattcatgtaacttttgtctaaagtaattaaaattctctccctagtatttttccaccaataaatgcacttaatacccactcaataattaatttgcactttagcagtttaatcagatgtttaaaaatacatatttacaataaaacaatagatattatagaatatttgataacataaaataattcaataattaaattctgaagttttccaggcactacatttttactattactattattttaagttaccttaataagtgtatagaaataaataataaattagagaagttttaggtagtgctcagtggcagtcaaaatatttatagctcataaggaatgggcacagaagaaatgttaccatgactaatcaaaacagatgctggctgtaaatacagtgtgtattccctgaatatcaaccctagctttaggtgtcaaatcaaaatccatctcttaaagctaatcaagaaaagtgaagtaatatgtagttttaccactgagttccttcccctactctcaagaaattgattctccgattattaaaaagtgtatgctccctcagtaaaaacatttaaaactttgcacagatcactgttagttctcaactccattcctatctaaattttagattattactaaaattttaaggctcttccatgtttgggtgtgtattttctattacatttttgtgcttagatttaccttttattttttaaatgacataaagtatttatacatatttatggggtatatgtgatattttgttacatgcataaaatgtgtaatgacaaagtcagggtatttaggttatccatcaccctgagtatttataatttctatgtggttttctttttttttgagtactctcttctagctattttgcaatatagaatatttttattaactacagtcaccctactctgctattgaacattagaacttcttttgtctgacgtttgtacccattaaccaacctctcttcatcctctcccaacccactcaatcctcccagcctctattatctatcattctactttctgcctccatgagatcaacattttagctcccacatgagtgagaacacgagatatctgtatttctgtgcttggcttatttcacttaacataatgacctccagctccattcacattgctgcaaatgacattccttctgtcttacggccaaatagtatttcattgtgtgtatatatgccacatttttttatccatttgtccactgatggacacttaggtttaatttcatatctttgctactatgaatagtgctgcaataaacatgggagtgcgggtgttcctttgatatactgatttctttttgagggggatactcaatagagagattgcaatagagagatctgtttttcattttatgaaaaatgtccatactgtttttcataggggctgtacttatatacattcccatcaacagtgtataagagttcccttttctctacatccttaccagcatctgttattttctgtctttttaataatagccattctgaccagtgtaagatgttatctcattgtgggttttgatttgcatttctctgatgattagtgatgttgagcatttttcctatacctattggccatttgtacgtcttcttttgagaaatgtctactcatgtcctttgcccactttttaatgcaattaattgtttttactgttgagttgtttgagttccttatatattctggttattagtcccttgtcagatgaatagtttgcaagtattttctgctgtgtttaaaaggtttaattttaaaaaacagtaacaatgacatcctacagcagttatgtgtctcttgacttcgatttattcactaaaatagtttgcatataattgatgggtgaattcctcttccaggcactctttctatggtagaagttaaaaactacaattcttagatggctttgccagaatatgaagcattggtataagatcaaaggcaaagacagacttcttcctgcctcctgcttttggcactgaaaatctcagcaatggtgctccaacagggtctgcagcacagaagtcttggtatctaggctctggactgctgattgcaacactggttatgcaagtgcagaacaatgcaagtgcagaacaacagcagccaccacaagtgactggaagctccagcagctgttacaagcacaacagaattcaagaaattacatattatcctggattcttgaagtgtccataggagtgcggacacctggcttcctacagtgcagtgagattggtgattccaacagccacagcaaaatgtggaagcagcagcagcagcggcagcataatacttataggctctggataacaaaactttcccttgctttctgaaggaatttgttactaaataatattgccaccttctatttgctcaaccagactttccaacacttttgtaatcaattccctggattgaagttcctcttttctgagtcatttctgtttgtcttggcattgattaatataagcccatactccaatatatgcataattatttataatatacatacattactacaatacatacattacagaacatgcagcaatagatattttaaaagactgaggtaaacaagaagtaaacattctaaatttggggctctgtttatcaacaattttaaaacattttgctcttactgaagagcaaactgctcttgatgctcttactgaaaaacattaaaacaaaaatttgagtaaatatgtgtcattctctacgtcttggcttggttttacactttgtaaaacagtcatctgaaaatacagtactattttcaggttacttagatataatggttgtcatgggtgcagaggaggggtggtggtaagttgagggagaaagcctcacaaaatagtaaattcaaatggaagaagagtatcaatggctgtgcttactacatcaaaataatcaattttcaatattaatggccaattatgtaaaatactttgttgaaatttagctagtaaatttccatcttcagatgaataagtcattcctataaactaagaggtgtagcgttttattttttaacaaaaggattttaaaatcaatttaaagattacatttgaaagatcttaaagtaagttataacattatgttccaagttttacaaaatatgccaatatatttttgtacaattttcaatgtatatagaaactagttttacaaatacattggtttttggcaagaaaatcacattgtaatgaaaagaattacaaacattcaatatgaaatgttttctccataaccacaggtccttcaaaaagcagttaccttctcactcattattagtactactactttaaaaagacagatcgaatatgttatttttcaaaaatatacattagagcgcatagtatggacagtcacctgtcataacagaaaaggtgagtaaaattagaaccttgtcattctgtaaaagaaaaatgcataactgccataaatttcttattacttctcaatactctaccactggataaccagtgaacctcaagtggtgcaaatgatattcatggcccattctccatcttattacaaagtatcataaagattccactaaaattttaagattctttcacatttggtaacatatttttgactacattttaaagctttaacttaaaaaacgaaaacaaagtgaccacatcaatgatgtcctacagcacttgtgtgtacttgtgacttcaatttatttgttaaaatagcttgtctgtaaaagactgaagggatttcatgtgtagaagtagttctgtaacctgcctcggcaagcttttttctattccattcaaatcgaccactccaatattctaaaactatgtaactatagataacatagattttcaagaacacactgttttactgtagggcagtattttgctgtttagccacaatcttctccagtgattattttggtgatttataacaacatagttcttcgaattatttcaattgagcctagcaaatatcattggatgaaatgttagaaatattggtactttcatttaactatatagtaaacattccacactgcataatttgttcaatacttgtttttgcaaatcttcagcaatgttttctatacatattctagcagtatttgctgacaaatgtgatagtttgttgccatattatttttcacacattatttcagccattattgctcttgaagaacagtgtttccaatggtaaatatgtttgtattttaatattgttttttaaatccccaaaagtcttctaaatattaatttaatgattttgtaaagtctgtactgagtctcacgtgacattaaacactgcttgattcatgatctaggtagttagattttaatgccttaccaatgaaatggtcttccaccatcgcacaccatacactgagggtgacattctttttcaatgacagtgaatataaatcatttcaaatagacttcttgattattatttttgatcaatgttcaaatattgctaaatcatcattgttcttactttataatgtagtttacaaagtgttcataatatgtttcagggatgttctttttcaaatgggcttggattattagtatcatcttttctatgctttttttcagtcagttgtctgttttgtaagagttagttttagttaaactaatctgtcactaatctgtgactccacataacaaggcacagataacatttagtagctccaactctttaacaaactccactctctcccatcaggatgttctgtttaagtagcaatgcatgtaaataatgctctgatattgcccagctctatctgggcatattaactgctggtaactttaacttcttagattttttaaataaaaaacacaaataacaatttttatttcctctcaaaccctaacgcatcatcttgcatatttcttggaatgcatggactttatttttgaggccactattctacagtatgggctttggactcagattttaaaaatatttattggatatgtatattgaagcaggttacttatccatgagtctcatatagcttatctataaaataagaataactatatcacagaactgtttgataactacattagattgataataagagataacatttttgtgaacatacaaagtgcaaggctctagtcaaagcacacaaaatttattaattcttgagtatggcgtctacacacaatgagcatttgataaatattagttttcttccccaggaaagagagaaagagaaagaaagagagagacagagacagagagaaagaaaaagagagcaagagaaagagattaactgttcaaaataagcaatatttattagggcaaataaagttggttgtttacatgcctatctcttccacaaaaactcaaggctcctaatcatgctgtagtcatcatgtatctgtattcaaagtacaaagatctgaatatgttatgtgctcaacaattaaataaatattgttaagtgaatatacatagggtgacaccatagcttgctgtttattatctgtaaaaattacagcaaatccagcattgacaggatgttcaattaactgcacaaccattgcaaaacatgctattgtttttgccaaattctattatactgttgcagaaagtgcagaaagggtaacactctccagagcttttgaaaatacagtactctttgattatttatactaacagatgggacataaggtatggataatccaaaaataatttgtttggattttgaaatgtgtttttatatttatatctaagcattggcatacctaatattctataagaatgaatgtactttgaacaacaaaactagagtatgaaaagctgacttagaaaaaagtttaattttaacacaaattagtttctcttatctttttccttaacacttctgtgtaacctataccactttgattactccagctacatagaactcaccttttcccagaccttatcagattatctaaatgttggtttctacaggaatattttctgtataaagcagggaattctcatcaataaatctgaaatcaagtttgcctaggtattattaaaaaacaatcaacagaaatataaaatatgtcatctgcttcaaaattaggaatttttatttttaataaattattttattcctttgtgtattacaatccattaacgttctccacaactcttttttttttcagttaagaaaccagaggtagagaaaaactagcttgtgatatacaatatttagttatgtaatccatctgatatctcacaagttttcctgtcaaattcatagtgctcttatttttttaaaagataaataaattattgtgaaatgtttaaatatagtaaaaggaggaataataaatgcaaggcatcactgtgtctcaatgagaaactgaaagattagcttttcatcttactcttaattattcatgggccatacactctatctctaggtgtatgggaagcagagtgcttcggtagaaagaacgtggcttttaaagtcaaagcctggatttgaaagaagcttccacattcactacctgtgaccttaaacaagttactatttttccagaatttcagtttcctcatagcaaagagaaggcaaaagtattaaatgagaacatatataaagtgtttaacccttaggaaatattcattacatagtaatccaatttctacctttcttcccaaaccagaaattctcaaattttgttgtattgtagatctcttttttaatttttattttttagagatggagtctcactctgttgcccaggctagagtgcagttgtgtggtaataacttaactgcagactcaaactcctgtgctcaagcaatcctcccacctcagcctctgcagagtggctggaactacatgtgtgtgctactgttcctggtttgtattatagatctcttctaactactaatgattcacatcaataattgatacttctctatcacataagttataaaatttcttcacataaactgttgaattaaatcctcactgtcactctgtaatcatactttaacctaggtcaaccagcgcacttaacattccatcaagcctgctcccctattttaaaaaaaaagtcctcaccagaactaaccgttttacactaagaaagtgacatctaatgataataaatattattaaactatttggctaggtctaaataagagcatattcacataaatatcactagtggttctaggacctaaaactttacctggtacaaatttttttttttttttttttttttttttttttgagacggagtctcgctctgtcgcccaggctggatggagtgcagtggcgcgatctccactcactgcaagctccgcctcccgggctcacgccaagtacaaatgtttttgtaacactttcctacaaaacagcttatgaaacaaattaaagaaaatatgctcacatgaaaacttttaatagctattatgattattttagaaagagaatgaccctcaaataaaatttagtatattttctattctttagtaacacattaaatttcctcagtataatttatttctttgaaaacgatattgaaaaaatagataatgtctaaaatactgggtggtccatcaaaacaagatccccacttaacctaaccaactctgagagaatagttggttaatcacttagattatcctagggccacctctcaagaccacaatttaaaaatcatttattgatcctttaccttctcttgaatatgtttcttactaattagaaagaaacagagtataaaagttaaaggtatgtgggttctgattcagattgcttaagttcaaatcttggctttacttttaaatgaattccttaacattattaacccttttgtactcatcactaaaatgagggaaataaaaggacctatattatagagtttttctgatgattaaataagataattcaagtactggtaataaaagttgctaaaatttatcaggcattttaccatattcagacactgtgctaaatattttatacatattatctcatctaatattcacaaaaccctgtataatatatcttatagatgagaaatgtgagatccaaggtgccacaactcatacaccagaaccatgattaaagcacactaatcctacagtacaaacacttagtgctaggtacatgggaagctcaatgcctggcacatagaaagcattcaataaattttagcttgtgtttatttctattttatctaaataccaatttatttgaaagttctaaattgaataaagtagttctcaaatattcaatttcacgattccgattccttgcttttaccgtatccaaccccactgttctaaaacagagagagagaaagcacacaagcaagagtgtaatactgtgaattacttatatgacacttagctaataaaagtcaatagatggaggagtctttaatgcatattactaaatgaaagaagccaatctaaaaggctacatactgtatgattacaacaatatgatattctggaaaaggcaaaactatggagacagcttaaaaaaaaaatcagtggttgccaggggctgggggagagagggatgaataggtggtggacagataatttttaaggcagagaaattactctgtatgagtcttataatggtgggtacataatattatgcatttattcaaacccataaaatgtataacgccaaaagtgaatcctaacataaactatgactctgggtgacaaagatgtagaaacgtagttcatcaattgtaacaaatgtaccgctatgctggaaaacgttactaatggtggaggctatgtatgtggcggtaagatgtgtttagaaaatctccgtatcttatgctcaaatttgctgtgaacctacaattgctctaaaaaaaaatcaagtctattaaaaaatttatcatgtagtagatcttgtataaagtctcaacaaatatcaaagaattaacatcatacaaactctctaagcacaagcaacttaagtaaaaaattaacagaaaaaaattttttgagtcaataggagttattttgggaacaaaacacaaagtaaagacttgaggggattgaaaccatcaggatgaatgtaagccagacgggggcaaattgcagaatgtcaattgccttaacctaggaaaggtaaatttctaaaaatgataccaaatggttaaaaatcactaaatgaggaattgaagagaatttcaggttagaaggttgtaaaaagtgaaataattgtccaaagtcaccaaactagttcacgagaaagctggaactagaaactcatgcctctcaatccagtgttctttccactgtaacagattggcaccatagaacatgtttgactcaaggcagtaaattaagtacactgaagaaaaagataagaaaaaagtgataaaatgtaaagtctttgattcagacccaagtattacagctgctatggcaaaaaatagccacaatttctaagtgactttaaccaggaaaaaaagaaagagatgagatttgaaaaggaattaaatttcaagaatcaacaggaagtgatgacagccttccctatttggtagtttcaggcctgaacttttgtcattaaggtaataattcaaagtgctttaatgcctggactgaccacactaaataacaaaattataacccgttgagctacggtcagttttataaactgtgcctaaaatttcctgagttcaaatctgattataaatgggcaataaattcatctgttcattgggctgatttactttattttctgggtgcatttaaaatcttttttattgtggaaactttcaaacatacaaaaagagtacataataaatgattcccttgtacccatcattcaatttcaataagtcacattttgcctttcaaattttacctattgccactaacatcctttttttttctggagtagctgaactgatttaagatgaaggaggaaaaataaaggatgaaaggaatattttcaatctgttattcattgatactctagccaaaaagattccagattatgaggcaaaaagaaaaaaaagacaagagtcaagaagtcaagaataatgaagttgaagtctactagtgagatggtctagatgcattacttcaaaataaatggaactattgtctatgggggaggagattttaacaaactattttccaataatttaagtttgaccaaagaaaaatggcagagaatgttgtaaagctttattgatattatagtttatagagatgggcttatcttcaaggaacataatgattaatcacatcatgtttaaattcatataatcgctaacttaccatattccagtaagcacctataggaagaaaagtttgcactattcataaaatttcaatataaccaagtcttagtttattcttaaagctcaaagttcatttttatttcccttgaagtctgtgtttttctgtacttgagaaagatctcctcatttttaaatttggaaattttaaattagaatttaaagtgactttggtcaagttcagtggtcttttttaagtaatattaataaaattacatatttctggacctcgaaggattcttctgagcatttagaatcatactgcagtttccagactaaacactttagccagagactatgagaagcaggcaatgaggcaaatacaagcatatcgaaattatcttgatcgaaaagaaaatgtggataatgttatgctgaaccgtcttaatttctgtcatgaaacaaaggggaaaacttggcaagtaaagatgagagatgaatttctaatgggggaagaggagttaaaactgaaataactagtgaggcccaactaaggttttaaagcatgaatctaaataccaagatttttttttcatatttggttcctccctattgacttttgattgcaagaccaatggacagcgaccgtctaattctcttctcttatcttccttagcaaaatgttagcatatagctgtctcttgcttcccattctcccttaaatgtaaaaaagttcctcaaccaaaaaattacttcctacatttcatataaatcaagtcaaattatgtctccatacaatcctatatctctgaggagatccttggttctccatggattttaattcagtcaaaatgtgtcacagtccctcagtgcctttatttgtcctgcctctccataaaatctaagctctgccttcccattgaacatttgtctatgaagactttctatatattaatcctattcttcatctttctgaccatacattcctaaaatggctacacatcctgattaatacatttctatgcattatagattacccattttaagaacctcagtgtccaccaatcttcatcacctactggcaatcacctttccacaagcctacattgacatagctatatcatttaccaactactgctcactcctccaagttctgccttgtctacagactaattttcagagtcaaacacccattcttgaggcaaacacgtattaatcaaaaggtcagaacccagtaaattacctggaaactccaatcactgtgaaaaacatgcatgatttttcataaaggtctaattattgctctttttttcaaatgatctgtcacaggctagttctgtgtgccatgctacaatacacttctttctatggcatccacttgagctcagtgaagattcttctattttctcaaatttacattcccctaagatatttggtcagcaaagatgagaaatattaggactctcattaaacattagcactttgccattatctcttaatatttttgtgggcacctattttcattccatcccagaaaaacttctttccctataccattttcccttcacataatttaacaatatctagaatagcacattaatagttgaagatgttctaatgtatgaattattactaaaacaattatttacctatctgatcatataatttattttagaaatcaaaatagacacagagaatagaaaacaaaagaagtaagcattctagaaacacaaaagaattaagaatggaggcagattaaactgtcaaaaagtgtttctttactagaaacactaagcagaatgcttgtcaattctctgacaaatataccactttataagctctggacacctgagaagagaaaatggcaatgactgagggaagttcctccagccaaagctaaatatgacctaagacctgacatatgtcacatacacaatcaacttactgctcaaaaccagtaaacacacatccaatccatcatttctaaggcacttgtacatatttctcaacggttatgtaccttatattctttattccaagactggctttgatgctaatgtttgacttcattctcctgaataaaaatacgtggcactagtacaggactgaggagaggctggggtttctaaactatcaaaaagttagttctgtttaaggataactcagtaaagatttcacaaggcagcattccttagcactacccgaataaaccccacataaacaagctaccaagccacctgaccactcttggcctttgtttcctcatcaataaaattaggataataatgttaactacctcatagtgttgaaaagaaccaatgagttaaaatatgttaagcacttaaatgttgtctggcatgtagcgatattaaagagctaaaaatggtattaataatacctgaatggatgttatttcattgagtaatttagatttatacaaagttgctaaaaagtaatgtaagtgaatagtatatgttttatgctttgttaaattaagaaattatgatatcaacttagagtcttaaatatactgaacttgtagtagtattccaattgaattagtttgaatattataaggttgccattacattttgttggggcttttttcctttttatcccacaggttgacatcatcaacaaatgtaagccaaacaaagcagttactgtaagaaatgctttaaataaacctaaagacattttaaaaaatacatatgcattgataactaggttgtatatataaaaaatgaagcatgttctttctaaattaaaatttagcttggggaggagtgtccgacctttaagaaaaagataaaactcaagaaacaaattgtaggatacttgcccaaccacatataaggacttactgtaaagctgtactaattagtaaaatgtgttactggtatagagatagtccaatcaaccaagaaacagaaaacagagcctataaacaggcccttgcagatacagacccctgacagacaagagctggcacggcaaatcactgaggaaacacaagaacatacagtaaacataactggaaaacatgtttctctatagaaaataatttaaacttttatgtctaaataatatacaaaaatcaactcaagtgaatgatttaagaaaattaaaaagcatgaaccattaaagaaaatctgtatgagaacataaaaattaagatttttatgtttattagaataccctaataaacataggtaaacacgagtttacctataaacaaaccctgtgacacgagtttacctataaacaaacctgcacatgtacccctgaacttaaagttttttttaaaaaaaaaaggaaaatgtgatatacaggccaggcatgctggcttatgcctctaatcccagcactttggaaaaccaaggcagaaggactgcttgaggtaagagtctgagaccagcgtgggcaacacagtaagaccccacctctccaaaaaaattaaaaaattaactgagcatggtggcatgcgcctgtagtcccagctacgcaggaggttgagacaggatgatcccctgagcccaggaggtcaagacaggagtgaaccatgattgtgtcactgcactgcagcctgggcaacagagcaagaccctgcctcaaataaaaaaaaaaaaaagaaaatgtgacatacatacacaatggaatactattctgcattaaaaagaagaaaattctgtcattgtgacatcaatgaacctgaaagacactataccaagtgaaataatccaggcacggaaagacaaatacagcatgttctcactcatgtgggagctaaaacaatgaaactcatagaagcagagagaatggtgactaccaggagatggtgggtggggagatgggagagatgttggtttaaggatataaaatttcagttatacagaatgaataagttcaagagatgtacagtatggtgactatagttaataacaatgtattgtttgcttgaaaattgctaagagaatagattttaagtgttttcatcacaaaaatgtaaggtaattgcatgttaataaacttgatttagccatttcataatgtaaatgtattctaaaataatgttgtacattaatgcacataattgttgtcaattaaaaataagttaaatttttacatgtagaaaataaagctaataatcattttttaaaataatacacacatacatacaaaaagaatgccctaaaagaagtgaaaagacaagctacaagggagaagagatagaattagtatctataatataaagaactcatgcaaacaatagaaaaagaatcatacaaatttttaaaaagaagaaaaataggtataagaaccaccatttcacagaaggaaaagacacatgtaggaaaacacacatatacatgttcacagccttgtttcttgagaagcaagaaagttcacatcaagactactgtaaggtattttttatttactcaggtggcaaaaattaagaagtctgacaataccatatgttaaagagaatatgggtcaacagggatattttatacaatgctggtgggagtgtaaatggctaatatcattttaggaaaacaatttgacaatctcctgcaaagtagaccatttatacatcttatgacacagcgattccaatctcagaatatacctaaaagaatgtcctccaaatgtcaccaagaaacatgtgcaagaatgtttattctagcaccattcacagccacaataaaagggaaacaactcaaatgtccattggtagaagaaaggatagattatactgtggtatagtcacaaatattatatagaagtgaaaaggaacctgtaagttacaattacacacaacatgggtgaatcttaatatcttaatgttgaaaaaaaagcaaattctagcagataaatacagcaggctattaatgagttattgagctacagctaataagttaataattggtattatttgtgaccatctgcaggagtaatattaaaagtttataagtggtaaagctgtattatttatgaaaaaatggaacaataagcacaaagtttaagatagtggttacttctggttaagggaatataggtgtaaggaaatgtgagttttgatgttctaatactttggttaggtcttggactcacaggttatttcttttgatttaaaataacaaacgaatgaatgaatgaaagaaaaaaggagaacacatggaaaaatgactatgaactatgttatgattcaccaattctgtgtgcttaaagtccaattcttttaaatgacaaatgatttagtagtacttctcacactttctgtacatatgaatgacttggagtcttgttaaaatgaatataattattctttaggtctgaagtggagtttgagattctgcattttaagcttgtaggtggtatgaatgctgccagtccaaaaaaatctatgttatctatctagtcatttccaaatatgaggtgctggggaagctaaaaagattgattgagactattcaaggcaacaataaacgtcaagccttgttaatgcaaaagtttaaacaagtaagcatttttattcagacaacttaaatcttagtctttaaaaaaaggaacagttcaggtgtggtagctcacatttgtaatcccagcactttgggaggctaaggcaggcagatcacttgaggttaagagttcaagaacatcctgaccaacatgacgaaaccatgtctgtactaaaaatacacaaattagccaggcacgatggcatacacctataatccatcccagctactggggaggctgaggcacaaaaatcacttgaacctggaaggtggggattgcagtaagctgagatcatgccatgcactccagcctgggcaataaatcaaaactctgtctcaaaaaataagaaaataaaaataaataaattttaaaaaggaaaagaaaaaagcaaaaccacctccattgttttaagactgagcatcagtgattcaagaaattcagagacttgaaggagaaatcaaataaactcaactgaccgctgaataagataacaggtgtcatattttggaatgtttattacaatgctaagaaataattatttgatttctgtctattccaaagagaagcaggtcttgatagaagacaccagaattcagagtttatgttgaaatgaaagacacttctttcctaaattataagaaactgaaataataagaattaagagaagatcgctttggtttcttgaggattaaaataaacagatcgctttaatttcccatttccttggtgttctctacaaaactgcaactagcaattgggacagtgatcactggtggttagaaattttcttgaatagagaaagaaaaaaacaaaattaagagatgactggcaatgacatatgcatccaagaatgcacgcaacatatattaataggtcctactactcgagtaacattagtattattgagaaacagtgaagaaatatatttaaaaatatgtctatctcaattgctattaatttcacatttaataaagataatcaatacacaagtagaaggtgaaaacgggtttgatttattacaatggattcattacgtgaaagatataatatcaaagagaatcagttgaggtagttgtttctactagccttgcctaaagtccatttacagaaatgaaaagcaaagattgcctgcatgtagtgactcacacctgtaatcccaacactttgggaggctgaagcaggtggatcttctgaggtcaggagttcaagatcagcctggccaacatggtgaaagctcgtctctactaaaaacacaaaaattagctgggtgtggcggcacatgcctgtaatcctagctactcgggaggctgaagcatgagaatcgcttgaacccaggaggcggaggttgcagtgaaccaagatgacgccactgcactccatcctgggcaacagtgcaagattctgactcaaaaaaaaaagaaaagaaaagaaaagggaagggaaggggagggcagtggaggggaggggagggcagtggaggggagggaaggggaggggaggggagggaagggatgggaagggagaaagagcaaagactgttgttccttttaagatctacctttggcagggcacggtggctcacgcctgtaatcccagcactttgggaagcccaggcaggcagatcacgaggtcaggagatcgagaccatcctggctaacacagtgaaaccccgtctctactaaaaatacaaaaaattagtctggcgtggtgtcgggcgcctgtagtcccagctatttgggaggctgaggcaggagaatggcgtgaacccgggaggcagagcttgcagtgagccgagattgcaccactgcactccagcctgggcgacaaagcgagactccgtctcaaaaaaaaaaagatctctcttttcagctttcttataacatcatgtctactactggaagaatagagaatctgaagaagattaaactagttaaacatattttttaagaatatttatgaaaaaagtaaaagtcaaatgattagggaaagaaaattttaaaatggagacatactttggaaaaagagtccggtataatatatttagacttagacacattcatccattcaattttctccaaaccagaatctaggtatctttaatagtaccatacggtacagactatagtgtattaagatgatacttacgtttcttattataaaagaacgtctaagtttttagacttttatagtggtgttatcaaccaactaatgtaggtatttcctaatactctcacaaccaaaaaaatggccaatggcaaattaggtgtctggtaactgaaagatcataaagattttactatttcaaagcatttatgctagagtcacttttaagtacagctataaattacaaggagataatttccaatgaaatataaaacagattacaaagctgtatttagctgtctgtggccatttaataagtcaaaacataatgcagcattatcattacgtcaagatgtgacaaaggcccagacttcccacaaaatattcctgtctctatactagaataagacatcatcagaagtacctgaataaaatctcccctcaatgaccagaaaaataaacgaagaaattttagagacctatcttagactttcagcgattaaatgtactcacaccttccatgcattccactcttctatctgttggaggtttatatagcttcatcagtaatatgttctattgctgacatatcaaaaggcttaatatcacacacacagcttcaaatatatatataaatgtccattaagtgtaaaaaatgccttcagattttcattatcatcactgtatccacatcatgctttttcaagcacttcaacattattttacttgactctcacaaagattgtgtaactgaggaaaatatctctattttaaagataaagatcctgagatacaaaagtcaagtgatttgcctataatcatattctatgctgacttctagggtttttttcatctaatatctttaaattctttcatttctgcattctgttactttgttgaaatcattattgtacctgtaatctattaggtcaaatcagcaaatatttatcaatcaacttctatgtgcaaggactcaattaatgtgtaattggcataattaacttatttgtgacatcaacagggataatattaaaattatttaacaactgacacaaaaggtaccaactaaagaaactgaacactgaacaaagtgaaacatacgctctaagttttatcaagggatatcaactgcatgtcagctctgatgtgggcatgaccaatagagtctgatttaatcacaaactacaaatcatttgtagatgtttatttggcctgaaatgctagaagaacatctgaagatttaagagaacatgtagaaaattctggtagcacgtggtccaaaattaacttaaagaaaatgcaaatataaaggaaaaaaacaatctgcttgggtgccaagattcagaaatatgaactcattactaccaaaactagccataatattttaaattattttaatttctttttttgtttgttttttgagatggagtttcgctcttgttgcccaggctggagtgcaatggcaccatctcggctcaccacaacctgcacctcccaggttcaagtgattctactgcctcagcctcccaagtagctgggattacaggcatgcaccaccatgcccagataattttgaatttttagtagagacagggtttctccatgttgctcaggctggtcttgaactcccgacctcaggtgatccagctgcctcggcctcccaaagttctgggattacaggagtgagacaccgtgcccggccaattatttttatttatgcatttatattcaaatatacctaattttaataaaatacataagtggggttttgaacatgtttttagcacaacttttcttttcctttatttcttgggtatctgctcctctcctttcatatttcctctcataaatagttatccatttttataacttagtatgcatcctgctacattcttcttcctttaaaaataaccctactataaggtagatatatacatatgcagatattacttataaatatacatattcaaggatctttgtaattattttttaaaggctgaatattatacacacttttctataccttgctcttctcactcataagaaactcctggaaattctttcagaagatctgagatagctttatttcacatcatttaatgacagcataatagcccatggttgagtttccattatttactagcattaccttgttaatgggattactattttctgcagttttaccactacaataaagttacaacaacctggaaaccaaaaaatacacatgttcttaaatattgctacctatatttctatggaatatattcccaaaaatgagactgccaggttaaagtatttgcaaatcatatgcaaattataattttaataggtttttggtagtcttacaagactgcattttataacaggtagaatatatcacatttccaccagtaacaaatactgttaaggtgcaaaatgggaatatactttcatttttttacatggagatcatcagttatgccagtcccattaatttaaaaaatccatcattttccaactaagttgtcatctttttcagaatttgccaatcatttccactgatctattatgtatgcctaggccatgaccatgttgtttagatgagctgactttgtaatatgttctggtatgtgtaatacaagtccctcctcattgctttttcatatttgcttgcctttcgttaccatttaatcttccaagtagttttaaaataacactgttgacttcaaaaaagaaaaaaaaatctcccaagattctaattggaattgcattatataatttattaactttgaaataatatttttattgttttcccatcctaaaccagtttgtccttctcttaatcagatcctgttttatgcattttaatatctttgttttcatatagttcctgtacctttcttgaaaaacttattaataggcattttgtaatttgtgtttctatggaaaatggaataatattttcccattgggaaaaaaagtctcatagatgcccaaattcctccagagcagagttgttttcatcttatcttttatccaactaccttatcaatttttcttactcatttttctagattttaaaattcaagtttctataatttttagaccatatatcatcagcaagagacacctgacattcttctctacaaatgttaatgttatatcatttaccaactgtatatgataaagcctctaaaataatgttaaataattgtgatggttccttgtttagtttctgttgttaattaaaatgtttttaggatttaacaatttaggccatgtgcagtggctcacgcctgtaatcccagcactttgggtggaggctgaggtggcaggatcacttgaacccaggaggttgaggctgcagtgatccctgatcatgccactgcactccagcctgggtgacaaagtgagatcctgtctcaaaataaaagacaaaaaaaaacccccaaaatttagaataccttttgccatttattgagataaacatgatttttctcctttaatttgatgatgtaataaattaaattggtatatttcctattattgaatcatgcttacattcccacttaaaaatatattttaaaatagctactagtgagttattattttgattcactgttaatattttctaacattttccttagaattttttaatatacttcgtaagtgaaattatacattttttactatataatctttaacagaattagatattaaattatggaatattttgatatttttccatggcctagaatgatttaaattacatcaaaattatgtattccttacgtttaagtgacaacatctggtcaaatttctaatcttttctatgctaagtagcatctgctttctacttcttcttaggtcaatttttatcatttgtatttgactaaaagtccttttatttctcaagggttttaaatttgtcacacagctacattcttatttaacattcttttcatcttccagttttttcttctttttcatttctaattgtgtacttttgtcattctttttcctaaagctttattagtgaattaaaattcatataacataaactcaccattttaactgtattaaagtatataattcagtgacattcgcaaggttgtataaatatcaccaactacctccagaacattctcatcactccaaaaggaaaccctatacccattaagcagtcactccccatttttccttctcccagcccctggcaaccactaatctcctttctgtttccacctatatgcctactctggacacttcatataaatgaaatcacacagtatgtagccttttgagtgtggcctctttcactgagtatgttttcaaggttcatccatgttatagtatgtatcagtacttcattattttttatggctattatattgtatagatatatcatagatgaataatttttattccttcattcagcagttgatggatatgagttgcttccactttttggctactatgaataatgctgccatgaatatttgagtataaattttatgtgaacatatgctatcacttctcttgagtatatacctcagagtggaattgacaggctcattttcttttttgctttatcatcttcacaaggagtttatgtatcacattgatctttccaaagaaccagcctttagatttatttcgggttttactatatggtttttctatttcattactttcatctttctaacaatctcctcatcttctatcttgtattattctttatactaacttcttaacattaggttatctttatcttccctcttccttaataacaaaggcctttaaggccatcaattttcctctgacaactattttagctaattttcattggcttttacaaaaaatatttccttttcattgctttctaggtgatttcctcttcatccaaaagatatctgggaatgttttaatttctatgtagatttttttaaccttttagaaaaactgttaaaatttgatatatgttagcttacagtcagagaaagtgcctgcaaaatctctgctctctaaaactcagttttcttagcagccaagtgcagagatgctcaaaaatatttaaagaatgtcccactgtaattcctattattcacgttttgatttctagatctatcctccaaatctcatcttttttttttcaatatttcatcatgggtttttttatatgcttggatacatttcttgcatttggtcttttcattcactaattcatatttcgacagtgactatgctctcccacaaatcctgagttgttcaaatgagatatatttaatatctgaaattattttctgttctttgaatttccttaagtgctcccaatttttgttttcaaattcagttttcatgttttcgccagtagtcctagttacctggagtgtgtactctgattttcctctctcacttgctatgggtctccttaaatgaattgctatttttcgctaactcactggagctcaggtctggttgccagattatcctaaatggcagaaatatcacaggtggtgaaaagcaaaggtaaacagcctgtcagttccctgcaaaggcacatggacaaagagctctgttgtcctatctctatttctttttagcctccaaagacagagaggactccaccaggacattcagctactttagctttttagcagctagcgacacttcggtacttaaaatggataaatattgatctcctcctacaggagttcacaaacctctaaagcccaagctcttcgtcccaatgtctattgctttctcatatttacccatggactccagcaccattctccagttgcttgcccaacagaaggcagaagtttcaaagcagtgtttctctgcccaaggtgtcatgacagttgtttataggtcacagcagccatttgcttcagaaagccaggcagcttggaattggaagtgaagaagataaccatatatagctactttgttttcaaagtctttaattttaaaaaagcctggggtggagtggggtatgtgggtgtgaggtatgtctggacttcattatacttattcctaagaatcaatagtttcctcagaaagcatattcctgaatatataaaatgacaatatgttcttctgcatgctctttagattgaaatcgtgaaatacactccagctattaatcactttaagtaagctttaatgcaatcccagttttaattattccaggacttaattatcttttgttttgaaaacaacttcaaatcaatttgctgtagtttcagttagaaagacaaattatgactttagccaatcaagtctgccaatgtctaacaagttttataaatatgaaaaagtatgtcagctatttatataggaattacatgtgtcccacatgtggtttacacgatgttaccctctatattgttcacaacccaactaccttttttgctttctagaagagctaagtaattatattatattatcactaatattacagtgtttaactggataagacttctaaaaactcagataattaggtaaaataattaaacctattttttaattgtgtgaaattttatgaacattccttaagaattagaaagctcatataaaaagttcaaaatctcaattgcaatctatgaattacaaagcatagtgtgctttgtttgtccctctatccagataggaatcatataggatatgaaatatgggtttcatccttaaatcagcagataatataattctgtgtactctattcaacacaatatcctgaattgattgtagtagatttgctttaccactgatgggagatacctgacacatttcttttctgaatcatggtaaatgtaattttattggaatttttgccatgatagaatttcattaagtacctaaaaggatagaaaactgtgagcatgtacaaacacgttgggtcttggaaaagtacagggaaagtctataataggtaataattttaacaatgctaaatttgaactccaataagtaaacggatagcctagtaaggaaaaataattttcccaggataagtacaaaaaagcctgatcaacattgaattcctcctgtgtgccagatattaggctaaggactaaagctataaagataaataaagcatggtacctgttgttaaggaactgcagttaagtgtactataattctaaatgttacctttcctaagtgatgaatgtcaaagaatttaagttataagttaaactgcatataaaacatcacactgaatcaaactcactttacaccagatgcacccatttgtgcattataaaactcatcattacacatataagacagaaacagagtaatgcataccccaaatgacagaaacaaccatttatttttggctcttatacactttggtaattcgcttaacaacaaatgttgagactgtaatgtagaatatttgaatcagaagaacctagaattttgttcatttttcccatactgcttttcagctcaaatgacccctttaacacagtattgccttgctctcaatccctttctaaaacaagaaagattattaaaaacatgagtgttcaaaggtatttctctgagggtcagatgtataaaggacagtgagatacaaacaacatagctgttaagaacactaggtcccacaggctatcaaaattacaagaacaacagagtaccaccgatgatgaacttgaggagaaaggtgccatgcactaactgaatgttgataatttttctaactttaaaatacatttttcagtgatgtatccatttgaattatataaaatgattattatactatacttcttaatgcattaaaaataagagaataaagaaaatatcagatattctcataaggaacagtaaagacacataagggatggtatagcaatttcattattctttgactgcattcagatgatacagcttatatttgtaatatagcttaacagtaaacattatcttttgaaaactttttaagtttttagtaccttgtatacaaagggtatatgagtatgtatgtatacatgacagaagtacttggttggaggtcatttaaattatctgcaataaaaattcactttaaaggttactataattccttttaattcatgcatgctgactatactaaatataatccaaagtcatgtacactgactttacctgaactgatttgagactactactctgatagaaatgcatttacactatcagataaaattaaatctttctttcagtatagtgacaaatcaaggaaaagttaaagtacataataaaagtctagactgtattccactcaaagcatagtagaggctgttttaaaattccatgaatatgggaaggaggagacaaaagctaaattccataataaataaaacaaaattaaggtatataatattttacccctcatatccatcacatcctcaagaaagttaacagatgttttcctgtttttgaaaattggacagcaaacaacaatgtagattataaatgttcctagaacagtgatttccaaattgggtggcacacagtaggcattcaataaatggcttaccacacagattgtgctacattgcatatctttgtcatgcacttaaacttactgcctaactctaggttaggactgatgatcatgtttttgtgccaaaagcatagcagtctttgttttcgaaactctcagtgacccatatttaagccagctattggtttctgaaacaaatgttaagggcacaaagaacaaacaaacacaaaagccttccaaagtcataggatttgctaccctttgaatatactgtttctagtctccctcacccctatttctgcatgatacctggttcttggttattcagtcgggtttgatttagttttcctttttgacctctaccttcccagaactttcagtaatacttcctttgtcctgctcctacccatgatttccaaggcctgctttaacatggtacccagctccactgttgcaaatagaactaaatcaggcagcagttagagtctattcattgtacaacctttagacaaattctctatcatcatttttaattctagactgaagagttatattttaaaaagattctatcacagcaaccattgttcctacttacaactctttcaccttgtacccttctctagaaccttctccaaatctatgcctttctgaaataaaattgccattattaatctgggcaagcactgagttaaaatcgtcccagaatagtggtctgatggggtggtgattaagagcttaggttctccagagctgtacttgagtttaatttcccatgtgttttatacttagctgtgtgactttgaacaagatacttaccctttctgagccttcgcatatctttaaaattgggataataaaggtacctgtctcacgggattgtggaattaactgaaaaaatgcagatataaccaatgactgcaacaaagtaagatctcagtaaatgttggctactattggtgttggtggtgtgattagtattcctgtttaatacaaggatagaatgcatttacttttcactgtgcttcccactaataattttgctagtctttttggtactcatggctttagaagagttacagtgattcttcaatatgtatactgggtttcagttaacactaaaaccagcttcccttaagcacatttagaatatcttttccattatttgcatgcattgaagcattcataccaccttttgggtccaacaattgatctaaaattattcttacaatttctcctgattagctagatgtttggtaagctaaaatagcttaccatcatctaacagacagtatattttggctacgaggtgatttataaaatattatatgatcagtaccaggaacatctggagctgtgggtggatgtgaggaaatgagaggattcaggatagtatagcttcctgcagattgctgtttccatctaaggtaatgttagatagctttaagcctttcactaccattcatactagcaaaaaggatgagtcaattaaacagaaactgagagtaaaattttaaattagaactttgaggttatcattaaagatatatcaagtaggtatatagaaattgtatatagttgtttctttcaatatataacaggacaatatttgcaaagtcttttctaacagattctttcctagtcagatttctttgcctaccttatcttccttcctatgtaaatctatctgtgcatggatataatataagatcaaaaactaaatgcagtagttaaaaattaccaattttataagatctgcatggaggtggttcctgattactcaatgtatacctatgttttgcttagagaagagaatcacaaaaccaaatttatcttttatctttgaataaatgtatctatctatagattttatagaaatagaaaaatgtgagttgattcattctgttgttacctgcatcctcaattttaacaactttatgctgcatgaaatgcagagtcaagtttacaaattctattagcaatacaccttcctgagttaagatgagttggcaaagtatttatgtaaactaatagatttattatacttacccactatgaaagattataagtacttaatatcatatatctatactttactagtgtgctatgttagaaagcatgtatcattaaaattaaacttttataaaagactaaaagtggaaagcaaagtcaagtattttacatatactgtttctaggtgtcctaagcatcagtttcagtaacactaccagaagctaaaataacaattcaattgttgaaggaaacaaactcagatgattagaactgaaaatgaccctaaaaatgaaaaatctaaggtgctaaggtggagatccgcatagattatgcaacatgccatagatcatgtaactaattaatggccgcagtagaactagaacaacctctactaacttcacatctgagatttttgacaatgtataacaaagagttgaatttaatatatgagagattgaaaaggtagatattgtccccaagttaaaaatctttggatgtaattacttctacttacttaattttatattcctaagacgacacatttaaaatagcataaaactgtaaaaactcgttagaagtaatgaaaactacaaacaaaatttatgctttatcttaaatcaaaaccatggaaaaggccattttcttttgtctaaaggaagcctgagatttactgaaaatgtgtgtgagtgcgagagagtgtgtatgtgtgtgtggtggtggtaggggtctttgttttgttttgttttgtaaattgttagagattgttctattaatagtttccttttgtaatggtaatctgtgctccaaaatgagggcacactaaaatgaatttctgataatttataaagcagtgaaatacaaatacatttctagaaacttactaatgacagtaagaaaatgggtaccaagagtttcaaaattaaaaatcaaaatctttttaatattatgttgaattagaacatctttttaaaagccaaaagtaattgaaaagagattaaattggtacactcaactctctaaactgtgtgtatatttttcttaaagtgcatatctgtgagctgacagtaaagacaggctggctgctttgtttgactatagttctgtttacctcatactgtcaagaatggattttgacacagtattaatattgctatttttattgatataattagcactgctataaataatttcttgtgctgccatatgtaagtatatcattacaatcagcagtatttagtgcttttcttatatgacaccttgaaaacagactgttggcccaaagaacaaaagtgacctcatgatatgggaatcactgaaaaaaacattgccctgtcaatagagactactgttttgtgtatgacttcactaaacaaactagtttatatttgtttgaaactaaagtttctcaccaatctgctgtttcaatttcacatcacaccatattgtacctaaaacaggcaatctggattcctgttgctactttttcttcccccaaacagctcaggaatgggtttgaaatacaaggcttgaatacataaagcaaaataattaagacacccaaaattcagaatgggtgggtgaaaacaagtacacttgaaaccatttgtgtaactactagtgggtggcccactgtgagtttttgattatatgaaagcaaaatcaaaacatattttatcttgcctctagatcacatcagctgtgacaataacctcatctggaccttgaatagtttgttcataaaacaaagtagggtgactgacccagtgcatattcaacacagagtatgaaggccaaaagaaaatgacaataccattcaaaacaagtttgtggaaattttagactagtatattaaaacctttctttgtctctatcacttgacagatggttagccttcacacagcctagtatctctggcaaagaaatgactgtgtctagccaataacaccccaaattttgacttaaaatgcactgtacacatgcttagacttaccttacaaatatgaatattaataaacttagtcatgcttactttattactataaaaacttgatagatgtcaagatttcatcttctgccgttaaaaataccttcttgaaactcaactatcttaggtggatataaggttccatgaactctgcacttcagatttcattcatttcacaggttggctggtaatcatgcttaaaaaaatacttccaaaataacacttcatcccaaaaatataaaatttatagaaatttaattagcttgtgtttctatgctatccataggaaagttttggtaacaaagtggcttaaacaaaatcaccagggaaccctgaatacactccatgtcaaggaccacaggcaggactggaattatttatccagtattgatatgtctttattcaaaaactgctcatttataaatatatactcacacacacatgcaaacacacatcgatcaaccatccttaccagaaaacaggaaatggtcttactttttaacattcaattagccattcttccattttgctctttaaaaaaaattcaactgaggctgggcacggtggctcacacctgtaatcctagctctttgggaggccaaggcaggcagatcacgaggtcaggagatcaagaccatcgtggccaacatggtgaaaccctgtctctactaaaaataacaaaaaaattagtaggacgtggctgtgcgcgcctgtagtcccagctactcaggagactgaggcaggagaattgcttgaatctgggaggggaggctgcagcgggccaagattgtgccactacactccagcctggcgacagagcaagactccatcaaaaaaaaaaaaaaaaaattcaactgaaacaatgtattccattagttataaagtctgtttcctcctaaatcttcctatttatagttttcagatgctggcaagtccgtatacaaatagccagaggcaatcacaaactgctctaaagtgcattaatatgtacccttcctggaagaggctgattatgttccaaattagcataaatagagatctaatgtaggtataagcgtgacaaaccctccacggcacaggatgggagggctggaggagggaggattgtattaaaaaaagttattccacttaagaactaaacttgtatttggctaacaaagtaagactcaccatgacagatgggaaaaaaaattaaaaaggaaaaactgttatttgagaactatgaactaggttttggaaaggtgagacacccactacttgaagtcacaatctcagcattaaatcatatactcatttaaccaggtaccaactttccttctattagaaacccaggatttttacacctacagactaaatgattaaagtattgctaaaatcttctgtaatgttcctcttgcattacaaataagtctattaaagcagaaaagtgccaatcaaatgcttttgaaaaaatggtttaaataacaaagcattttttgcaggtctctcctctttaatgtcgcctataaactaattacaataaattttcaccttctcttgataaaatcacaactgaaactaggcatggtggcatgcaccttagtcccagctactaggaggctgaggcaggagggcggatcacttgagcccaggagttaaagtacagcctgggcaataaaaggagattcccatctcaaaaaacgaaaaagaaacccagaactgaaaaagatttaggtacttgatttttcagatatgttcctaaaaacaaatcccaaccaaaaattaacagatattctagcttttgttttaccatactttgctaacgggataatactatgtaggaattttatagtaactttcaagacacaagatttttttaatataaagcaacgttttattaatttcaaagacattattaaaatcatgaaaaaaatccctatctgttaaaattaccaactgaaatatatggagaaagtttcatgacaataacaaaaggtacaaataagaaataaactaagatctttctttcctatcactgccaactggtaaacaccttcctccttctcaaacttctgtaggctctttcaaactgtagttcctaagacaagaaagcagctaggttttaaagtttcattaaaaaatctcctcccctaacaatctaaaatgcacaaagtgtgtgtgacattagaatgtaagctccacaagggcaggcaattttctctcttgttcattattacactccaagtgtctagaacaatatgataaatttaaccatccatttcagaaaaatatgattatttcagagactaaagcaaagcccatcaatctctacttccgtattccaaatgtttttgaagaagtctctgcttgccactgattctgtgaagttattcaaaataatatgtaattattttataaattatagatcgcaggaacttagctgtagcttttattgcccttctaaaacaacctaattattcagactggcctttttttctagaaagtccaatttacctaattattcagactagcctttttactagaaagtccaatttgtctaaaaagtcttctgaaaactttcactaatgcaacaaaaatgattcgcttaaaatattttttccttagattttcttcctataccaagtagtcaaattcttattaacaggacaacaagaggaattagatgtttgcgggcctcaaaaactttctgatccaattatagaagaaactggcatcacatcaactggtagttctaaacacccccttccccaattatagccctcacatgaaagtttctctttcctctagtattccatttaatctcgtattttcttttagtagctagtcaatgtacacatgacctatatgtgcattttcttggttttgtagtaatcttaaaacacgggcctagatgggtaagcataaagacttcttcctggaaatggataaaatttgacaatttttaacctgatactttctttagcttgttaaaattaggacctcaccgtgaaagggcatattgctgtggaggctggtaggcagcaaacttgtcacctgatcttcatatgcacaaggcctgtattccactggtctataaaatctgaaatcataaaaccaaaaatatccaattgcccaactcactgagcagctaatatagttctagaaatctcacttttcttcttctcacctgtttacttcaacaccatgtgtccccaaacctaaggccctccaaaattgagctccataaaaatcaaaaccccaatcttgaaaattaagccttgagtactgaacagttacatcagcaattcctcaagggcaatttcaaaagctttcctgggagactactggaaagatggcacagggatatcaccatgcactatgtgtgcaacaactttgatatattctaagaatcacaaagaacaaaggcatgaaaatcaatgtaattttttttctttcactagaaaaatacagattcttcattttaaagcaaaaaagcaaaaagtagccacatcttgactggacaaacttacagttgaccctcagtatccatgggagattggttctgggacctctctaggaaaccaaaatccacagatgctcaagtcccttacataaaatagtgtagtatttgcatttaacctaatcacattctcccacatactttaaatcatctctaggttacttataacacctaatacaagtaaatgccatgtattaataaatcgttgttacactgtattgtttagggaattgtggcaagaaaaaaactatatatattctattccatctattcccccacacccaaaatatttttgatctgcagctggttaaatccacagatgcagaacccaggcacaggaagggctgactgtatgtgaccgggagtggagggggatctatataaatatttccacaaaatagcaaagggtacttgggattgggagcatgaacagaaatgaaaacaaaccattataaatttaaagatgactggttatcacttaaatttagtgtctacagctatttatttataaaatggtaattgtgttttaaaactttcaatggcaacaagttacaacagtaacttcagaatagcgttcacttgaaaacattgggtgaatggcctctataatttttttagctgaaatgtatacaccgccacgcagtgaggaaacttgactttagcacccttttggtatttttaatagaaaaaacagtggagaagattttcacatgtctagaaaggtaacatgttcaacttaggtttggccaatgctgattctgaggacagtactacacccgcaagcttccaaactacttcctgattcattcagattttcattggagagctgtcatcctgctactgacctcattcaacccagttcggagtgagagatcagcggattaccgcgctaggtaccgtagctgtacgccatattgtgtttttcgctaatgtttagtttgtgtgtgtgcctagcatatgtttgtgcaagtgtgtttatcaatagaacttttagaaaatccctgcctcctgcctcttcagcatccttaaaaaggataacagctgggggcggggggtggggggaggacccaaaagccacacagacaggaatacattaaacagtgtacgagagacggcatttgttttaaactttcaagaaccttccaaccatttttatatcaggaatcaaaaagtgttaacatgttttaatgtttccgaagtggcccaaagaagagaaagaaggaaaggtgtgtcttcccttcccaagccccctcctctctagtcgtagaagcgaagcaggcgggggccgggagctccggcgtctggagagacatccagcggctgtggggccaggacacctcctgccccccagttctctgaagacgctccagagaccgcgagagccacggcaagcgggggagggcgaggagggagggggcagaagacaagcgggcgcctctagcagctcctgagccccggctagtccccctcagctcctcttcttggaagcagcggctccaggcgcagggagtagagagaagaaggcagaagacacgtttccagctgcgggacgtcccgcccgccccgccacccttcgaccctcccgcgcctccctcccacctccccgccgggtcgggcgaggcagccgccgggcgctaagaagggcgccgggggagggggcgcgggcggggcggggcggggcggggcgcgggggcgcgcgcgctcatccagctcagggcccgctggctcgccgctctgtaactcgctcccccaaccccaccccgctcccctccttcccagtcccgccgccccccactccaggcgcctcgcagacgcctcatccccctcggcacgcacacactcctccctctctcccgcccgtcccacaacaaattagagtttgtggcattacctcctcgcgctctttaatcttctttcctcaactcctaaacttccccccgcccctacttcttcggcagaaggcccacattggacgcttcactccgcgaaccctctatctctccccgctataggatagctctcacgccaatcttggcttcagtgagccaatgagaatgggacgcccctcgtgaggttgccgcccataaacaaaatgcactcttccttctcccctccgcccccccgtccccgcccctttcttcctcttccctcatctctgtcaccttcgattgggctaaaagaggcccaatccgctatctcaaacatccattgggacgcggaaacttcgctcagagaagtattaacaggcgattggtggacaatccttccacttcgcccacccccacaaccccctccccccgccgcaccttcaccctttctgaaaaggtcaatcgtatctcgttgttcagtgatccgggaggtggaaggctattggttcagggagcccgtcagaccggactggagtgagccatgattggtcgacacaggcgcaatcaggttaggttgcttactcctccgctcctccctccttttcctccacgccccatctcccccaccccctactgcttttactttctacgcatttctatttcctcctttatttatttatttgtgataaacttaaatgacccggcgacggaggcggtactctaggagaaggctgaggatgacgagcggcggcctggggccaattgccgagagggctgcggggtgaggggcagcggcggtggccagtgagaggcaggtgtctggagcgcgctgggcctgtggagccgggatgccccagcggaggcggcggttacccgctgtctggcgcggcgagctgcgccgggggagccgcgggagcggagaggggggtgtcgctgtcttggacagctgaggcagcgggatggaggctggatcccgggcggtgggtgggaaagccggagggagggtctggctggcggcagcgcgcaaggccgcaccgggtcacgcttgattcccgcggaatggggcgcaggttgccagaccgggtccccagtgctagggctcaaggaagaatttgttcatgcagaagatttagaaaaatactatgtaaaagagtttggagtaagcctcccttaatataaatgagatttattatcctgccggaaaaagcagattatgtttcttattactgaacgcctgaagtaccaacgactcaaccagagcccacagaattcaatatcctgggtggtaaaaggaacaaataaagcaacacggaaaattaagtgtggttcaaatgcttcaataaaatcttcgtcctcaaccatttgtcattcaacatagcactccccagagccaaattcttaccaaatattggtccagtactcaggcattggagaaaaaaatgaggctgaagtccagcaggaagcccaggatagattcctaaaaaggatttcttacaagggccaagatgggagggttggggaaatcgcttttcactatacaaagaaaaaaaaataattactgccaaactaagttgcacttttttag

SEQ ID NO: 679 - DNA, 40382 bp, Homo sapiens
  source 1..40382: mol_type = genomic DNA
tttagccccttccagggaaagccaagggagccccacttagtcctcaggtggctgcagcaagcaaaccctcaggtagaggctgggggaccagcacctgctccgacgccatggccttttctagctatgaagcacatgcatcttggcctctgacttctttcagtcaatgttttgttctgaacatactctcggcactgagaatgttctcttgcttgtgttttgggtaactccatggggggctagattcctgggcatgtgacctgtgccatcgcacagggccctacgcttcgaaggaacccatgtttggtttcatgctctgccgacatcttgaaattgttacacattttgaacagggaaccttgcagtttgattttgcatagagtcccacagattatgccgctggtcccggctctgtgcaatccctcctggtgggatctgtgattccaaggaattgctccagttcccagaaccccactcccgatcactcctagcttgtatcttctttaccttaatgcctccctccccccatccctgacttctacggtattctccccaccccaccccatagatggactttttccccggaagcccacagcctctgtggcctcatctgagctgtgtccatgccagccgcagctggggcatggctcctcagctgagctcaatgtcaaaccaaagctggatccattttatttggaagaatgccaattagagtggcttgtcttgcttctactcctcaacccctgacattctacagttctaccccaaacccccttccagaggcctctgggaaggctgcctcagggcaaacccaagatggcaacagcctctggtttgatcagtcgaggagagctctgctgcatgtttgaacaagaagagcagcttctatgagatggcttcatagttctataatgaggattttagaagtctaggaaatgggcaagcagcctgtgtccttgggaactgcctgctgcacatccagcaaagggaggtccttgccatggcctcactgcttctcctggaaaaggtggatttgagcccctcacatccccccaggtggaacaacacagaactgcggctgctgagactggccacaacctcagtcttcttcacgcctacttttttttgttttttgagacagagtctcactctgtcgctcaggctggagtgcagagcgcagtggcacagtctcagctcactacaacctctgcctcctgggttcaaggtgattctcctgcctcagcctcccgagcaactgggattacaggtgtgccccaccacggacccagctaatttttgtatttttagtagagacagggtctcaccaggttgaccaggctggtctcgaactcctgaactcatgaagcccaccaaagtgctgggattacagacatgagccatcgtgcccagtctaaacccacaatttttaacagaacagaccaatctaggggaaagccagtaggagaaactaatagacaatttgacaataaagaatccaggtgtggtaaaaaatgatttatttttgaagcatggttaacagctatgcaactaggaacatttcatttacctgtcccatctatgtttttctgtcacaaagacatatactaagactttggaaaaattccaaaggggattacacttgaaatgtgctgtgttttcacttttttttttgtacttgtcttattcacagtgaatcaaataaaacagctttacagcttactaaaactcaaacttgttctcaaaggaagcagtttaaacattttcaactgaaaaatcagcaacacaatgattctacatcaggaaatcgaaccagggagacaaaaagcagctctaatagaaagcgtgtcttgtcaaaaggttaaaaataaaaataaaggcccggggccaggcgcggtggctcacgcctataatcccagcactttgggaggctgaggcggggatcacaaggtcaggagatcgagaccatcctggctaacacggtgaaaccccatctctactaaaaatacaaaaagttagccagatgtggtggcgggcgcctgtagtcccagctacttgggaggctgaggcaggagaatggcatgaacctgggaggcagtggagcatgtagtgagccaagattgcgccactgcactccagcctgggtgacagagcgagactccgtttcaaaaataataataataaaaattaaaataaaaaaaataaaggcccgttgaggtggctcatgcctgtaatcccaacgctttgggtctttacaaaaaatagaaaaaattagctggacgtggtggcacaactgtagtcccagctactcaggaggctgaggcacaaggattgcttgagcctgggaagtcaaagctgcagtgagccctgattgcactactgcactccagcctgggtgacagatgacagagcggaaccctgccccctcctcccccaccaaaaaaacccacacatattatgaggaaaatccaacttatttacaaagaatgggtcatcttcaggcctgagatcccaatatgttatggtaaaattgtgggtgcaccgtcctctttggaaaaagggggtaaggaacagatctggctcaatccatgctaagaatctggttttaaaagatcaaagaagtttcagagaaaaacctaacatcactgtatgccccaggggtgtcatttaccatgaatgaaagggctgggaacgcactctccctgaggtgccccccaggcctgccaacatctcatgaaatctggtagtaaactggcaagagttccctctgcaccagcaggctgcaggaagtttgtggggctgggggctggtcttctctggtcttcccctgggaagtgcctcccgctttccccaaactgccaagctaccaagccctctagtgaacaaatgagccatagtctggagggctggcatggtaaccagaatgggtggatgctgccaggagaggccagggcccctgaggattcgggggtcggcactctggcagcaccatctcacttcttagccattgcaaatgagtaggccctttctcctcaaacccagagcagtagctggctagaagaaacggcaccaggaaggtggcaataaactctgactgagctcatgtcagttttctcctaacccacctgtagatttgagagcaaaagtcctgactcatccagccccagtgtaactgtgaagtgcggctgtcatgtttacagtcccagttactcaggaggctgaggcagggggatcacttgaatccaggagtttgaggctgcagtgagctatgatcacactactatactccagacagagtgacagagtgagactctgtcttttttttttttttaagacggagtctcgctctgctgcccaggctggagtgcagtggcatgatctcaactcactgcaacctccgcctcccaggttcaagtgattctcctgcctcagcctcctgagtagctgggactacaggtgtatgccaccatgcctggctaaatttttgtatttttagtagagacagggtttcaccatgttggccaggctggtctcgaactcctgacctcaagtgatctgcctgcctcagccttccaaagtgctgggattacaggcatgagccaccatgccgggccgagactctgtctgtttaaaaaaagaagaagaagaagaagtaaaagaaggcagctcagctggtacagtagaaagcctattctggaaactgccatgatggatggctaataaaatattggagatacttaacccttagccaaacagtatgtgtctgtgtggtgtgtgtgagtatgtacatgtatgatagactgtgtgtgtgtgtgtgtgtgtgtgtgtgtgtttgtgtggtgggggtatgtgtgtgaaggccccagaaggtggccctgggacaaagcgctcctaccacttgtccccagcataggacagccacacaattcagagcacaggagagcccacacctggaggctgggctgcccttgcgggtggggttagcaatagctaacatgaaaacttccagatagcaaacctcccctggccacctgactacatatttcaaacattacctgaagcaatgaaattcaagagcattcatagtcttttttaaacttctgactacgacccacattgaggttagttacatggctgccaagggggtggggacacaggataggtaacaagagttcagactcagcctgatggcacagggtgcgctttgccctgtcccagtccactgtgtttgtggtggtgacccactaaattgattttgtgacccacttgtgggttctactgcagcttggacccgcagtctccgtgcacatggaaaatcattccctccacggaagtgggtggacctccccgcagcaggccccggcctcagtgaggatcaccaagtgccaccaggcccccacaaccccgctcaggaggaggaagcaggcttccctgaccatctttaaagaaaagggggcaccatgatgggcccactcaggtccaggctggcaaccacaggtccacccgtccaagacgcaaggcgaggctgggccattccctgcaagtgcgtgttggtcccttagggcttgcccaggggcgcccccgcgctctggcatctctgtaccaggaggatgagcctggcgaggtctgagagctccgggaacgcggccatcacgcggtccacctggtcacgcgggaagacgctgtagagcgcgatgcgagcccgggcgcgcgcgtccccctcgtcgtcctcggtcgcgtacactgaaagtcccccagtggcgccgtcgccccaggccggctccgcccagacggagcgcccagggaagcggtcggagcggggtggacgggcccacgggtcgtcgggtggcctgcgcggggaaagcaagtcgccgtgcaggtccctagggcggtgttcgccccgcggctggagctgcaggccgggcggaggcgggaggtcgcccggggagaactggctctccgggctagggaggctgagcgggcctggcacccggccgcccgcggacacccagtcgggcccgcccagtcggggcgtgaggctgcaggcggggaccgggagaggcggccccaggggccccaggtcgtcgctgaaggccagccgagagaagctccctcgcagggcggccaggtccggggacccccgcgccggcgggaggctgtgcgcaaatggttcccggggggccgcccgggctcctgcggagccgcccggggctctcggtggccgctgctcctcggcgcccgcgccaggccgggcccctgtcttggcgcggagctcgtcggccaccgccagttgcgcgtggtgcggcctctccgggtggtagaacttgcacttgatgccataggtgcatttcttgcctgaaaggggcgggggcagagagggcgcgacgtgaggcccgggggcgcggaggggcggtggttcctggtgcatccggggagtgccggcccgcggcctctccgtggagattcctccaagcaggcccccaggccgccgcggactcctcagactcagcgccctggaaacgcctcaagatctgggcgcggggccgaggtggggagaagtgcccgggaggcgcgggcggcctgggtgagggggcgctgagcacactcatcccagggtatgcagaggagtgtcgttcccaggtccctttgaccagggactaagaccaaatctctggattcaaagactttcagcctccaattgcccagggaccctgtggatagggccaggcttagggagcgggcggtagggagtgggtgctcggggcagaggactgcgcctgcagtgccgcctcagttcccaccgttctccgtgttcgctgtgctaacgcttgccctcaccctgcacgctgttctaacagagtcgtgaacaaatggtcaagtgttactatccaaacccaaggcttctgagagtgaaagggggaaggaggagtcagcctgaatgtatgtatggtcacctaattctaacaagaaatgattgactgtcacccaagtctttactgaacttggaaacatcaaataacttgacgaagcaagtcagtgaaagagctggctagaaggctggcatcccccagggtgctgggataaaattcttaactcttcatggatagcagtgaccaaagtccatagggtggaggggtggagagcagggtagggtgaggacagaagctgccaggggccaggtgaagggactgagacccgcagctgggtttgtgtccaggctcccggcttctcagacacagctttgctgtgtgcatgacccctgcatccgaccctggcatgggatcctggctcccatgaaatcaccggccaggatgtcagttctacaataaccctgtcaggaaagttaactctccaggtagcacagctggagggcagaacttgggcaagagcccaggccgctgagcaccaggccagcgctttttgactgtgctcctgtactgcccccacacaaggccctgaacagggcctgcgaagcactgggccctacccaccataaggacaatgctgccaggatggctctgggggcttcggcttcctgctcaggaagttgctcagggagggtccatggcggcccagggggtcatcaggcggcatgaacctggaaaataagcacaggggcaactgcaagaccacctgggatttgccaccagcacctgtacaaagggagcaggcccaagttccccaagaacaccaggaagcattcggccccgggcccaccatcacccagcaggatgtcacagcatcttaaagcaaaaccttcccttcacactgaaccccatgcagagcacacagcacagctctggccctctttgggtgtttctcctgttgtggttcaagccagcagtgtcagaatcacctagcaacttaaaaatgcagtcatctgagtgcagtggttcacatgggtaatcccaacactttgggaagctgaggcagaaagatcccttgagctcaggagttcaagaccagcctggacaacatagtgaaaccttgtctctacagaaagcaaaaaaaaaaaaaaaaaagaaaattagccagatgtggtggtgaatgcctttagtcccagctactcgggaggctgagatgggaggatggctgagcctgggagatggaggctgcagtgagtcatgattgtgccactgcactccagccccggtaacagagtgagatcctggctaaaaaaaaaaaaaatgacagcctccgagcttcgcgcaagacctgcttcatcagaatctgaagttgttcaggaatctgcacaactgggagattgaggtgggcagattgcctgagctcaggagttcacaaccaacctgggcaacacggtgaaacctcatctctactaaaaaatacacaaaaattagctgggcatggtggcgggcacctgtagtcccagctactggggaggctgaggcaggagaattgcttgaacccgggaggcgaaggttgcagtgagccgagatcatgctactgcactccatcctggatgacagagtgagactccttctccaaaaaaaaagaacttcccaggtgatttttatccaggaaaatgaaagtataattgctctaagggctcctctggcttcccactgtcctcaacaaaaggttagaaacctctatgaggttaacagctccagaaaagccaggagtggtgtcatacccctgtagttccagctactagaaaagctgaggaaggaggatccctggagtccaggagtccagcctgggcaacagagctagactctatcatctctaaataaacaaacaaacaaaaaacagttccagaaggtttcagagttgtatgagctccttgaggcttaggtcccatttctcctgtgtttcaccccgtgccaaacacagctctgggctgtgaacctccaggcgaagagattcaataggaacagggagtttgaatcagtgaggaagtggatcccaggtgctgcctgcacatacagccacctcgcagacttaacctcctcctctgcgcaccctgggggcacagggtctggtcttagtttccttggctgccctgcccctgatctgcccttctctcctccctggcatggagccctaatgaggaagggaatgcatgctcagagttcaacagggaaaacccaattcctcagaaggaaaacgcccctcgctgagtgaggtccactttttacataaatacttttgttcccaaggccacttccaggtcatacaaaggttctgtagagaggttgggattgtaaatcaaggagaagatgttttatgggttgctgtccccctaagaatccagagtcatgctgaagtcccactctgcagagagctgggtgatccccggccctgtgtggcctccatagctcagctcccagctgcacagccggcttctcagaattgggccttgaccaagaatctggggaaccgcccactgtggttattaaacgttcccaaagacttcctctcctgctctctcaggagcaggagctgtgccaagagggccctgtggacgtgcccggggcaccagggcaggcgccctcgctcacaagcgggcggcaggtcctgcctcctggcaggcccttaacggaggccagtgcgtcaaaaggacttggctcccgccccaggctgtcatcaggccagagatggccatgtccctgagagctcagtgaggatttctggagcccatagttaccagactagccagattcctccaggctacagacggacagtgagagccgctggccttttgtagctggaaatgacaatgggggctcctgcagggcgctgctgccatgcctctggccctccacctccacggctgcaggggcagttggccttggggaccacagtaccccctgctgcaccatgtcctgggaatagctgctaccacttctggggcacaattctctctagtcctcacaatgatctcagaggtgacattattaatcccttttcaaggtgaagaacattcagctcagagaggttgagtggttcccccttgactcccagccagtaagtggcagggcctcagatggaaacctcacctgccctctccaaagccccagccctttctcaaacaccacactgtgtccctgggtccagagtcagcagctgctcagccgtgtgcaagcagcctaagcccagacctctttccccatcgacccttccccagccatagccattcactcggtcattcctttacaactagttactgcacccctgtgggccaggcgtgctggagacaccgcacgtaagacagatacagtcccggccctcacagagctgaggagtttgtctaaaaccacgttccaaaaagtcagtcagagagcccagaatgagggccaagctaacactgcctggaacagaaatggaaatgggagcaacagcccagctggctgtgctctgtcacacgctgctcgggtctccagaccctcatccaccttgccagtgtctgccctcaccattagctgagtggtttgtgcctgtggccctgtgtccctctctgcctccagccatagccggttggtctgggatgaactgacccaagaggcctatttcagggctacatgaaccagccaggttctcttgaacatttcaacccagagtcagggccaggcagggggagatatttacagcccagaagaaaagattctgggctgggctcagtggctgacacctaaaatctcaacactttgggaggctgaggcaggaggatcgcttgagcccaggtgttcaaggctgcagtgagctgtgatcatgccactgcactccaacctgggcaatagagcaagaccctgtcaaagaaaaaaaaaaatctgttgcctactcccatatgtaattcaaaattttgatttaaaaaaaaaaaaaagacagccaggcacggtggctcaagcctgtaatcccagcactttgggaagccgaggtggacagatcacaaggtcaggagatcgagaccatctggctaacatggtgaaactccatctctactaaaaatacaaaaaattagccaggcatggtggtgcgtgcctataatctcagctactcgggaggctgaggcaggagaattgcttgaacctgggaggcagagtttgcagtgagccaagattgagccactgcactccagcctgggtgacagagcaagactccatctcaaaaaataaaataaaataaaataaaataaaataagacaaaaacctgaaataagtgaaaagcaatacaacaaagtacagatcttttccatgatgactatttcaatattctgaagtatgcaattctgtttttttaagttagtggtgccctaaacacatgcttgcatgcttggcccacctcttgggcttctctgtggtgtgtcagatgtggccctgggaacagcaaggtcagagcaaagcagcccacctattggggacgtgcccgccgagaatgcggacctgggggagctctgtctgaggggctgggtgaccgggtgaccccaagctcctccacctggtagcaggcgtggccactgcctcgaccccggccccccgccccgccgccccccagggtgtcaggaccccagccggacctaccggtcgttgacgaaggagaacatgagcagcctctgctcgatgaaccacttccactcggggttctcgctctgcaggtcccggtagttgtcgttggagacgatgacgccgtcctgctcgtaggccaccttcacgatgtagcggtcgtcgtagcagaccaggcgcttgccgtgcaccttgcgggacggcgtgtacaccagcaccgcctgccgctccagctccgccagcacgtgctgctctgagggcggggcgacggagacgcgggtgagggcccaagggcaccgcccctgagaaccacccccaacgcgaggccacccgcttcccgggccggtcagatgaggttttgaggggagcggggaaaaaacaccagtttttgccgccatagcgttcgctcctttcactcaatttcactgaatttgcctgaagccccaggtcaagcaggcaggcgcgtggcttccgtcctgcccacatcatgacaggagtccagaaagcgatactctacaagggagagtcacttcagaaggaagggttcagccacagcccttgtccttttgagggttccatgccacaatgcccctatcgcagcaggcacaggggcctcctggagaaagacattcctgtattaacccggaccttgatgatgccttcagcatgacggggagcctggcattcacctggaaagccctgcatgggcccctagctgggagccagaggtccatcttctcccaccatccaggaacctgcctgggacacctttgggatggagcaccccatcactgacagatacagggactcaagaacatcatagaaagcatccaggactaggaatccagcctggagtctgggccgggctccagttcctgggtacttcaccccggttgaatgtccatccagttttatatttataaaatgaagatagcaacgcctcctcttcctgtctcagagtgtctgtgagtggactgagctcaagtgagtgcgagttcttgcaaaaactagtcaagaggtaaacatgcaccagatggtacaaacattacaaggcctttcttatcagaggctaaaatctgcatcccaggagggtcagctgtttgatctggattttgcctttggagacatgcaggaaaaaaaaaatccgtttgacacataataattactcaggtccctcaagtttaagtcctttcccatatgacactgttggctgatttttaaaacgtgcataatgcagctatggtacaaagaacaaaaataaagacgccacatatctagcacctcctttgagaaataggaggtggctcatgtttggaagtcccctctgccccctcagtctgcgatcctctccattccccttaagcccttaggacaaccctagttttagaactccgtgtttatgatttccttgcttttatttttaaaaatgcagattatgagaatcattttctttctttctttttctttttttttttcgtttctttttttttttttttttttttttttgagacaagatctcactgtgtcacccaggctggagtgcagtagcacaatcatggctcactgctgcttctaccctcaaggctcaggtgatcctcttacctcagccttccgtgcagctaggactacaggcatgcaccaccacgctcagctaatttttttattttttgtaaagatgggaattcgccatgttgcccaagctggtctcaaacttctagactcaagcatccacccacctcaacctcccaaagtgctgggattacaggcgtgagtcaccatgccccactgaggatcattttcagtgtggttacacatcagacttgacacaaatggaatcatactatacatatacttaagcagcttgtctttttcgttcatcattgtgtttgcgaggtttggttgtgccatatgttcatcactattagtcctgcatctaagtccccggcacagaagaggcaaggacctcttcagggtatatctccaagagtgaatatggctgagctgtatggaaggcactttacaaggtaatgccaaattgttttccagagtggcgatgccaagttacatacccaacacagcacataagacaaccttgccgatacttggcattttcaggcttttggatgtttgccaatctggtgggcacaaaatggcctcctattgtggttttattttgcatttctctggttgctaatgagattgagcatcttttcatatgtttgtatgtttatatggccatatatgttttcttttctgtaaacagcttattcatgctttagcccatctttctgttgattcattgtctttgtctctttgatttggagaagttctctcaagatctaggcagtaatccttcatcagtaatgtgtgatgtgtaacccgcccccacaccctcaccccagtttgagacttgtctttccacttttttgtttttgtggtatctgttaatgaataaaagcttttattttagtatagtcaaatgtattcatctttcttcataagtttgcacttgttgtggcttatttaaaaattccttccctatcccaaagtaatttctctacttttcccacattatatttaagtattacactactgttgaaattcaccattcttcacattcagaccataaagaataattcaggacaaccagttcatgacagggaactgaacacaagtatttatattccctctttctcatagttccaatgtaatgaaaggtggggggagatctataatcatgttaaaagtaggtttggggacagcagcaaacccaggattttgacatactttgggaagacagaaagcagagaggattgtattgattgtgcagcatggagggaaccacagcccagaatatgcgcagaaggctggagtggaggtgggagccattgccctgcagtcttggagcacttctggtggtggagatggagtggaagtcgggcaaaatcgggatgactaacaggtgagctgagctactccctggcagctgctcccaggagaatggacctccactcatttcccatccctatccctataaagaaagtgaagctacaactaggaaggaagaagcctcccattgtggctgttgacctcctagaataaaaccatcatcattctgccattggaataagtggtgggcagaggcgccaggctgcctgcctgctccatgccaggtatactaaagtgaaaactgccagtcaacacaaatggtccacactgccattcagggagaagttttcatactaggagagaaaacccatggcaactgcgcagatatagtcatgcactgcataacaatgattcagaccacgtgtgtgacagtggtcccataagactataacagagttgaaaaattcctatcatcatagccatcctgaccttgtagtgtgacgtgtgactcatgtgcctgaggtgatgctggtggaaacactcttctgtgctgccagttgtgtaaaagtctagcacgtacaattatgtacagcacataacacttgatcataataataaagagctttgcagctgctctcttctcacaggtgagcatccctaatccaaaaatccgaccaacatgatgttcaaagcaaatactcattggagcatttcagatttgggatttttggattaggaatgctcagccagtaagcataatgaaaatattcagaaatccaaaacacttctgctcccaagtacttcagataagggatactcaactgtataagaagccaaacaacaaacaagaccctgtttgtttaaaccacagtgttctgaccgtgcctggtggctcatgccagtaatcctagcactttgggaggccaaggcagagggatggcttgcgtccagaagttaaagaccagcctgagcaacatggtgaaaccccatctctacaaaaaacaaaaactagctagggcagggtgcggtggctcacacatgtaatcccagcactttgggaggcagaggtgggtggatcacctgaggtcaggagttcaagaccagccaacatgatgaaaccccatctctaataaaaatacaaaaattagctgggcgtggtggcacgcgcctgtagtcccagctactcaggaggctaaagcaggagaatcgcttgaacctgagaggcagaggttgcagtgagctgagattgtgccgttgtactatggcctgggcgacaagagtgaaactccatgtcaaaaaaaaaaaagaaagaaagaaactagctgggtgtggtgatatgcacctatagtcccagctactgaagaagctaaggtaggaggatctcctgagccaggggagagcaagtctgcaatgagccatagtgagactccatctcaaaactaaataaataaataataaaactgcagtattctaatatttgtaggttaaaatattcctagctgattgaagaattaaaaatgaagaggctgggtgaggtggctctcgcctctaatcccagcactttgggagttcgaggtgggcggatcatgaagtcaagagattgagaccatcctggccaacatggtgaaactccatctctactaaaaatataaaaattagttgggtgtggtggcacatgcatgtaatcccagctacttgggaggctgaggcaggagaatcacttgaacccgggaggaggaggttgcagtgagccgagatcatgccactgcactccagcttggcgacagagcaagatttggtctcaaaaaaaaaaaaaaagaagaagaagaattccctgggtctcagttttcttcttctttttaaataaagagattagatgaagtacttggtaaataagtattacctgaccaaataaatgtctctttcaaatcctataaactattagaagtggaatacagatccagtgtctcttcaggtgttaaaagttgtcaggcacaattattttgataacttaacacaccaaaagagtagtttgttcattcatctactcaacaactgcttattgaacgcctaattttgaactacttgttgaataccaggtgttacgctaggtgctaggtgctagggctatggcattgaacagtcataatcagtgccttcatggagcttatagcgcagtgaggaagacaaatatcattaaacaaacaactaagtagatatttgactatcgatgttagaagtgcaccaaggaaacgtgtctagtacctcttgagcatacatctgctccagcatacctctgataggggtgtcagctcttggtgggtccttcctccaggatggaacaaaaactttgatgtaggtgtgtcctctgtccctgaaccagtcaacagccagcttgattccccggcaagagaaggtttctttatttccatggctacaatgggaaaacaaagaaatcatagagacacagcaagtgttcctaagagtgatttccctgcgaatatcctggatcacagtctcataatcaagagggaaccaggaaaatctatgttttaggccaggagtggtggctcatgcctgtaatcccaacattttgggaggccaaggtgggcagatcacttgaggtcaggagtttgagatcagcctggccaacatggtgaaaccccatctctacgaaaaatacaaaaattaccgaggtgtagtggtgcacacctgcaatcccagctactctggaggctggggcaggaaaatcacttgaacccgaaagatggaggattcagtgagctgcaatcccaccactgcactccggcctgggcaacagagggagactctgtctcaacaaaaaacaaaacaaaacaaaaaaaaaccacacacacacacaagaaaatctacactttaaagatagttcattcttccatttacaaataataaccattaacaagaaccacatagcttgtgataggtatgtagagggtcttgggctctgttatagctaatatcaagtgtcaacttgattggattgaagaatgcaaagtattgttcctgggtgtgtctgtgagggtgttgccaaaagagattaatatttgagtcagtggactgggagaggccaaccctccctcaatctgggtgggcaccatctaatcaactgccagcatggctagaacaaaacaggcagaagaaagtagaatgagcggacttgctgagtcttctggccttcgtttttcgcccgtgctggatgcttcctgctcttgaacatcagactccaagttcttcagcttttggactgttggacttacaccaggggtttgccaggggctcttgggcctttggccacagactgaaggctgcactgtcggcttccctatttttgaggttttgggccttggactggcttccttgctcctcagtttgcagatggtctattatgggacttcaccttgtgatcgtgtgagtcactactccttaataaactccccttcatatatacatgtagcctattagttcttcccttcagagaatcctgactaatacggctccaagaatacattctgaggactaacagacaagaccctctctttaactgaagctaagaatgatcaacataagacagataggagtagccatctacagaatcactctcaccctgagagatggttgtaaatgtgttattgggtttcccaagtccaagcaaggagggcaatgcccttcaaattccatagaagacttcaatggaggcaataaggagagagtggtatgagatcaggcagggccttgcagacattatggaagattcctttcttcctcctaagaggaattaaaaagccacggaaggatttcaagattggaagtagatgatgtgatgcgttgtgatgattcaaaaagctcaatctgaggccgggcgtggtggctcacgcctgtaatcccagaactttgtgaggccgaggcaggtggatcatgaggtcaggagatcaagaccatcctggccaacatggtgaaaccctgtctctactaaaaatacaaaaattagccaggcgtggtggcgcatgcctataatcccagctactcagggggctgaggcaggagaattgctcgaacctgggaggcggaggttgtagtgagccgagatcgcgccactgcactccagcttgggcgacatagcaaaaattgacggtgacttggactaagctgatggtggtggatgagggagaagagtaggtgaacttgagagatatttatttagaaggtcaaatctccagaactcaatgactgattggatatgggagtgatagagaagaaggcatcaaagatgactcaagatctctggcttgtgtaagaggatggcaggctattcactgacaccaggaattctggaaaggaacagggttagagggaaagatcatgagttctattttagacacatattgagctgttaacatttccacttagaggaaatgttaagtaaacagctagggttcagtggagatgtctgagtgattaaagttgtaggccgtctctgtgtaagcaatagctgaggccacagcatggacagaatttcctgctcgcctggagagaaagtgagcagcctgggctggaggaactctgcgacttcgcagctggttataggtagaggggggcaatatcatatgggactcaggagggacggatctgagaaggaggaagaaaaccagaggatgtgcatcaggaaagccaggggaaaaggggtcaccaaacgctgctccaagtgactggtgaaacctgaagacgtccctcagactcagtcagtggggtcagtggggtttcgctggagggagacaagtggatagatttgagatattgagaaggcaaaatcaactggactcagccatgtgtgagacagaacctggcctcaaattagatcactccacatcctcttccgccttcagatcccagcttcatcctcacttcctcaggaaagcatcccctactccctagactcctgcagatccctctcacgagctctcactgcaccctcccgctccttcctggcactggggaacgttggcacccatccaggggattgcctgggtctcccttctttaaaccgtgggctcctcttgctcaccacagaactctcagtgcccagcatcgtgtctaataattgtaatgactcactttaaaagctgttgaataaacgaatggctgagaagaaactcagctgagaagcagctagaggagaagctgaagcaaagggaagagctgaccggaaggatccaaacacaggcataactgacatggtctagggaccagaaagacaggagtggggctggagcacgaggaatgagcccgggcaacaggtgtaaagggaggggcaaggataagttcttagagagccaagggccactacgccactcgtgccttctcccgagaagcctggcagccaacccatatgcagacaaggatgacattttgaattcacactgctgtgctctctctcgtatgtgacctttcctgctattttctcaaggaagattaggatagtcacaagtttataaaagaaaaaggacgcggtggctcatgcctgtaatcccagcactttgggaggctgaggtgggcggatcacctgaggtcaggagttcaagaccagcctgaccaacatggtgaaaccgcatctttactaaaaatacaaaaattagctgggtgtggtggcacgtgcctgtaatcccagctactggagaggctgaggctggagaatcgcgtgagcctgggaggcagaggttgcagtgagctgagatcaagccactgcactccagcctgggtgacagtgtgagactctgtctcaaaaaaaaaaaaaaaatgaagaagataaatatccctttcgctactgaggctgaactctgaggcttgtacagtgaggagaaaatatcaacagggatatctgtggtcaaaaggaagaggaaggccgggtgtggtggctcacacctgtaatcccagcactttcggaggccaaggagaaaggatcacgaggtcaggagatcgagagcatcctggctaacacggtgaaatcctgtctctactaaaaatacaaaaaatttagctaggtgtgatggcatgcacatgtagttccagctactcgggaggctgaggcaggagaatcacttgaacctgggaggtggaggtcacagtgagctgagatcgcaccactgcactccagcctgggcgacagagcgagacgccatctcaaaaaaaaaaaagggggggggaagaggaagcagatcgctggtcctttccagcccagcagaagctgaaaaagagggaagatggaaggaggaggaggtcctcaccccaccccccaattccagctccacccagcccaaccataggggagggggagatggagaaacatcaagactgtgaacaagaggctgaacctttgtttttcagcacagactgggcaggctgcaagcccctcagagaaaccaggtttctgcaaggctgccttggaggaacatgacttggaggagaagtgagtctgaagccacaccccatccctcgcatgaccccaggcctggtggactgtctggggatggacaagctggcaccagtgagcagagagcactttaagccagcatggctcccagaaggccacttccatgtttcccgtttagaggccaggccagcccagccactgtgcaacagaacccagtgagggccccagaccccttttccggccaatatcaggtctcaaaggccccagaggccatccgagatgggagggggcggagaggaaccacagagcctgagtcgcccaggagacagaagaaacggaggccccacctgatgtacactggcaaacgttaagatgtaccctcccctacctaaaaaagaggggaagatatcgtgcctgtcatagaaaatgaggtccgttttctgtgtccctgaagcagtaaagtgaacaattgatgacaccctccctcacgtcacccccgagacacatgcatctcttcaatgtagtcaagtccaccctcagttaattctcaagggaaaatagcaccaccacaattattttaaaacttgtttcttggctgggtgctgtggctcacgcctgtaatcccagcactttgggaggccgaggcgggcggatcacgaggtcaggagttcgagaccagcctaaccaacatggtgaaaccccgtctttactaaaaatacaaaaatcagccaggcgtggtggcgcatgcctgtaatcccagttacacaggaggctgaggcaggaaaatcgcttgaacccgggagggagaagtttcagtgagccgagatcaagccactgcattctagcttgggtgacagagcaagactccatctcaaaaataaaataaaataaaataaaataaaataaaataaaataaaataaaataaaataaaaaagctgtttcttaattgctgctcttttttcagggtctccttccatatttgcatttaaccattcacaagccatctctgacacctttggtgggtgtaggaggcagtgttcagtggtgagagacaggaagggaacctggaccctggcagagctctcagtcgccctgggagcccactccccagcacacagacaggaatgcacacaccaaaggcatccactcatctgcacgttccttcacagactcagtgcaattcctgaatatctactacaaggctctgcactgcatgctaagaaaagacatcacccctgcttcttggagctcttttttttttatttaagaaatggagtctcattctgttacccaggctggagtgcaatggtacaatcatggctcacagtagcctcaacctctcaggctcaagcagtcctcccacctcagcctcccaagtcgctgggactacaggtatgcactgccacacctggctaattttaaaaatttgttgtagagatgaggtctggctatgttgcccaggccggtcttgaactcctggccccaggtgatcctcccatgttggcctcccaaagtgctgagattacaggcatgagccactgcgcctggccttggagctcatttttaagatctgtagagggttctgtctgccagggcactttgcacgttttgcctcatttaatcattacaagaagcccttgaggaagtgaccttgtccccattttacccttgaggaaactgaagcaaaacaatgtgtccatctctctgatctaggggcagccctcaaagcctgaccccttaggctgcaaaactcttcctccctagtctcccaaagaccattgattccccccaactccatctatacctcaggatccagatggcagttcttttggaggaatagtaacccacagtttaaatgctcatgcttagaaaaggcacctcatgcccttattaaccaacactgtgaaccagctcatcaggcagcaagccgagagccaggccctgggaaaaggagacaggagctgggagttttgtttttgttttctgtttgtttttgagacggagttttgttcttgttgcccagactggagtgcaatggcgcaatctcagctcaccacaacctccacctcccaggttcaagcgattctcctgcctcagcctcccgagtagctgggattacaagcatgcatcaccacacccagctaattttgtatttttagtagagacggggtttctccacgttggtcaggctggtctcaaactcctgacctcaggtgattcgcctgccttggcctcccaaagtgctaggattacaggcataagccactgcaccccaccagagatgggagttttgaataaccaaaggtacaaagaggaagtgggttggcacccaaggcaaattttgcctgcctgacaactgtgcctggggtagctgcaatcagagtgccagccagtttcagtaactagacaatccaattgtacaccactgcatctttgactattgccaagtagttcctgcagaggctaggggctcccaaagcagtcacatatggaggaaggttgtggctatgggcaggaggaaagagaggagcaatgattcctcaggggtctgagatgtgaagggaagctgctcttgccactctgtttcttactgggggttcaattgcaaacactctgacccttctcaccaggagatctctccccagctcaaggcaggggaaagagaccgtgagcaggggctgatctgggagctttcgccttacaagaaatgggtgcagacaggcaggagcccaaggctaacgtcagacagaacagagtcagggtctcagaagcaggtctgacccccagcccggtcataaacccccaccattctctttcttgcctgctgggaacccactgaggggggcatgatgaaaactgagaggtatgatttcaagcctgatctctctcttccttggagatcccttactccagcacaaaccagagcctgcagagtgtcctgagagtgtaaaaatgtaaacaacagccaaagcaaaaagccctgtgcactccaaaatgaggacacatttacatgaaaccctactctggggcagtaagaggatgtgaaattatcaggtgctttccccccaaggttgtactttgaatcccgccttttctagatttgcctacagaatgtaaaacaggctgggcacttgtgagtctgcccaccctaggcaagaaaatgctgcaactcagccgggagcgatggctcaagcctgtaatcccagcactttgggaggccgaggcgggtggatcactaagtcaggagatcgagaccatcctggctaacacggtgaaaccccgtctgtattaaaagtacaaaaaaattagctggacgtggtggcgggcacctgtagtcccagctacttgggaggctgaggcaggggaatggcgtgaacccgggaggcggagcttgcagtgagccgagatggcgccactgcactccagcctgggcgacagagcgagactccatctcaaaaaaaaaaagaaaatgctgcaactgttggctcgtgagaattcatgctcttcccacacaccatgatgccattttgaacacgctttcaatgaaagctgccttctttttaaaaagttgctggacattattcttaaagccaggtatctatggactcaggtattcagctgaatgacccgagctgatgtccctctctttctcacggaaacacacacacagccctacctttaaggtatggagactgcactgagaaatcagtctttgggctgctagtccatgagagctactatttgaggcacatgtggcaccctgagggcatcctgggcaccagccctgcagagggtccctgtgaagggagtggggcctcacacctgcctgcagctgacaagtccagggcttgtcaactgcagccagagcccgcctctgggtcagggtctcctaccctgtggtcctttcctaggccgggggagagcagaaggaatggtaatgtctggggggaacatggggcattggagagagcactgaatccagagctggctcttcttgctctgtgacctcaggcaagttacttactctctctgaacctctaaagaagagaaattcctttacgagaaaaatgtattgaccaggcgcggtggctcacacctataatcccagcactttggaggctgaggtgggtggatcacttgaggtcaggagttcaagaccagcctggccaacatggtgaaacccagtgtctactaaaaatacaaaaaattagccaggcatattggcacacacctgtagtcccagctactcgggaggctgagtcaggagaattgcttgaacccaggaggtagaggttgcagcgagccaagatctcaccacttcactccagcctgggcaacacagtgagactgtctcaaaacaaacaaacaaaaaactacaaaaattagccaggtgtagtggcaggcacccgtaatcccagctactcaggagactgaggcaggagaatcaactgaacccgggaagtggaggttgcagagagccgagattggaccaatgcactctagcctggcaaaagagcaagactccgtctgaagaaaaaaaaaataaaaataaaatgtatatatttatttcaagcatatgtaaaataaccaccttgaatcctcacccattagagatgaaaaggccttttaaggtttagtccaacatcctaattgtgtaaatagggctcaagccaggtgacctacctaaggtcacacagctggatggctgaaaagggacagctgtacagtccaatctacagccacttgccacacctggctattcacatttaagttaaaattaattgaaaaaataaaatatagaagccagttccttggttgcactggccacatttcaagtgctcgaacgtcacacgtggcaagtggctctgtggggacagggcaggggtgggccttgccctcactgcggggagttgtgttgggcagccctggcctagcggtcctgtacttctgacttccctggtttcctttatggggtacagcaagaggtccagcaaaactgggggcagccataggtctgtttaccaggtccccatcttccactctccccacatcatcacttggagttctcattacgttgacccacctcttacaaaatgaggaatgatgccagtagtcctgcttaggagagcccatttctgtaaaaagcactgggccagtggcccactctgtcaacctccagagagcagcagccaggtcttctgggttcagccaagcacgaccaatggcattgggctaaacattctaaagcactggggaaagaagcccacagaaacttctacctattgtgtcatggctaggaagcacaggtgggggtcagggtctgattccagccagtgttgaccatagtcaagcctgtcaagtcctttcctgtgtaactgagagggtcagaacaagaactgatggcccactctcacattctctgtgctaacaggggacacatggcctagtgcctcctgaaaggcagaggaaaaataaatccctggccacaaagcatagaattatctgtaatgtctcattctatgtcagtgggttatcatatttttggggatgacagaccctttaagtgtctattgaaagctgtgactctttcccccagagaaacacatatatgtacacagacatgccacattgtgtatatcatttcaggccattgctggctttgaagatagaaggggccatgagctgaggaacacagtctctagaagctggaaaaaataaaaaagactcttctctagaacttccagaaggacacttccaggggacagagccacagccaggaacaggcacactgaagaacattcctgccaacaggagccacacttctcatccgctcaaggtggaaagaacaggtgtcccactcagtctttaagcccctccccaccaccgcaaggccagacagtgcatgaagcagtactgccttcaaaaacagaaaatggcaatgtctgcaatactacaaaacctcagtgaaagggaattttcagaaaccatgtttctgaggttaattgaattttgaggtcaacagataacaatgagacaccactttgggtttcaatcacccattgcctgtgaagggtcagcacccacctgaacctttcacaactaaggatatggcagacccggagggacatgagtcctgttaaaagtcccattggaggacacaacagatgtcactgcagaaggggcagaggatggggtggaacctcacactccactctccccagagcttgcctttaaaaggaacaaattaagtcctgtgatcaggtggcggttgtgctatttgtctcttttccctaactactgggatccagggaagagggaggggatgtgtgtgtgtagacacattgtgtgtgtgtgtccatatatgacacacacagagcacaggtacatgtgttctggttaactcaggtgttttggaggtagccagtgtgtgagaacatttatgctctgacacattcttcgtagtgagtctgagtaagggtttcgatgtataacccgcacagattgaacatgagaaaattaatctgattgcaatcatgagaggtggggggcagaggtgggggatcaatggatgtacccacgacacattatggtcatgtgcaaacagaggatgtggcttaagtttgactccaagcagcaacagagactcccataaaaacaaaaccctccaccaccccaaagagaatctctttggggactgggcatgttttttgttgcccctgaaatagtctttttaccctacagccactctgctgttttgatttggaatcacagaactcatacaaccttagggctgggaaggtctttgatttaagcattcaaagccttccttctatggaagcccagggaaagaggttccttgctcagatcatatagaggccaggcccctctcacaaccccttctagtctttctaggaccctcagaacctactggattcttaaaaatccttttagcttcccagagatcttaaattgagcagaatttcataggtttacctatctggtgcctatacatgacatgggtgacaatgtgacagagaccccatgggccagcccctaagtcccaggagaaagagagggctccatcacctgctgatggcatcaatgccagggagacttagctggttaaaagtgaaaaaaaaaaaaaaactcaaagtacacaccgcaaaaagtgcagggacagcccctgaggctggaccatctgggctgaaccattgcaaacctcggtcctgcaacaccaaatccaaagtgagcccaaatccccaggggaaactctcggaggctctgttgacacattcggtgccgcggagaattgcttttctggattcccacctatggtgggagtaactcagcttttgaaaagggaagcacatatatttacagctgggagtgaaccatttcctatggctctgccctttgcacggttgtaacaaagccaagcggtagaataatccacttgtttgggcaacgccccacttcgcccagcagggtgttgggggaggctgcagagattccgtcacaggggagcttagccaagacaggcagataacaactcgggcgtgaggctggcattcccaaaacccacaaagatgccaacacacaaatgttcacacagccgcatctgcagctcagggggccacaaacaaatctctcaaacttaaggtagccgcaacaccgcctccccagcaaccccagcagagggcttccagcgcacttcaaagcacaccttcccctctgatgctcataaccttgagagagtagaagagatatttgtgggcctctttcacagaagaggaaatgagtcctgcagcttttccagagtctcgcagccggttagggacagactcccaacaagaagccacatctgccaacacttgacccagggcgcctccctcattaccacaccttccccaaaagaaggctcttcctctgggttatgatcataacagctacacttgttgatcacttactctgtgtcaggcactatcctaggcattttgtgcacaaaaaccctctacagagattttatcccaaccgtacagatgggaaaaatgagctcagaggggttaagtgacttgcttaatgccacacagttactaagagatggtacagggattcaaagcctgatccgttggccccaaagctctttggaccaaaccacaaggaagagggacagttctcagggctcctgcgaacaggggcctccccagccccagctacaggatgaagggaagctacctcatcgccacgttgctgccatcaatcactatgggtcgcagagaactggccagggttctgaagtcctcttccagggctgtccccgggccacgctgggcagagtccgggaccccacaggagccccgaggcactagcctgggtgcagccgggtgctccagggcacccgggcggctgcccgtgcggataagctcctgcagcacgtcgttgaccagggcgccctcgcccagcttgcccaacacccggagcacatcctcccggtcatagcccagcttctggaagaattccatcttgctggggtgctccatgctgtgcccagcggccactggcgcaggtcctgccccaggcttcctcctctcagagccctgcagacatgagctaaagagaaaaaaaatgcatccatcaggtgtttcctgggcagactggggcaagggcaaggtgtgcctgcgctggctccctcccggcctagctgtcaggaaatcaggtggagcccagtcccactggggactttcagttgctcaatgtggctgtggagctgcagaagcaatcacgctgctttcacagtgagctcactgaggccttcaccccacactgcccggcagggcacacacccgaccgcacaccagggctgcaggggctgagcgtgcacctagcactcgggacaggccaaacacaggtttcttgtttctcagactctgtggggggctgaatagtgacctcccaaattcccatggtaaattcctcaccccagtacctcagagtgtgactatatttagagctatgacctctaaaaggaggtccctaatccaatatgactggtgtccttataagaagaggaaatttgaacacataacacacagagggaccaccatgtgaagactcagggagaagggagaaagcaaccctgcaggcaccttgaccttgaacttccagcctccagaactgtgagacgatgaatttcccttaacgccccagtctgtggtgctttgctctggggcacccagctctcgggacaggccaaacacaggtttcaagcagactaacacaggcccctggcttacccagggccaaatgcccccgggcgaattctactcccagaaaggcagtgctcccacccaaattctgcttgctgccctgcacagctttccctaatgattaactcagaccacactgaacctctgcaatagaagggcctgccccggctgggcatggtggctcacgcctgtaatcccagcactctgggaggctgaggcgggcagatcaagaggtcaggagatagagaccagcctggccaacatggtgaaaccccgtctctactaaaaatacaaaaattagccaggcatggtggcgcacgcctgtaatcccagctactttggaggctgaggcaggagaatctcttgaacctgggaagcggagttgtggtgagcagacattgcgccattgcactccagcctgggcaacaagagtgaaactccgtctcaaaaaaaaaaaaggggcctgccccaaatttcatccatcccagccaggcattacagcctgacctacaccgggggttggggggtggcctgggaagggggctgtgtcctgatagatggcttctaaatgatgatgatgaaaccaacaggaacactctagacagccttggtccctctctcttttctacccacaaagaccgatatatttcaaaaaaaatttttttaaatacagaaataatcatgaaaacatatttattgcaagcgaaaactccaagcaacgtagaagcataaagaatgaaaagacatgatgtttctcctacacaccccaaacccacttgcttcccctactgtttttccgcacccctctagtgcttcctctgtacatttacttgcatgtctaatagataaacacaaatattgttttagagttgttttggtttagttttacacaaatggtgtcatcttatacttattgctcagcaacttgcttttcttattaaaaatgcattttgggggccgggcgcagtggctcatgcccgtaattccaggactttgggaggctgatgtgggtggatcacaaggtcaggaattcgagaccggcctggccaacatggcgaaatcctgtctctactaaaaatacaaaaattagccaggcatgtggcatgcacctgtaatctcagctacttgggaggctgaggcaggagactcgctggaacctgggaggcagaggctgcagtaagccaagatcgtgctactgcactccagcctgggcaacagagtgagactccatctctcaaaaaaaaaaatgcatttttggctgggcatggtggctcctgtctgtaatcccaataccctggggggccgaggcaggcgtatcgctttagcctaggaatttgagaccaaccacagcaacatggcaaaaccctgactctacaaaaaatacaaaaattagcggggcatggtggcgttggcctgtaatcccagctacttaggaggctgagacgggaaaatcacttgagcccaggagtttgaggctgcagtgagccgagatcataccactgcacttcagtccagatgacagagcaagaccctgtctaaaaaaatagaatagaatagaataaaaatgcagtttggaaatctttccatgctagtttacctgttctactgctcactgtatccccagcacttaggacagtgactcacacagctgaatctcaacgtacatgtgttgattggtgaatgaatgaatgaatgaatgaatgagtgaatacgttcttcagtgtttaaccatatgtcataggatgaaagtttgttttccatttttcactgttacaaatcaggctcagtgaacattccggcacatccacctttctccctcatcctcatctcagtatcacaggctcctgaccttcagtccctcttctcctatttgacttcattgtgtcaatcacatcactcagccaggttcccactttggcctggcattctctgcaggcctgtcccaggagttcaggagccacagcaggtctaacaatggcagggtctggcaggtgaagggcatttcacagccagccccctggacagagaggcctctgccacggcgtccacctgctcacctcccactccacctcagcccactgatggcaggcaccacgtgaaacaatgaaactgaccccaggggcaccagccccttctaactgccaaatccaacaacactttcacagtccttgccttatgccacctctctgccgcttttgaaactgggaaccactccttgacttgttattttaaattaaaaaattgtggactgccctttcttgaaactatctgttcccttaggctgtataacttggcctgattcttctcctcaattggtccagctctttcccctctccttcagtgttggggtgccacccacaccctccatcagcacctatattccgatgggccccacagctgcatgtcttgctcacacctcccactgagcaccaggcacagttataagtctgtgagataaacactgtgcttgctacttaagtgctatgggaactcagaatgcagtcacacaacagacatgtgctaagtgactacttcagtggttcccaaggtgtggtctagggaagcccgggggactccaagattttttcagggcatcttcaaggtaaaaactatttttaggccgggcacggggctcatgcctgtaatcacagcactttgggaggctgaggcgggcggatcacgaggtcaggagttcgagaccagcctggccaatatagagaaaacccctctctactaaaaatatgaaaattagctgggcatggtggggtgcacctgtagtctcagctactcaggaggctgaggcaggagaatcgcttgaacccaggagggagaggttgtggtaagccgggatcatgccactgcactccagcctgggcaacagagcaagactccatctcaaaaaaaaaaaaaaaaaaactatttttataataatgctaagatgtaatttctgtactttactcttatcctctcctgagtgtacgacagaatattctagagtctacatgttatgtgatatcgcaacagcttgaatgcagaagcaggtatgagaatccagctgtcttctattaacccagacgttaaagagatttgcagaaatgttaattagtgccaggcttcttactaattttttttttgttttggaaaataaagttatttttcatgaagatatgtcatttatgtcagtataattggtttattattatgtagaaataaatgaattttttaagttcttagttttcatttctaataaagtacatatccagcgatagatagaatccacataaacaaagcctctttaagaaccttaataatttttaagagtataaaggggctctgaaactaaaaagttaattcttaaatctagagctgttccaacaggtatttccacatagttgacaccatgtaggtgacctatagacatgccctccttctcccagggccccagtacagaacatccagtgtctttactcccttaatctggccctctcacatctatctcctactgtcctctgccccacccacccctcagtcctgccatcttcaccccatacctgatgactgtaacagcctccatctggcttgtagccaacattgtatttctaaaacaagtcggatcatgttcgccacctgcttcgaaatctcctcattggctacaagaaatacaccaaattcctagacaggctgccgaggttgtcacaaagcagccctgacactgaccacctcactgcctgcccctggcccacctgaccccttctctagagccatgctgaatgtttccctgctccctaggcattccagaatgttctcacaccaagcacagtggcttgtgcctgtaatcccagcactttgggaagctgaggtgggaagactgcctgagcccaggagttcaagaatagcctggacaatatagtgagatcccatctctacaaaaaatgttaaaaattatctgggcatggtggcgtgtgcctgaaatcccagccactcaggaggctgagacaagaggattacttgaccccaggaggttgaggctgcagtgagctgtgatcacgccactgacccaagcctgggtgacagagcaagagcctatctcttaaaaaataaaactaaatttaaaaaacaaacaaaaaaccagaatgttctcagcactgtgtttctgcatatgctttcctctctacttggaagcctctttttgtcttggaagacatcaagattcagctcagatgttattcagagcagtcaccccggagcctacagacagaatgagcagcttggccatctcatctaccacagcactttgctcacacctgtcttataacacaatgaattatcattcttctgtttctcaagacactgaattactcaggtatcctgacctattgcctcagaatcaccagcaccagatgatgcctagtatatctgaggagtttaatggatttgtttttttaatttttagaaacagggtctcactatgttgcccaagctggacttgaactcctgggctcaagtgatcctcccaccttagcctactaagtagccaggaccacaggtgtatgccaccatgccctaatagatttttaaaactaaatgtccaaagctaaagttatcttccctcctcaaatatcttttaccttggcccccaatcttattgaatggcatcccccagaggcccaaagaagaaatctcgaagtcccctttcactcctctcttttccttacctctacaacccattggccaataattctacttcccggacattttccataaccaccctccccttcgcactcacaccaccaccaccctagctcattcactcccttgtgtaagaaacatttgccgctcactgactcaacaccggcactgtgctgcatcccagctctatgaaaacaaaataagacaatccaatgtcaactcattcacaatcaattaaagaaaatagacaaaaaacattaacaatgagctgtaaaccacgaagataagcacgtactttcaattagaaaaatgtgttttcaaatatggtacatatacatcacagaatactatgcagacataaaaaacaaaatcatgtcctttgcagcagatggagctggaggccattatcctaagtgaattaatgcagaaacagaaaaccaaatagcacatgttctcacttataagtgggagtgaaacacggagtacatgtggacacaaagaagagaacaatagataccagaactgactgggcgcagtggcttatgcctgtaatcccagcactttgggaagcccaagcagaccagcctgaccaacgtggagaaaccctgtctctactaaaaacatagaattagccgggcgtggtggcgcatgcctttaatcccagctactcaggagactgaggcaggagaatcacttgaaaccaggaggcggaggttgcggtgagccaagatcgcgccattgcactccagcctgagcaacaagagcgaaactctgtctcaaaaaaaacaaaaaaaacaaacaaaaaacaggtgaggaaggtcttatcttccttggaggggcagggaaggccaaggaactgttgaagagaactgaactgcacagtgaaaggagactggctcttccaagtgcgaagaagggccgtgtcacactccacgccatcatcacagtcgggcccaacacaccctccaggctcttggccacctgcctccagcccagcctcacctcctccctgactggtgaccagtccttctctctcaggacggttgtcccctcagctgaggtccacctgcagcccagactccataaaggaaggggacactcacccagcctgacaggccagcctctcactgagcccaaaggcttccagtcaggctcttcgctcacccagaacatctgcatcacaggcaaaccccacagccacacccctcagaagccttcccaccccgacagccccagccacctccatccctccccacgcaggcactgtgacgtttgttttaatttggaagaaaaagaaagaaaggaagagggaggagatgtgggagaaagaaaagagggtgagaactaagagagagaaaggaccagaagaaaggaacaggagacaggaacagaaaagttcaccttcctgtggcttagcatttttttttttttttagagggagagttttgctctgtcgcccaggctggagtgaaatggtgcgacctcggctcactgcaacctccacctcctgattatcaaccgattctcctgcctcagcctcctgagtagctgggactacaggcacatgccaccacgcccaagtaatttttgtattttagtagagacggggtttcactgggtaggtcaaactggtctcgaactcctgacctcaaatgatctgcccacctcagcctcccaaagtgctgggattacagacgtgagccatgctcccggccatggctcagcctttgtatccaaggccttcccgttacacctggtgggaagatggggtagatacaagtgttcccttcccgagggtgaggaaactgaggctcggaaagtaaaggctgcatggctagtaaaatggcagagatgatcggcagtgacaaaaatgatttgtcgttttgagatgtgttcaggacacaggcagcatcttgttagctgggtcaggtgacttctcttcggttaccaaggaacggctctgaggaaagtccaagtttcttttgtaacttgcgctccatgtgacagaaacatgagcgtttccaaaatgaaaacactgggggctttcgcctggaggggcgcagggacagccgcccagggccgaagtaaggggcagctcccctaggggccctcggggcacagcccacagcccgttttctgaggagactgaaaggggcaaatgtggccaggagagctgttttcacactaaactgaaagaatgcatctacttcagaggctttttctcccttgagactttaaaatcaacttggttcctttttaaaacttctaaatacggaagaagcggggacaggagtggggtgctgctcttaggagcccactcggccctggagccgcagccttcccccgggacgtgatggtctctgagctgcagctctgccagccgcgtctcgtttcctccttcctattttgaagacctgaaaatctgaacgacttcatttcagtttccttcctccgtcctgactggaagtcacactctgtccagatgattagcgacaacacttagaaaatcctccaagtggcccggcaaggccctgggaggtcacaggagcagcttcctgttgtcagagcgggctgctgggggtgggttcggggcggcctggaagagcagggaggaagggagggggccccacggctggaacagatcagatctgtccattctagaatcagccaatacaggggaggggtcccgggttctagtttgcagcctctgactagaagggccctgaggaaaagagaaacaaagaggagagaaggagtaggcggagacgtggcagctcccacgggtgcttccttgtatattatcacatctatgggaacctcagtgtcctgggagccacctcattactcccagtgcaggggaggaaactgaggcaaagagcggctttggtgacatacccaggcccctactgtaaataagggagaccagactcccaaaggtggctggccagaaggcaccgcccagggctgctcaggtaccacccaaaggccagcagccaccatgaggtgccatggagcagaccacagccagcccagccccaagaccagcacacttaacacctcgcccctgccccccaagtctgttcccgggtcacctctgccagctccacagaaatccacgaaattacagcctccagaactcagccaccatggtgaggagaaagttgtcttgtcctgagcttttccacagaggccaaacagaaagtttctggttcagctcagagctagaggccctcagtggagctgtcagttagattttgaggaagtcacagagaggcaaagacggtagttcatgggacaagtatttctcgcctggcctttatttttttttaagggaatttgtaaatttttttaattttctttaaattgtggtaaattatatgtaacataaaatgtaccactgtaactatcttaagggtacaggtcagtagcatggagcacattcagactgctgtgcaaccatcaccaccatccagctccagatctcttttcagcctgcaaaactgaaactctcagctcattaaacataacttcccatttccccagtccctggcacccaccattgtacgttctgtctcaataaatatgatgattctaggcagctcttaggagtggaactgtacagtatttgtccttttgtcaccggcttattttgctcagcattatatcttcaatacaaactcccgggctcaagcaatcctcctacctcagcctcctgagcagctggaactacaggcacacactcccatggctggcagggttttttttattttttgtagagatgggggtctcactaagttgcccaggctggtctcaaactcctggcctcaagggatcctccctccctggccccacaaagtgctgggattacaggtgtgagccaccactcccagccaatttctctcgtttttaaggcgaaataacattcctctgtatgtatacaccacatcacgtttatctattcacccttcagtggacacttgggttgcctctgcctctgggcctctgtgaacgatgttgctgtgaacataagtgtgccggcctggccttttcctttctcaaacttgtcccctgctcttctgcattgtgatggtttctctaaggcggacacacaagcatttaagccccgatccacatcccggagcaactctactgtagtccacaccccagcctgttcacgagtcagggatgggcaccccacgattggcattgcctggccttagagaaaagctcataatcttgggggccatagctgaggtttcttatggctgcagggaatttgtcttcactgcagtcagattaacatttagttcagtttcctcattagcctttgggaagcccacagaggcatcctctataagagatgctaccaaaagttcctgactgcattcagcctggaaactaggcttcccatagatgataactagtctagaagatgctctcatgagcatggtgacagggctcaaatgtgcctgggagttctactctttctgatttcctaatacgtaaatatcttcaaaggccacagcaggaggttttactgaaactgaagagctccctctggttaatctttcccccaaaaatgtcatctggaaattaagcacaattttgctaaaatgagcaaggatttcacctaaatgaaattaaagagggttatcttattttttttatttagcacttaaaataatttagagtgtgagaaatcagattgttcagggtcacacgcccccaaggactgctctctaacagccctcctcctgcctctgccccggggttccagtctctctcctccacccctggactcaagtctgcgtggtgttggccacactgactgacagccaggggacatgcactcaccagcagggtgtgtccctccggtcttcacaatgaatgctggcccagtcgccagcagccttcacgccaatgttctcccgtcagtgaggccaggcccccaggtgccactggagtcagaggagggcagctggcgtgcgccaagcagccactaggagccacttcatgccaatgctccacttcctgcacgccacagtcacgttcagctgcaaaagtagttatgctttgggtttttttggtttttttttttttaagaaaaaaaaaaaggaaaggaagaaagcaattaaaggggcgggggggacttaaagtttgcacctcagcatgagtcaccgaatcaaagttcagcaaccacatgcaaaacaaaccctccgtgagggcagcaagtctccgtgaggacggctgggattggctgcacagcaaagccaggagaggctccatgaggagaacagcattcagagtccaagggggagaacccctgttccaagtgggaacttggaacagaagttctcctgcctccagctgagaagatgatcagattctagctgctcctggggaaagtcggtactcacagctggacacaaacatagcttgcaggaggaagagtgtcagagcaagagacagagcagagatggctacggagatatgggtgcatatggggacatggcacagggaggactctgtccctgccttcacgaaggggaattccaaacgagtcacgaagtccttctgactagggaccaaggcactagcctgtgtcagagataacatggccctgtggctccctactgccgccctgcgtggcgtgggtggtggcttctctcccactgtggcaggggaagtctgaacccacctgaccacagcattctgcagactgcctggtctccagcctcaccaggtacaggcaacagacccagaactctgaaattatttcctaaatttggtgatgcccatcaggggtcagaagaagaggaaagaacacaatcaacccacacagtagcccacctcccaacaaacctccctgtctcaggcagcaacttgctccaggacacacagtcaaccagttggccaaggtgggtttagaacccaggtgttggtgctagggaggtaagaatggcacatggtaactggaatgtgtagctctttttatttattcaccaccggtctcccaaagaaaatgtgaagcagtgtagatgattaaaacacagagaatggaataattaaaataaaaaattaggccaggtgcagtgtctcacgcctgtaatcccagcactctgggaggccaaggcgagaggattgcttgagcccaggagttcaagactagcctgggcaacatggccaaatcccagctctacaaaaaatataaaaattagccaggcatagtggcacatacctgtggtcccagccactctggaggctgaggtggattgcttgagcctgggaggttgaggctgcagtgagctatgattgcaccactgcactctagcctgggtgacagagtgagatcctgtctcaaaaacaaataaataaatttttttgaaagttcaatcagaaatccttacaagaaaaaaagaacatcataccagaaagctagattagagtagtcactgcattagaacactaattctagctttgaaattttctggtacaatggattttcaagtaacagctcccatttttttcttttgctgttgttgtttgtttgagat

SEQ ID NO: 680 - DNA, 106795 bp, Homo sapiens
  source 1..106795: mol_type = genomic DNA
actctgctagtcccagcctcccaggtcccttggccaggtgccctggcagtcactggtctgctgccagctgccccttggcatgaggggcctcgtgtgaccaaatgggcacactccatgcaggggaaacgcaaggacttgagaccaagcagagcccaggctgcacaaggtccccaggtgggggattgggacaccatggtggccccctgaaggcagtggccagccttttctgagtcttcctgctggccactcctggggggggctgcatttggggacagtggacctggccctgaactgccatcacacccccttgcccaagagcagtgccctgggcctccgagtggctgtgccgtgtgtcagatggcagcgctcacggtcccagacaggcgctgggtggatggggagcctattccccagcccccacggacgtttcacgtttcaggggctatgtgccagccgcagggtggccaaaggaagtggcacccatgggtgggtccagctgcgcaccgggcctgcggcagacgcttcccggtggcacaaagtgaagttagaggatctggccgcctcatgcccagccggtgcccaccctcaaatctggggtcccgaacaaggacacaagcccctgtgaacacttgggtctgggtgagctgagccagtgttggaggggacagaagccagctgggcacaccccacccacagctctggcttccagaatccgccatcccacccgatccggctggaatcccagcagggccaaggccacaggctgggtcccagggccccagggtagaggccacagcgacgagcactgtggagagaaccggaaactgctgccgtgtcacccagcactcgctctggtggaaccgtcgcacgagcctcacgcctcgtcccctctgatgccaacgtcaggacaccccacttcagggtggaggccgcgacctcaagggggcggagcattctccccgcccgagtgtggaccaggccaaggggccccgcggggtgtggggtgggcagtggcagtgccacccacccagagcccaggcaggcagagggcacaaggctcgtgcatctgactccaggctgtgccgtggggcccctgaaggtgttgctggcctgcctcgcccaggggccaccccccatttctttggaggtgaggagaggagccttgcccctccaggccttgcctctcccaatccagggtctgtggcacaacctcagccaggcctcctggtcaggcccctccagcacgggcacccgtgcagggcaggggaaccgggagctggccgagctgccccacccaccatggctctagcctgttgcatccgggtccccagagtgccccctaggccttccccaccccagatggtgctgctcaggtccagggagaagcgccttctgacttctgaaccatcgtgggaggtaggaaaggggccccatactcctgcccagaggggcggtgctttccgcctggcggtggcatggcaacagtcaggacaagccaaccagttacggatagaacctttattgctgaacataaaacacctgcctgggaggcctggccagtggcctcttcactgggccgaaaacctgggtggggagggctgggggctgcagggccactgttgccaatggcagtcggggacaggcctggaggccagccctgcctggcaccctggaaggtggtggggtggggacaggggcctggcttgggggaggaagaccaggccctgcgcacacgctggtcatggaaggttgagggccaggcaggcagagcagtgtccctgtggcccccaggtgaggcttggtggcgggcggccctcctgtggggtagagtggtggacagagcctctttcctctccaaggatgagggtctgaggtaggtgcaggccggtccctggggtcctcacagacgtggtttgatgtgcagaggcttccctatgcaaagagggcaaaagttaggtgcccggaaacccctggaagaacctccccagcctgcaaagctcctgatcgggctcaggatcggggggctctgtcagcccaagcacacacagcaaggtctgcagagataccctcctgagttcgagggagaagagcacagacaggccacaggcttcagcttctgccccctgctgccaacaggtcctggtgagcctctgtggctgtctagccatggtgcaggctcagtctatgaggtcaactgaggcttctgcctacagtccaggggtcctcctgggcgggcggcagtcccggccacaaggtctgcagggtgggccatcagtactggtgcacacagcaccagactgccctgcacgttcagtgaggctgccagacacacgaggcggccacgatgcagcttccatgtggaaagccggggtgcacacaagctgtggcggggaggggcaggagcagagcagaggccccagggtgaggcgggcagggcctggaggcaggcagtgtggagggagcagttccccacagcggggaagcccaggggctcctgccccatgaatgttcactcactgggtgccagcgcctctcctccctccccagatctcccctccagaccacccgacaggcaccacagtggcccgctgaatagagatgtctccgtgtagctgcccacaggactgggcctgcccaggtgcccctcttcagggccgatgagcccgctcacccatgcacagctgagtcgggcccagcagccagggcccaggctacagactacacaggctctgacccgtcagcctgcccctgcggtggccgctccagcagcagctccagcttcctgcccagagactgtcccaggcacctccacctgcccgagctcctggccatggccaagcaggggaggtttctgcagcctttcccaggccccgcccaaggtgcacacaggacccctcagcaccctgcccacctccactggctctggaactggctgctaggttcctgatcttaaaaaaaaaaaaaaatacaagtcgctgcctcggggccccatctgctccccgaccccagagaggcccacccagatggagggagcgggtgcccaggtctcgtggggcggagggtctggccacggctccacgcccctgacgtggaggctgtgaacaggaggcggcccctccgaggcaggcatttgagtgtgctcagcggagctgttgcagaaggctgcagcaagcatcttccattaacgttacgaccgtgaaatatgacaataaaatgatagccgtatggtcgcaaatttgcagcccgccgagctgcgtggggtttatcgtcactcaaacgcgcggagagctgtaaaatgtttacagaaagggtcgtttgcagccataaaatcctcttttctctcctaaacaaggctgagtggagccatttaccaagccccaaatgctcatcgggggagagggaacatctgttctctccaggagtgcgtggtgatcttccagaacaaattaacagaaatgggtgctttctaattaaatcagccctcagctggggcagactgcgcagcggccaccgctacactcgcaccttggctggccctgccccagggctggcaggtgcacccctggcgcccgtgggactcacccaggccccacctggagattctgacgtggtggtctgagggggcatttaaagctcccctgtgcccgagcccggccatgctgcctacctgagcccttggtgaggggggccctgggggcctgagccaggccatgctgcctacctgagtccttggtgagggaggccctgggggcccgagccaggccatgctgcctacctgagtccttgctgaggggggggccctgggggcctgagccaggccgtgctgcctacctgaatccttggtgaggggggccctgggggcccgagccaggccgtgctgcctacctgagtccttggtgaggggggccctaggggcccggaccctgggctgggctcctgggctcggcgaggactgcagggagatgaaggaaggcagcttgcagagcctgttggagcacgctgctgctaaggcagcctcctggagagatggtgcctcgtggtccaaggaagcgggaggggatgaggaggaggaggaggaggaggaagccttcgaggatgagggagaggctgacccccctgggcagtggggaggtgcagccacggcagccgcagtgagggcagccgagctgggcgtctgcctggtggggcgctgggatgctgaaggcttcctgcagggaaggaaggggcagacgtgtgaggtggggtgacgggtggggatcccagcgacagactgcccatgctcttggctgcttcctgctcccgtggccctccgtggtctcagggcagagctggaggcacaggtcaggcctggcccttggccgcaaggacaggctgggtgcagggatggccccagctccacaccgagcctgcccctcacatccagggccttggcttcctggtctccatggggctccacacccacatggcaggtgggctggatgagggggcccccagactcctcccggggctgggcctcccacccggtcccagtgagcaggtctctgtgaggccccaccttcctccattggccagggatgcccttggctctgtccagacttggaagtggggtaggggcatctctggaggtcatgtgatccccagccttggatagggatttctttctggtctgaggcccaaagagctggagttggcgggagctcaaccagagggccccgggcatctccccagacagggagggggccacccaggctcacatgcacagtgcccactgccccatcacctgggcccgtggctggccgagaccctgctcctggcggttgcgtcgctgggccctggggcgggggacgtggctgcccgccgactgtggcgtttctgggtacggtggagcagctggcactgggcgccgcggggacacgcccccctgcgggcaaagtcggggcacagcagcgtgtgtttcttcttgcactgcagagagaaggggtgcaggtgggtgggccggctggaggctgtggcgctgcacggggaaggcaaggagagccaggccaggccccccgagtacccacggggccccataggctccgtccaagtcttggggccaaaggcttcctcttggaaggctgaggccaccagtccagagaggttccacctgggccctcacccacccacaagaggccctcagccaactgtaggccctgggcacagactgagagcagggcggggctgggccagcgtggggactcccagagcctgcagccaggccatggctcagggctctgcccacccgctgcctctgccagaccccagccagcccatcctggcagcacagagggagcccgggaaggtgggtgtggctagagacctgggggtcttaggctgggccgggagagggtggggcaggtcagccaaggccaggctgcactgggtcagggctgggctgggctgggcacgcgatccctagcacctgtcacagtgctaattatacccacagggcagggggtgtgccagccagcaggtgctctgggcagcaacatggccccagctctcctaccaggcccacagggaaacacaaagaggctgcccaaggccccagcggcccagcctggcctgtggtgcagggcgcccagcctgcccttcctctgcccacccctcccgggctctgctctgcagcccagctgcctgcctgcctcgtgcccaaggcctttcagggagggtatgccctccccctcaccctgcagagcccactgcatggggcacccaaactgctcttcatgggactaagcgacaggcgtccccaatgtgaactgtgacaagctccaagagtggagctcaaatctgtcacggcactagagtggccggagtgcttccagctcgtggggtgccacagccttgaacccacatcctcccagccacacagtcccttgccaggcacctgacctaagaatctgggatcccaggtactgctcctgtacctggggctggccgtgagcacctgctcagaaccgggccctacactgtaccccataccttccctggatcctgtggtgtggcccccgccatacccccaggtggaagccaggctcaggccagtgcttgcaccctcactcactcattcattcctgcgacacggagtctgagtccctctacacagcgcctcgcagtgctttggggcccagagaccaggggctcctcaggggcctgcggctggagagatgcccggtcctgcagcagagcaggcttcaggggccggggggggtgggggggcgggggcaaggcctccgggggggggggggggcaggggcagtggctgtgcctgacaaggaaagccctgccaccagcacaggcatcccacgcggtactgggacgggcgtgggggtgtgcaggtccactgttcacaaaggggcaggactgcaggcattgccaaggctgcgggtgcattttatcagatgcacccacagccccagcaacggctggtgggcaacactggatgcagagtgcccggctgagatgtccagagggcacctgccacacagccagtgtgagctgaggtgtgggtgttggtgtaaaccatgtgccaggactcagacttagtaggagcaaaataatgtaaaatgcacatttctttttccttgatgacatgttgaaatttttgataggatgggttaaataaaacatgattccatctgctttggtgtataatcttttttaaccttttaaaggtggctactagaaaagctgaaattcacaaatgactcatccatgtctgtactggacagcgccgatgagaaccctcctgcagaacacaaccaaatcccgaggatcaaagagaactttctgaggccctgcacagtggctcacgccggtaattccagcactttgggagcaaaagcgggtggatcacttgaggtcaggaattcgagagcaggcctgaccaacatggtgaaacggtctctcctaaaccgtctctactaaaaacacaaaaattagctgggtgtggtggcacgcacctgtaatccaagctacttgggaggctgaggcagaagaatcgcttgaacctgggtggtggaggttgcagtgagccaagattgcaccactgcactccagcctgggcaacagagtgagaccctgtctcaaaaaaaaaaaaaaaaaaaaaaagaactttttgaaattacttaggagcgatgaagaaagtaaaatgatggaagaaaatatacaaggaaacacactggacatgaaatgaatcttaaatttcaaaggcctgagaccttcatctcatgttcactaatgaaaaacccaaaccagccaaacaaaacccccagaaaactctccaaagatctggaaatgtatcaccatctgtggaacagcgaaaacagggcttaaaggaaaatacatagccttaaatgcttatatcacaacagaagacctagcttaaaagttagggggagaacagcaaatgaactcaaagcagagggaaagaaaaacaaaataggaattaaaaccaagagagttaaaagttggttcttttaaaacagtaatcaatttatccaatagggttaatcaggaaataaagagaaggaagatgtaaacaatgttgggaacgctaagcgtgtaactaaagatgctgcagatgatgaaagacaccgcacgctgtggtaacaaacgtcatgccagtatgtttgaaaacaccagtgaattgacaaattctagaaaaactgacaagaaaaataaatccaagtatttctataaccatgaagaaattggaatcagcagttaaaaagcaaagctccaacccaaagggttttacttgtagttctttttttccttttttttttttttttctgagacagagtcttgctctgttgcccaggctggagtgcagtggcacgatctcggctcactgcaacctctgcctcctgggttcacaccattctcctgcctcagcctcccgagtagctgggactacaggtgcccgccaccatgcctggctacttttttgtatttttagtagagatggggtttcaccttgttagccaggatggtcttgttctcctgaccttgtgatccacccacctcagcctcccaaagtgctgggattacaggtgtgagccaccgcacctggcctttacttgtggttctaccaaatactccagatgtacaattccagtcttccatgaacaagtccactgtatagaaaaacacagaacactactcagcttatggggccagaataatcttgaaaccaaatctgaccaggactatatgagaaaaaaacatttaggccaatatcactcatgaaaagaatgcaaaaagtcctacacaaattataaacgagagtcttgcaatgtgtaaaaacactaatatatcaaggaccaagttagatttatctcaggaatgcaaggttggtttaatattagaaaatcaatgaacaaaaattagcacattaacaggttaaaagagaagaatcatatgatcacctcacagatatgaaataagtatttaataaaattcaacagttttttaaaaagaaacatttagcaaattagtgattgaaggtaacttcctcagcctgaaatacagggtttcgtaaaagataactcccagaaagcatcacatgtcaaggggaaagtttggaagcccactatcatcaccagtcaatattgtattggggtcctatccaaggcaggaagacaagaaaaagaaagaaaacttgtctggactcaaaagaagaaaaaaagtcattatttgcaaatgacataattgtttatacagaaaaatgcaagagaatttataaactaattactaatatagttcagcaaagttgctggagataaaatctatataaaattatatttctatacgccaatgaacagtgagataatacaaattttaaatatactatttatagtaataaaactattaggaataaatctaacaaaacctaatcaagggctgggcacagtggctcatgcctgtaatcccaacactttgggaagccaaggcaggcggatcaccttaagtcggtggttggagaccagcctgaccaaaatggagaaaccctgtctctactaaaaatacaaaattagctgggcatagtggcacatgcctgtaatcccagctactcaggagattgaggcaggagaattgcttgaacctgggaggtggaggctgcagtgagcccagactgcaccattgtagtccagcctgggcaacaacagtgaaactttgtcttaagaaaaaaaaaaaaaaagataataaagaaccttattaaaacacattaaaggtaggaggccagggcgggagggtgggaggattgcttgagaccaggagttcgaaatcagcctgggcaacacagcaagaccctgtttctacaaaagattaaaaaaaaacaaaattagccaggtgtcatagcatgtgcctataatccctgctgcttgagaggctgaggcaggaggattacgtgagcccaggagttggaggctgcagtgacctatcatcacaacactgcactccagcctgggtgacacagtgacaccctgtctctgtctcttaaaaaaaaaaaaagacattaaaagggagggtctaactgaagaaatacagatgccatccccacaggctggcagctcactgctctggggacagatgcccattccaccaaaccgagctacagattcaagacaatcccaatcaaaattccaacttttttttaacctgacaagaaaaatctaaaatgtatttctgggagaataatggtcaagaatagctgaaattcgttctaaaaaagaacaaggtgaaagaacttgctttattattatgaagctcaaataattcagagcatggtttggctcagggacaaactgaccaatgaacaaacagagagccagaagcagagcccgcatccacgcagacctcacgacaggagggagggctgcaccgcacacccgctggaaacaatgggcttttcgaggccaggcgctgtggcaaaatgaaactggacctcaccgcacacaccacacaagaaaatcacctccagctggatgaaagtctcaatgtgaaaggtaaacacaacaaaatatttagaggcaactgagcacaatctggtgtagagaagaatttcttattcaagacactaagggtgcaaaatgtaaagaaaactataaaactatgtccgttaaaatcaagaacttctgattttcaacacgtcacaaagaaatgcaaagataaaccacaaacagagaagacatgtgactaacagattaaagtccaggacattatatgtatttttatgtttgtttatgtttataaattccctctgagtcagtaagaatcaaacaacccaaaagaaaaacaccctcaccctcaccaaaaagattccaaaaatcaccaaaaagattttccagaagcgaagacacaaaggccttagaaacatgggaaaaggttttccacctcagtttacatcagagaaataccaatttaaaatatcagacagcttttaatccttctaatggtcaaaaagtaaaaaaaggttgaacacagccttcacagaaagcacagaggcccgtccaagctgccgagcgtgacaggccaggtggcctgggtgggctcatgtttccagctaagccaatgtccacactgcctggccatgcactgaggcactgcttcccacagggggccctctggggcctggactggggcccgcaaccggagaactgtcttcagataactaattggtcgtctgccttttctatcagcaccaagacagtggagagcctcaggtgaatctcccaggcaccaggtcaccttttccccaagccagcctggccctgggagcatggtccatagggagactcttccggcctgtgcttgcggagctgacatgaagggcacagggactgggccaggctccacggcgctctcttccttggccaagagcaggctgatttgcccagctggcttgaccacagcagctccctcaccacctgtgctgattcagcccagggcctgaggggcccctgccctaccacagcacccagccctgcttagttctctcctgggggtgaggccctaaccccacagccagcagcacctctgatggctgtgacgcaccctttgtccccagcagagttgccagcttccttcccactgtccaaaatcaaagctgccccctctaccaccaccagccaccttggaggacgtgttccagacacttctatccacgctctccatctttctcacgctcctctgcattccaaaatcagtgacttcatggaatgtagtatcttggaacagaaaacagcatcagggaaaactgaggaaatctaaataaggtctggagttgacagttacaccacaccaaagtggatgtctcagttctgacagcgagatggtacatgagtccattctcgcactgctataaagacatacctgagactgggcaatgtataaagaaaagaggtttaactggttcacagttcacaggccgtagaggaagcatggcagcatctgcttctggggaggcctcaggaagcttccaatcatggcagaaggtgaagtgggagggaggcacttcacacggccgagcaggaggacgagagagagcggggcagatgctacagacttttaactgaccagatgtcatgagaagcctaccacaagaacaggactcgggggatggtgctcagccattagtaaccggcagggatggccgggtgtcgtggctcatgcctcccaccactttgggaggctgaggcgggtggattgcctgaggtcaggagttcgagaccagtctggacaacatggggaaaccctgtctctactaaaaatacaaaattagccaggtgtggtggtgcatgcctgtaatcctagctactcagcagactgaggcagaattgcttaaacccgagaggcggggggttgcggtgagctgagagagtgccattgcgctccagcctgggcaaaaagagtgaaactctgtctcaaaaaacaaaacaaacaaacaaacaaaaaattagccaggcgtggtggggcatgcctgtaatcccagcttctagggaggctgaggcaggagaaccgcttgaacctgggaggcagaggttgcggtgagccaagatagcaccattgcactccagcctgggcaacaagactgaaactctgtctaaaaaaaaaaaaagagaccaggcaagtcctttctacctatgaacccataaaatcaaaacaagttagtgacttccaagatacaatggaggcataggtattgggtaaatactcccatttcaaaagggagaaatcagccaaaagaaaggggtacaggccttatgcaagttcaaaacacagcaacgcagtcattaaatcttaaagctccaaaatcatctcctttgactctacatttcacatccagggcacagtgatgcaaggggagggctcccaagtcctcagccagctccgccgccatggctctgcagggttcagcccccacagctattttcaagagccagcactgagtgcctgcagcttttccaggtgcatggtgcaagctgtcggtggatctaccactccagggtctggaggacagtggccctcttctcacagctccactaaacagtgtcccagtggagactctgcgtgggggctccaatgccacatttccccctagcagaagttctctatgagggcttgacccctgcagtaggcctctgcctggacatacaggcttttccacgtatcctctgaaatcaggcagaggctcctgaaccacaactcttgcactctgagtacctgcaggcttaccactacgtagaagcttccaaggcttactatggtttgcaccccctgaagcagtgaccagagctgtgccttggcccctttgagccacagctggagctggactggctggacacagggacgcagatcctggggctgtgcagggcagtggggctctgggccaggtccaggacaccattcagttctcccaggcctcatgccagtgatgggagggtctgacatgaaggtctctgaaatgcctctgaggctttctccccattgtcttggttattagcacttgccttccttttagtcacacaaatttctatagcctgcttgaattcctcccctgaaaatgggcttttcttttctactacatggccaggctgcaaattttccaaactctatttcccttttaaatataagttccagcttgaggtcatttctttgctcacacatatgagcaccgaatgtcagaagcagccaggctacaccttgaacactttgctgcttagaaacttccaccagattggttgtgtacagtggctcatgcctgtaatcccagcactttgggaggccaaaacgggtggctcacctgaggtcaggggttcaagaccagcttggtcaacatggtgaaactatgtttccactaaaaccccatctctaccaaaatacaaaaattagctgggtgtggtggtacatgcctgtaaccccagctacttgggaggctgaggcaggagaattgcttgaacccaggaggcagaggttgcagtgagctgagattgcgccactgcattccagcctggagcaagactccatgtcaaaaaaacaaacaaaacaaaacaaaacaaaacccaggaaatttccaccagatagcctaaatcatcattctccagttcaaagttccacagatccccatggcaggaacatagtgcagccaacctctttgctagcacataacaaaagtaacctttgctccagttcccaataagttcctcatctccatctgagacctcctcagcctggacttcactgtccatatcactctgagcatttggtcacaacaatttaacaagtctctagaaagttcaaaactctcctcatcttgctgtcttcttctgagccctccacactcttccaacctctgtgggttacccagttccaaagctgtttccacattttcaggtatctatatagcaatgcctcactcctcagtaccaattttctatattagtccattatcgcattgctgtaaataaatacctcagactgggtaatttatttctttattgagacggtgtcttactctgctgcccaggctggagtgcagtcacacaatctcagctccctgcaacctccacctccaggttcgaccgattctcatgcctcagcctcccaagtagctgggattacaggcatgtaccactgtgcccacctaattcttctattttcagtagagatggggtttggccatgttggccaggctgatcttgaactcctggcctcaagtgatccacccacctcggccttccaaagtgctaggattacaggtgtgagccactgcacccagtcaagactgggtaatttatgaagataagaggtttaattggctcacagttcacaggctgtacaggaagcatggcagcatctgcttctggagaggcctcagggagcttccaatcgtggcagaaggcaaaggggaggcgaggcacttcacgcggctgagcaggtcgagagagggggctggagcaggaggtcgagagagggaggaggtgctacacacttttaaacagccagatcttgtgaacattccatcacaagaatagcactggaggatggtgctaaactattataaaccatccccatgatccaatcacctcccaccaggccccaactccaacatcggggatgataattcgacatgagatttgggcagggacacaggtcaaagcacatcacactgctagctgtggatctgcaggacgctcctggcaggggaggctggctgagggtgtatgggaactctctgtgatatgtctgcaactttttggtaaatctaaaataataacaagtatattaaacacagtaagtgactggatgctttctaccctgaccagtgaacaaaccaccagagaaggcctgtggggctgctgtgggggactgcgggtgcccacaaggacagcagggaggggctcctgagagggaggccaagagctcaaagcacatcagccagaacccaaaacctacagacacgggaacaggtgctcccagagcagaaggcaggaagcaggacaggagcccggggaaaacctaaagcaggagggaaataataaagagcaatgacagaagtcaatgaaaaagaaaaggagcaagcaacaaagaacactagcaaaaccaaaagctggttgtctgaaaagggcaataagacagacatgcccctggcaagactgttcccagaaacaagtgagaaaacgcaaattaaatacagatgaaaaaaactctagacgcgacaaaggatgttgtagacacaccgacatgcacccatacgttgaaaacctcagtaaaacggatccacttctgggggaaaataagccaaaactggcattaaaaagaagtaggccgggcacggtggctcacccctgtaatcccagcactttgggaggccaggagttcaagaccagcctggccaacatggtgacaccctgtctctactaaaaatataaaaattagccttgcatggtggtgcacacctgtaatcccagctacttgggaggctgaggtgggagaattgcttgaacccaggagacagaggttgcagtgagctgagatcacaccactgccctccagcctgggtgacaaagtgagactctgcctaaaaaaaaaaaaaaaagaaaagaaaagaaaagaaaaaaggaggagcttgcattgcattgcttggaacacagacccaaagtaccaacctaccatccctgtacttcccgctaagtgccaccgtaacaaacccaagccacctctggctgcggagaaggtgctgatggaagggatcggggcacgactggtgctgggtgcccttgggctgcttcctgccccatccaagacttggagtcaaggaagccacagcccagaaatgcccagaggcacaggcaaagggcagcccagcaagacagaaggtctcgggcaacagccatctattccagccaacacgcaaaaccactgcacccccagccagatcagcaaaggctgaggagggagcctggactcaaccctggccaggaggcccttcccttccttgccggggtggtgaaaagccaggacattcaccccttctccatcccccacggagtcagtggaggccatgtggaagaggcactgtggaactccttcccccaaggcagggagggaaggttcagggaaggtctgttttccacaccaccctccacagtgtcaatgaggccaagtgcagggagctgggtttccactcctagctggcaagaaggaggcagcccctccacccaacagccagcatgactaggctcccacagaaagtggctgctcacactaagaacaagggaggctccaagctcggtgaagaggggcagcgccaacgctgacagacagggcgtcagaattatttcataaagacagaacagcatcacaaagacacttctacatgcaatacaaacatgctggaaacagaagaaatagaaagtatcaacagagaaaaagaagatacagtagaaccaaatgaaaattttagaactaaaaaatacaataactgaaataaaaaactcagtgtgtggcacaacagctgaatggatgagacagagaactggaagacagaataacagaaattaacccatctgaacaacagaaagaaaataaggtttaaaaaatgaacagagccttcgggaccttgggaccacaacaaaagacctaacattcatgtaactggagatgcagaaacagagcaaaaagaactcaaagaaataatacaaactttacaaatttggtaaaacacataagcctatagattcaggaagttgagcaaacctcagacaggatagaccaaagacatctaccccagatgtcagacaggatagaccaaagacatctaccccagatgtcagacagtgaaagttaaagacaaagaaataatcttcaaagcagccagagagaaactacattatgtttgtttttttgagacagggtctcactctcttgcctagtggtacaatcatagatcactgcagcctcgacctccagggctcaagcaatcctcccaactcagccacctgagtagctgggaccacaggcgcatgccaccatgtgtgactaatttttgtttttttgtttttttttttaaagagatggggttttgccatgttgaccaggctaatctcaaactcttgggctcaagcagtttgcccacctggttctcccaaaatgttgagattacaggaacgagtcacagcaccccacagaaaccacattttacccactggggaaaaattcaaacaacagtggatttctaactagacaccatggaggacataaggaagaggcataacattcttcaagctcaaaagaaagaactgtcaacacagaatcccatattcagtgaattatccttctggaataaaggggaaatcaagacattctctgatgaagaaaaacaatgtcaccagcagtcttaccctaaaaagtggttaaagttctccaaacaaaaaggaaacaaaagaaaaaggcttggcacaacaggaaggaataaagaacaagataagcaaaaatatggataaacataccagactttccatctcttccccagtttttaaaattatgtttgatgactgaaataaaaattataactgtgtctgttgtggttctaacttctgtagaggaagtattccagatggttataaaaggggaggttaagggagatgagggaaggtagggtttccacacttcactcaaactggcaaaacgacaccaccagcagacgtggatcagtcatgcaaatataatataatacccaaggtaagcactacaaaagctatatagtggtcctcccctttccactgtttcactctctgcagtttcagttacctgaagtcaactgtggtccaaaaatattaaatggaaaattccagaaataaacaattcataactttttcttttttttttttttttcccagatggagtttcactcttgttgcccagggctggagtgcagtggtgtgatctcggctcactgcaacctccatctcccgggttcaagcaattctcctgcctcagcctcccaagtagctgggattacaggtgcctaccaccacactcaggtaattttttttttttttgtaactttagtagagacagggtttcaccatgttgacgaggctggtcttgaacttctgacctcaggtgatctgcccaccttggccttccaaagtgctgggattataggtgtgagccatcgtgcctggccaacaattcataattttttttttttttttgagatggagtctttcactgtcacccaggctggagtgcagtggcgcagtctcggctcactgcactgcaagctccgcctcccgggttcacgccattcttctgcctcagcctcctaagtagctgggactacaggcgcctgccaccatgcccagttaattttttttgtgtgtgtttttagtagagacagggttttaccgtgttagccaggatggtctcgatctcttgacctcatgatccacctgcctcggcctcccaaagtgctgggattacaagcatgagccaccgcgcccagccaacaattcataaatgcttaagtgcatgctattctgagcagtgtgatgaaatcttgcaccgtcatgctctgtcctgcccaggacatgaatcattcctttttccacactgtatacacgacctaacattagtcacttagtagctgtctccctcatcacactgactcttgtggtactgcagcacttgtgtccgggtaacccttattttcataaaaaatggccccaaagtgcaacagtagtgatgctaacaatttggataagagaagctgtaaaatgcttcctttaggtaaaaaggtcaaagttctcaacttcagaaaaaaaaaaataggctgggcgtggtggcttacacctataatccctgcactttgggaggccaagacgggtggatcagggggtcaggagttcgagaccaccctggccaacacagtgaaaccccatctctactaaaaatacaaacattagctgggtgtggtggcgggggcctgtaatcccagctactcaggaggctgaaaaaggagaatcacttgaacccaggagatggagggtgcagtgagccaagattgcaccactgcactccagcctaggtgacagagctagagtccatctcaaaaaaataataataaaaataaaaatacaaaaattagccaggcgtggtggcgcgtgtctgtaatcccagctacttgggaggctgaagcaggagaatcgcttgaacccggaaggcagaggttgcagtggacagaggttgtgccactgcactgcactccagcctgggtgacagagcgagactctgccccccctccccaaaataataataataatataatattctgaggttgctgagatctacagtaagaatgaatcttctatccaagaaattgtgaagaaagaaaaaaagaaattaatgttaattttgctgtcacactgcaaactgcaaaagttagggctacagtgtgtgataaacgtttagttaagatttaaaaaggcagccgggcgtgatggctcatgcctgtgatcccagcactttgggagacctaggcgggtggatcatttgaggtcaggagttcaaggccagcctggccaacatggtgaaaccccgtctctattaaaaacataaaaattagtcaggcgtggtggtacacacctgtaatcctagctactcaggaagctgaggcagaagaattgcttgaacccaggaggcggaggttgcagtgagccaagatcaagatcacactactgcactccagtctgggcgacagagtgagactctgtctcaaaaaaaaaaaaaaaaaaaaaaaagacttaaaaaagcgtttgatttgtgggtggaagataatagaaacatgttccaaatgatggaattgggttccatgacatctatgggttcaggtatccatgagggatcttggaatgtatcccccacagagaagggaagactactgaataaagatctatattgaaaaacactataagtaaatcaaataaaaattctaaaaagtgttcaagtaacccataggaaggcagggggaagaaaacccacagggaaaaaaagaactaatagaaaacaaaataaatcaaatgatacacttaagccctaatatagcaataaccacattaaatgtaaatgtcctacatatatcaactaaaagacagagattggcagagtgaattttaaaacatgattgaactatctgctgtctacaagaaagtcacttcaaatatgacacatatatacatttaaagtaaaaagagaaaaaaagacatgaaaacttgattcaaagaaaacaggcgtggctatattaatatcagaaaaagatgacttcaaagcaaagaaaatcatcagagacagaaacattatataataataaaagagtaaatcgatcaagaatgcatagtagggccacacttataatcccggcactttgggaggccaaggaggaccacttgaggccaggagttgaagactagcctgagcaacatagcaagaccctatctctacaaaaaaaattttaaaagtagccagacatggtggtgcatgcctgtagtcctagctactcaggaggctaaggtgggaggatcgctggagctcaggagtttgagcttgcagtgaactgtgattgtgccgctgagctacagcctgggcaacaaagcgagacccagtctctaaacaaacaacaacaacaacaacgaaaagaatgcacagcaattctaatgtaaatgcaccaaacaaaaaagctgtaaaatacatgaagcaataactgttagctatgaaaggagaaacagacaaatccacaattatagttagagacttcagcacctctctcaacaactgaaaactagaccgcaaatcatcaaggatatagagaactcaaaagcacctttaactagcaagctctattagacatttacagagcaccaacaacagtgggatatacattctttttcaagtacacatgggacatataccaagatagactatatcctcagccataaaacaaaccgtgagaaactcagaattaaaatctgtatgattttaatcaatacagatcgaactagaaatcaatgaaagaaaggtaacaggaaaatctcaaaacacttggaaactaaataacacacttctgaataatccataggcaatactctggtttctcttcagatcatatgactcttatgccttttactaaataatccatagggcaaagagaaaatctcaagggaagtaaaacaaacaaaaaaaaatcacaggagctgggcttggtggctcatacctataatctcagcactttgggaggctgaggcggatggactcttaagctcaggagtttgagaccaacctgggcaacatagcgagacctcatccctataaaaaaatacaaaaattagccaggtgtggtagcagggacctgtagtctcagctacttgggaggctgaggtgggaagcctgcttgaggccaggagtttgagaccagcctgggtgacagaacaagaccctgtcttacagaaaatttaaaaaattaatcaggtatggtgatatgcacctatagtcccacctactcaggacgctgaggcaggaggattgcttgagcccaggaggttgaggctgtagtgagctatgattgcaccactgcactccagcctgggtgagagtgagaccctatctcagaaaaaagggaaaatattcaaattattcaaatcaataatctaagctcccatttcaagaatgtagaggaaaaaaaacagcaaaataaaccacaagtaagcagaaagaaagaaataataagagcagacagcccaatgaaatcgaaaacagaaaaccaaaagagaaaaatcagtaaaacaaagaatgggtactttgaaaagatcaataaattgacaaacctctagtaaaacagacaatgaaaaaaagaagtcacaaacttccagtaacagaaatgaaatttccagtatcactgcagattctgcagacatcaaaaggacaattattaaatacttcaaacaattatacacacataaaattgaccacttagatgaaatggaccagttcctagagatacacaatccaccaaaactgactgaagagtagaaaatctaactagatctacacagcgaggagactgagtcagtaatcaaaaatctcccaacaaagaaaagcccaggacacagctgggtgcagtggctcacgcctataactccagcatttagggaggcagaggtgggaggatcacttgagcccaggacacagctgggcgcagtggctcacgcctgtaaccccagtatttagggaggcagaggtgggaggatcacttgagcccaggatacagctgggtgcagtggctcacgcctgtaaccccagcatttagggaggcagaggtgggaggatcacttgagcccaggacacagctgggcgcagtggctcacgcctgtaaccccagcatttagggaggcagaggtgggaggatcacttgagcccaggacacagctgggcgcagtggctcacgcctgtaaccccagcatttagggaggcagaggtgggaggatcacttgagcccaggacacagctgggcgcagcggctcacgcctgtaaccccagcatttagggaggcagaggtgggaggatcacttgagcccaggacacagctgggcgcagtggctcatgcctgtaaccccagcatttagggaggcagaggtgggaggatcacttgagcccaggagttcgagacttgcctgggcaatatagcgagaccttgttcttcaagaaaaaaaaaaagaaaaagaaagaaagaaaagaaaaaagacagaaaagcacaggaccagacggcttcactggtgaattctactaaaacatttaaaagaagaatcaacaccaattcttctcaaactcttacaaaatgtttaagagaaggaaacatttcctaattcactctgtgaggccagtagtaccccgataacaaaaccagacaaagacactaaaagaaaactaccaaccaatatattttatgaatattgatgcaaaaatcctcagcataacattcagcaacacattaaaaggattacacatcaagggccaggtgcaatggctcacgcctataatcccagcactttgggaggccaaggcgggctgatcacctgaggtcaggagtttgagactagcctcaccaacatggcgaaacccgcgtctctactaaaactacaaaaattagctgggcctggcagcgcgtgcctgaaatcccagctactcatgaggctgaggcaggagaattgctccaacctgggaggcggagtttacagtgagctgagatcgtaccagtgcactccagcctgggcaacaagagcaaaactctatttcaaaaacaaaccaaaaaaaggattacacatcataaccaattactcccagatgcaaggatggtttcatacacaaaaatcaattaatgagattgtgactgactgtgattcaatgtggtcagagtcatgagctgaccaccttaatagaataaaggaaaaagaccacaagatcatttcaattgatctacaaaaaggcctgacaaaattcaacaccatttcatgtttaaaaaaaaccaaaaacctaataaataggatagaaggcaacttcctcagtgtggtaaactctatacataaaagcccatagcttacgtcatattcaatggtgaaaaatgaaagcttttcttctaagatgaggaaaaagacaaggatgcccacagttgccattttaattcaatatagtattaaaagttctagccagaggccgggcgtggtggctcacacctataatcccagcactttgggaggccaaggcaggcggatcatctgaggtcacgagtttgagaccagcctggccccatggtgtgaccctgtctctactaaaaacacaaaaattagctgggtttggtggcacatgcacctgtagtcccagctacttgggaggctgaggcaggagaatcactcgaacccgggaggcggaagttgcagtgagccgagatcatgccattgcactccagcctgggcgacagagtgagactatgtctcaaaaataaataaataaataaataaataaataaataaataaataaaaggcatcccaattgaaaaggaagaagtaaaattatctgtttgctgatgacatgatcttatatgtaagaaaaccctaaagaatccacacacaaaaaaagttagaataaagaaattcaaccacaacaagtggtggggagggtgtggagaaacgggaacccgtgcgccgttgctgggaacgtaaagtggttcagccacaacagaaaacacttgccgattcctcagaaagctaaacacagaattactcagactccagcaattccactcctcaatatacacccaaaggaagtgaaagcggggctcaaacagatacctggctgtcaggaatcactacagcaccagtcacagtagccacataaccaccagcacacgaaggaactaacaaaacgcagtgcacacacaacggaatgttactctaccataagaaaggaatgaggtgctgctacacgtgtgaaccctggaaacattatgccgggtgaaagatgccagacaccaaaggacagatgctggatgattccactgacgggacacagctagaccctggaaacattacgctgcgtgaaagacgccagacaccaaaggacagaatgtacgattccacttagaggacatagctagaggaggcgccttcactaactagttaggtgtctaactagggtttgggaagcggggagtggagagtcattgctgaatactcagtgtttctgtcaggagtgaggaaaacattttggaatgtttccacggtgttgtgaatgtagttagctattgaactaagtgccattttgacgcttaaaaatggtcaaaatttatgttatatatattttaccacaattaaaaagtaacacagtatataccaaaaactattgaattgtacactaaaatgggtgaattatgtggtacgtgaatcatatctcaacaaagctgtttttcaaaaaaagataggaatggcccataagcacccaggtgctctgcgcatccaggccatcagggaaatgcaaaccaaaaccccagggatacggcacgccacgcccaccagaacgggtgtgccagaaaggcagatacccagagctagcgaggaagtaagcaagacgaaagccttgctcgctgccggcaggagtgtcaaacagtgaagccgttttagaaaacaggaggctgttaacctagagtgaccctgtagccctgcagtgaccctatggccctgcaattccactcctaggtgtctacccaagagaagcaaaagcatcggccacacaaaggctggagcgcggacattcgaggcagtattattcacgacagcccccaactggcaaccacccgaacggacaaagaaagtgtggagagcctctgcagcggcttgactctgtaataaaaacgggtgcagcgctgaggtgctgcaggacagacctccaaacatgatgcaaaatcaaagatgccaaacaaccatgtactgtatgattccagcaacacgaaaggcccacagaagaaacttaccgagacagaagtggatgagtgttaggggccgggactgatgatgaaaagagtgagggaattctggggggcgatgaaaacaactgaaagctgcgctgtggtgcagctgtaccactctaagtttactcaaacccacagaaccatacacctagagcagaggaattgtgtgggagggaaactgtacttcagttaagctgctttttttttttttttaaagctgacaccacagatcaaagggttagatcaccgttgagggaaagcacccacgacatgaagaaaaactaagtgaggccccacctcacacaacacgcaaatgaagaacagcaaacggcagccgacttgtagggaggcctccctgtgccagggccacccaggacactgccaggcccactgtggccccctgaagagtcgccacgaccctctgagataggcagtgccgttatcccgactgtatataaaaggagactgaggccagaggaggaagtaaccgtgcagggacaagcgacacccacagctgcctcttgagccagcatcaggcaatgcaggaggcactctgtgaccatgggtggagactggtcctaaacaagaccccgagcacaaatcacagggcaaaggatgtcaggaccttgcctcataaaggacgaaggattcggcctaacaaagggcagcactggcgaaagcaaggcaccaacagagaagcgctgtatgtgaacaaaaccaagacaggcgctgtccagaggacacaggagcccttgcaagcctggaggatgaaggcagggtgtgcgtgaggggaatcccaggtgactcaggtctcagctcgcacttggggagctgaaacccaaggctcagccagggccttccctctcccgacagctccctgcagacaggcaccaaccacacacagggtgtggggaaaacggcagcgcggaggctcacggagcaggcactgcagatgcaggagggccaaggtgtgcaggagctctcaatgcagaggtggggatggagtcactgtcacccctgcacacgtgcacacgatgctccccagccctgtgcactgggggcgctggcagcagccaacaccctagctgcaacaagcacacgcagcgcccagaccctgagtcctaaacacacccagaaggaaccagggcgccctgcaggagcagctgtcccacctagagccaccaggagcagcgcccagaccctgagtctctttttttttttttgagacagagtctcactcttgtcacgtaggctggagtgcagtggcgcaatctcagctcaccacaacctccacctcccgggttccagcaattctcctgcctcagcctcccgagtagctgggattacaggcatttgccgccacaaccggctaacttttcgtatttttagtagagatggggtttcaccatgttggccaagctggttttgaactcctgacctcaggtgatccacctgcctcggcctcccaaagtgttgggattacaggtgtgagccaccgcgcccggcccagaccctgagtcttaaacacacccataaggagccaggagcggctgtcccagagccgccgggtgctgggagcatctgggtgccagaaagcaagcaagggtgcagaaactgtcaggcacatcataagggcaggagccctggcagggcagcatattaaaaggggacggcaatggacacagccggacacacccgtggacaaacaggcgagcggtgagcacggaggagggaaaactcttccgttcaaggacgccggccgcggatcagaatttgacagcagacagacacagctggctattaagactaaggggagaaggtggagttttctagtctcagagtctccccccagcaagacgtatcagccggggagatccctttgacaaggatggagcgagcgcctgaggcaagggaggaaaacagcgctgcaccaggacagggacgcctactggggaggactctgcgtctccgggtctgggcaggacgtggcagaccccgcaggtgtgtacaaacaggcagtctgaagtcatccccgtcctgatatctaggagggcaggcggcatctggcagaggttgacccctgagccacagccgtggccccccaaaaggggaaggagcggagatttactcccagcctaaattattcacaaggaaagggaatgtggctctttaacaagccatcgctttatgaagcaaggttaacaatttcacttgattcagtggaatattataaactctctggggcccatttgaggacttctacttcaggcgcaaggtgacgattcagcacttttcacattatttagagaataaaattaaccctcgcaggcccgggctgccgcctgtccccgctggatctggccggctcagcgctttcccatatataattacaagctgctatccatcatgcgggcgccgcggcgcggacacacggaaaggcagcagtaagcacttccactaatagaagcaggacctaaatatcactttgatattttcatttaaatcgaaacattttacaataatcagccatggcctccatggggatcctgccactgcccccacagggtctggggctgccccagccaggccctacctccccggaggggattgcctgccaggtttcaggttggggagcccggcctggccaacccttggcccggcagcaggggctgcaggctgactcctcctgggaagtgggtgtgaggactgaggatgagggagaggatgcttgggaagggcccggcccaccacagaacgctgtgcacaggaaggagtgcgtggcccagcttctacaggaccccacaggtgaacccagcaagggaggggcaggagagccgccagagcttcgggcccggtgtccttgcgggtgggctgagaaagggttcctggggtgcctggtgttctcggcttcacgggggctgcagaccctgaggcagcgccaacacaagtgtgaggtccaggtggcagtgagccgtgctgcaggccccggggctccctcccaagatgccagggacaaggagcatctccaggtcccccagctctggcccctccccagcctgagccaggaggcccccagcctcagccacaagccttaggccaggtgcaggagcccccagggcggggagagaaacaggcgtgagaggctggggtagagggggcttgtacccgggaccaggcccactggagatgctgaggccacgctgcttgtggcggggagtcctgctgaagcccaggagggcaggtgaggcagaggggaggagctggctgcactgccgggaacttcccagacaggtgagcctgtgagtgcctctgcaacacaggagtcagtcatgcccctaggaagaggggagccgcagccatcagctacagcccaggtccccaattctccacccagcagtggtgccccgcaatgagctccagcgccagctcactccacccttgccagccacggctcaggcggcccccttggctctgcctggcccacccctctgccccaggctgggtgggagtgtcccgtccaccccctgccttcctggggaggctgctggccccacatcctgcagccctgcgggctccctggcctccaatatccccttcactgcactgccgcccccagcaacatcccaggagctgctccggcccagtcaccacacccctaccatggggggccagctcctggggctaccagtgctgcacctggaagtctaggtcctctgcgcctcaccttcccatggttcaaaccccgccctgtgttggtgctgtgcaaccccgggaaagttgctggacctctctgagtcacctgtgaggtggacgtgatggcactgaccacctcagggctgcagatgggtcatccagccaccacggcaggtacccaggagtgagcagaggaccaacaagccacaggaaccccgcccactcgggcccccacagaccactcacctttgcacccagggggcagtagcctttgaggaagtcgctgcagacctcggccttgcgggacacgtacacgtggctatagggacagttgctgttgctgcagatgcccttcaggaagtaggagcacaccggcatctgcagggagggccggcagtgagggccagcaggcagccaccctccagggcccagagacggtggctggggaccctcctacggccccgcccgagagagaaatggacacgcggcaccagcaggcaggaagggcagccaccacgacctgcggggcagggaagctgctgctcagaagtgggccccagcctccccaggtgagccacacccctgccgtgctctgtccagaggaggcatggagcagccctgtagccctgtggctcagcctcaggggcgccctcctctgagtccctcacctgttctgagcctgcccaccgtccagggcaagatggcagccagggctcccaaccactagcctgtggccagggctgcccttggagcctctcaggccatggggaccagtgtctaggtgggaggacgagccacgggccagcagccaacagagggctctccctctccaggcacctgacccgtgggccacaggcagtgtccctgggctctaggtgggcaggagccacctggaagcagggctggtgtggcactggctgcaggccagcaccgtggaggccaaggctgtcagcaggaagggtccagcagcgtcttcctccccagcacagggccgctggccacagtcagtgcttgttatcaccactgggctgggagagggaaaaaatgtaactttcctcccatttgggggaacctcaggcctaaggagcaatggctgggctagggccacccagggagggaagcagggggtctcttgccatctccaggagacatctccctgcccctcatgggccaccacgggctcttcctgggctgcctgggtgtccagaacaaggatgtcaccgtccagcctcagcatggagcccccacagagcccctgccagcaccccagggtctccagtcttgccccaggctattcccgctcccctcccagggccttcctccctcctgggtcagaccaccctccctgctcccactacccttgtccccctccccttcccagcctgctcagagctgctggggcctgaggagccctgggggatctgggcagacccagaggctttaaaaagtcacttttctggggcaaggttggggatgggaaaggaacttgtctaaggccaaggagggaagaaggggtccagagagccagcggccagggctgagagggagggagggagaaggcaaagaaacaaagggtgatttaacgagcgggagtttatttctaattgtcttttaactgcagccgcagaggggagaggggctgggggccgtttggggctggcggtggtgggctgtagacaattcccttaatgtggtttttgatatagagcccaaattagctctaataaaaagggatgataaagccaactctacagcaaacggagctcctcttggctgtcagagcggggctgttatcaagaggaaactgcattctcatttcaattaaccttgtttgcaccccgccacgtccacacaaataacaataacattaattcagggcactggtgcggggcgtccacattagacagcttggaatgtgctctggctttggagctgggagctaatgaacccgaaactcgatgtgaatttccaaattgctcacaacagagttccgaagctctattagggagaaaaatgctgattcttttcaagttcctcaaggggaaaagctgttgcggcagcagcacccctgcccaacaccgcctccctcacccaaggcagccctcactccactcgcatgctgtggtcacaccgtggctgagtccggggcacaggagctacacatgtcccccccagccccagggctctcttgctgcttcccagcaggggacccaccttggctcaaagcaagtctgttgggtttcaggccgcggggacaaccacatgagccaggagtccagctgttctccctccagcccctccctcccgccctctgcccaggcagcctctccacccagccccctcacatacagcttcccccctcctgccaaccccagtctgaagaggccctgaggcctcagccctgggtccacaggggcacctgtgggaccaccttcccctaggcatgtgtaaggggggcctggggatctggtgaggcctggtgctgccaggagaagggaaaagagacccctgtgcgtggtgagcagagaccctatcagcgctgctttccggggaagaggaagcccagctgcaaagcctgcaatggggtagagacggtacagcagactctaaggacgccagggcagggatctgcatgtcccaaacccagagaaagctgtgggcaccatctgcccggaggccaggtggctgaggccccggagaaaggtgcacgggagcagggccaccagcgccgcactcaccttctccttggacacatggtgggagaaggggcaggtcccatccgttttcttgcaggtgccccggacaaacctgcagcaccaggagaaacgggtatgaggaagggccggcagggaccaagggcagggccctgcacagaacctcccccaggcccacagcgagggcaggagggcacctggtgcacacggccaccttctcgggatcgtggatgtaggggcagcgctcgccacggttgcacctgccgaagcggttgtagtacatgcagtactccttcctcttctccctgcgctgccgcgcctgccggatgatggccaggctgcgctgcactgcccggctgcagacggggagagaggtgcgtgagcctgagggcgagcagggagcccacccactgcccagcccaaaggcattacctggccagggaacggctacagctgcctgcaggatccagccggcctgtgggggagagaggcacgggtcatagcaggccacagcctggcccgcacgccctttccctgctgacccccttagtcgaggccctcaggggtcccaacactcagctcaggcacagcctcccctccaggaaactgcccagagctcccctccccacagtggttcagatgccctgggccctgccaggcccctctggggacacagcacctgagagtggggagctgctgggccctgtgtctagctcctctccagggcagggtccgggcagggctcctgtccctgccctcagagccagcaaagccaggcagcacccgcggagggcttggccacgtgggctggagacgcccgcctgtccctgctgcctccctggccaggctccccagggccacgctttgctggctggaacccccctgctggcttcctcatgtccctgggtgcccaccctgggccaaggcagtgactggcctatggacactgctcctggctctctcctcagccctggccacccaggaagctgccctgtaaacagaacagctgctaacagcagcacctccctctgccagggcctgggctggcaggacccgcggggtcacttagaccagggggtgaatatggcccatggggcacacatggtctggccttttgggagcaagaatggcttctgacttttagagggctataaaactaaagacatgcagcagagaaggtgtgggggcaaagcccgcttggcggaggcatctgcccagctgcccactgcagctgtggaggtctgggggaagggcacctgtccctgaagccctgggctggcgctggcagatcctggctagtgtctgttactctaaattttagaggtgcctcatcagatgctcctcaaaaccccaagcataagcaccacccccgcctttctgaaaccgcacaccacggcctgggagggcggcctgggagtgcggtggtggcaggaaggaaatggaccttggggctggacatggccgagtgctgccaggcctgagagccaaggggatgaggcggggagggggtgccatctggaggaggagggtctgctccggtgacacagccctgcctgccttttacagacagaggtcacccaggatcacggggtgggcagggcaggaccagcctgctgagggcggctttcccgggttcctcaaatacgcgcatgatccttcccagaccagatccaatttcctacagggcaaatgctgaaatggacactgcagttaagaggcagaggtgacatcactcagaaattctggggacctgaggtggtgacaaagccatcctggtttaaaaagggatgtcccaaagccgcccagccccaaatagccagacctgccccactcttgagcaccagagagcagcctcgtcctcactctcccagatggcccagcagccgcagactcccacccgaggacccaaggcttccgctccctcgcacccccaggctggagccccccccactcctcgctttgtgctttgcgtccagcccagtgctccctagctagggtcagtggtgctgctgcccttcaccctcaggggccctgcctactgtccccactcagcccgtctcaagtttcaaaagggcagctccagagctgagtggccagcgagcccggctggggcaggagcaggagctagtcatggtacctggggcaggaaagggggcgttgaagaacgcagaaacctgaggcgtgtggggggccaggggcaaagggagggtgatgagggtcttggtgcggagggaccaacgcgggggtgctcagggcagcccccgttctcaggccgggacccttgtccccgggtgggcagcagggcccagtccagacggcacgggcacgccctcacacctgccagcctgtggggtgagggacgcggcaatgcggcggtctgtcggcactgctggttcccagtctctcgcccaggctgccagtgacactgcgacgccatctgctccaggcagggacacactggcatcacgtgcccgcctggcaggaccgggtgcagcaggaggggttacctccctttccactttgtgctctttaaaaaaatgccagtgtgaggctcacggcaggagttctgacaagaacaggaggcactttttcaaatgctttgcagtgttaaaaaatgcacataaaatagctggctggaaaagaagcaagggctgcctgagaagtgctaaaaagttcaactgaataacccccagcagctccacagcagaaggcgccatgcattccagagaactttcacttccccgggatcttctcagaatagactcggctcccaccagccccaccccctgctcggtgccccagtgccagctctgggcaccgctggatgtcaggctctgcaaggcaagcggggtgggggccttgcagtcagaggttcctcagcacctccaggccctgctccggccagcacccactggacagctgctgcctggcccaagggacaacatccacgatgaccggggcacgcaggcagccccaattcccaggccagcactctcccaagaagttaggcagggctgcgccaagccctggtctgctcacagcgcgcccaccaggccctccagggcacgtccgtctggcacatggaggctgtgcccttgggagaaggcagccagcggcagagggtgccccagaagaggcagtgtggggcgggggcaagccgacagggccttcgtcaccccagggagggtgggcaggtgaccagcaggggaggcgcagaggccggacgtgccaggaacacgcagcagctggcccacagcagggagggccacggccacaggtggctgggggctttggggacacagaacaagccaaggccagccctgtggccagagactggggcctctgccccaccacaggagccatcaggctcatggtggccacatatgggccatgctcactgggggcccacacaggattctgtggggagggaccctggagctcaggccttcaggtggcaggcgggcccaggagggagggctcggcttcagggactggggaagctgggggtagaagccatactgtcctctgccgtcaggggcccagagcccagggggtcagccaggacagccacccccaccccttccaagaaggctgctgcactttcttgttgaagtcaaatttctgctgacaccaggggaggaaatttatttctttaattattattcctcttaagtgggctggtcagcggtatcccacagctgggagccatctaccttcctcatggcgaggcggggccggtggtggcccaggcagctggagctgtggcctcgcctgtcgacccaaagggcgagtgcggcctcactgggctctgcacagccccaggactgccacagtcgccaccaaggctggccagcgggacaccggaggccatagccctactcgatggcaggcgggcctccccaggggcaggggtgggagcaaggaggcccctggacccctgcctgccctggctggcaccagcctctgtgcgccagaccctccttgctggcgttgctgaggctgaatgaaggagttctgggttgctgctggtgcaggggtgagacatgccccagaagggctgggggaaccagactggctctctgatggctctgggccaagggaagggccaacggaggcagaggccagtcagcaagggtggccgggatagactgttcacagtgtggtgacgtcaggggctctgcgcccgccagggctctgccatgtgtgtaaatggcaaggcgagattctgcggagctcagcacttggcaccgacggggagacacagcagcaccacagcctcccagggaggagtgtgcagcccctccctctcctccccactgctgagcgggccagggctatgcactccctcctccccaaagctcagaccctgggccatccgggtggtgggcaccgtgtctgagggggccaagtgcaaacctgctgcctgccacaggcgtctctgtggacactgagggatgggagagctgggatggcaggtgcacctccccacacaggcccacccagcccaacaaacgtgggccacaggatcccggcgagggctgagacgacccaagggccccggtgcggggagacggacccatgccacaagcccctccgtgggtcccgcgggtgcacggtgcagggagaatcccaaggacgcaccgcgacctgggtgaacaggcggggccagccttggccctgtgcagggagtgggatgcagctgctgcagtgggggccactccctgagtgggtgggtcctccctgggatgggctctggctctggaaagggcagtaggcatcccctccctggctccagcttccgcagagcagggcagggcctgcagactgactgccaggagcagcctctgctgcctatcctggccgcctggggctctcgcgtacgtcaggacatcatggtctccatggctgctgtcttggccacttaattatcaacctcagtcagtactactatcgtgactaccgggagctttctgaatgtgggtgcagtggtgccaggtagaccccgcctgcccccaacccatctcctccccctgctggctgtgcacagggtcctgcgatgcctcacgccccctcccactcctgcccaggcctctgcatggcggcctcaggatgctcttgctgcttctgtcccttctgggccctctcagttttcagctcatgagaaaggcctccctgaccacctgactggacacgagtctgcgtatttacacctgtgggccccaggaatcttcactggtgttcagcccacgcctctccctgcactagggacgtcagaggcagcatccatgggagatgcagggcaccctcccacccaggcaggcaggtgagggctcggggtgcccttccctgggcagagggatcagcctggctgctctgcccactgcctctaggaccagagaggaaagccagtgccaggactgtgcctgcagtgtcagtgcactcaggacagtgccagccaacgtggggcttggcctctgccaaggaggcccaggggaaggtgggaccacccggcatgagcagagaggcacctcatggctttgtccctgggggtcaagcacgatgtcctcagagcacctgctgctggccccgggagctccactggtcagggtccctgttggctcacatggctggtggctggtggacggccacaggcgcctgggacctgctgtgccagagactggccaggggcttatacttcactcagggaaatgactgctggagagaagcccgaggcccctcccctccacgatacaaacagctgtgtgtagccccacaggccaccaagctccagagtccgaggatcagaggtaaccagagaaggccctgctgggtgacaggaaggcctatcccccaacccacggcagcatcccccaggggcaaagcctcaccaaggcccccatgttctgagccagctcctgcactgagcacccggggtgtagcagagatgagaccacacgcacaaatcacacagcccagtccctcaaggtacgggtggggaagcggaggcacacacaggggtgacacagtgcccaggaagggacccagggcttctcaccagatcctcagtgagtgggaggcacacacaggggtgacacagtgccgaggaagggacccagggcttctcaccagatcctcagcgagtggggatttattcctgcccagttcaccaggaccccccagccccagccaccaggctacaggcatggtcatgggcactgaccagccacagtgtggctcagagccctgtggggcaggtgccagggcccccgtgctgctcccagcgactctgcccaggaaacagcccagaagcccctggagcccagagatggatgctaggaacacagccaggcagggcggccagtgaggctggcttccagggaggtacgcttcctgcctctcctctgacccccgcagaccctgccgtcggagtctacctcctccaggggctgaacctgttctctctctaggtcccaggcgggtcggggagccagcatggcccagcctctgcaatcccaacaccacctgcaatctccctctttttttttgatggacaagaaagggggtaaaattggactgaaaccaaaatatttttctagttaatttgtaggataagtgaatccaaagcatttccttctcctgagcctgtttccctgggctgggagggcgcaaggtggcggcgccggctgcctccagacacagttgtcgaggcgtcgccaatgcgattacgggcgccgcggccccaggtgtgcgctcgcccgggcgtgtttgccgtacctggcatcatcctttttccaaaagcgaaacatggtgcttgtgagcaactctcccccaccccacagaaaatcaggggccgctcagccacgcgaggtgggcgccactccagggcccttcctgggggatggcagaggaaggcctcctggcaccctccattctccggctgccctgttggtctcactagggatggctacgaaggcgccgggtgtatggaagagtgaaattaactcccaggatgggacgtgacccatttgggaagtgcttgtttggactggctccctgggagcatgaggcccctgacctcctccccaagacaggggcgtgagccaaggcccagagcagccacagcatgttggaggttagggggtctggcctgcaatgcccaccacacgctagccggtcggtgtcatctcccagcgcccccgccctcacctctcacctgtgcgcaggaggggcctgctgcccgcatcactgggctggccggaggtcttggagagcttgttggcagatactttgtagaggacccctccgatgcagcggtagcctttgctccgccaccaaggggagcccggttgggctttcccacccccgctggcaactggacgcaggcggttcagcaccagggacctgcagagacaggaaatgcccgtcaaacctggccccaggacagactacagctctgatggtcagtgccaggggccgagcccaggcctggcctcccaagggggacagggagcagcacttgcggtgggtacacactccagctgggtgaccacgggccattggcccagctgccaagagacctctgtccccctctggcccccaacccccacctcagggacattttggccgtcatcagggaacactgacaaggagtcccaggaggtggcgcccccgaccccacccacgaggctgggaactcatgcgcccctagaagccacggtgagagggcagcgtcgtcctccagtgcacacctccccgtggatataaccacccctgggccctgaccacctggctgtgtgctgcagggtaagggtccctggggctgcagggcagaggggctgcaaggtgtctgcgtgttggtgagaagcacacctggcccttggcacctgggctgaggctcccttgagtcggcttcaaggctggggctatttctaccaaccggccccagcacataccaccctggccgtcaggaccacagacaccatagggtcagcaggctaccctgcctcttctcctcctccaccctgtcctgcctccccttcatccacagctcagagagccctgcactgagagggcatggggacagcctcacagaccccgggccaggctgtttgagggaaatgctgatgttgcctcaagtccaagggctgaagaggccgcgacagcccctggagttagctgagctgatgaccctggctagaggaagagacctaggccgacagaccctgagccctggcagcccccactcctgccaaatactccacagcctccaggaagccaaggggcagagtaagacaagaggggcctgagctgcactccagaggcacctccctgcagctgccagccacacccacagccctgcggaccctcgggcaagcagcccccaaggtggggggctcagggcctggcaaattgagcttgattccacatgagctcacgctctgctcaagctgccatgacccctgaggtggataccacacccccagcaaatctgggcaagacatttttgggcagccatgggtgcgcaggcagcaaagggaccagtcaagtgggaggcgaggacgggcagctcaggcctggcacagggctgtgcccctgctctacgctccccatcccacactggtccccatggccctgcagctacacagccctctctgctgtggagtacctgagccccccaacccatccacagccgcaggagacccttttccagctggtctgggccagggtggggtgccccctagacccaggcccgcagcatgcatgaaggtggggctcgcttgtctggctggatggggcaggtacagggggacagcagcatatccatcaaagccacccacgaggagccaacagacctggtggtactggggatggagcagcccttctgtcgggttccaccgccatccccaccactcagccctgcaacccctccgggccttggtccctctgcctgcaagctggggtaattctcagcagccgggggcctccaagggcccattagagagagaatgggagcagagagagcccggtgccggggatgggagctgcagtgtaagtacaagcacggcggctggagcacttaacccagtttcctttaattaaaattcaagttcacaaacaccaatcttggcgggaaagagcccaccaaggggcctggcagtgctgagtggtctgctggcccccacctcccacctatcctgtctgcgccctgcacactccagctgctccccaacccccagccgggcactgtctgggccagaggggtggagggtaggcatcctgccagccagactcagacctccaggctctcatcagaccctggggtcccagtgcagccccggcctccaggtgcctgcaggcccagcaggtgcatggcctgtaccttcagcttatcctggcaccaggcctggagggaggcaggccaggcaggacctcctgcaccagcctctcagttggagaaccccatcagcctggggggctcagaggcaggttctgaccttccacaggagctacggccactacctgggggacactcagcttgaccccaaatcccagtcaggctgagcccagggccctgcaccagccccacagtactcacaggcctcaggggtctcaccattgggagggtgagggggctggtggccagggtgcacccccccaccgcagcaccagccactcacagagcctctggccatcatacaactggggccaaagctaactgtggtcctcgccccggaaaggctgctcagggccagcctggacttgctcccgggagcccccagctccctgcctccccacaggctccagtgagtagatggtaagtctgcactctcgggggaagcacccaatcctgcatgcctgaccccgcccacggcacaggctgggttcaaccctggccgccacaaagcaggaaggacgagcaggcaacagagccaacccagctctccacctgggtccagccaggactccctgaggagatggttgggagggaggcccagaacccaggtgtgcaaggactcacctgcaggagtgtccccctgactgaggctcacatggggacaggccaccacccactcactgtgtggctctccaaaggcacccggatggagggcgaggcccgggctgcagcacttgctcccctcccccaggggcagccacagctggccaggcccagggaagggcccgtggggcagaggcatcagggcctctgggggtcagcaggcactggaagcttccaggaccgccccacccaccagggccgcccctcagctctgtttcaggacctcggcctggctgggcactacagcagccatgcccccgctccttcttatttttttgtttttttgagatggagttttgctcttgtgacccaggctagagtgcaatggtgcgatctcggctcactgcaacctccgcctcccgggttcaagaggttctcctgcctcagcctccagagtagctgggattacaggcatgtgccaacacgcccggctaatttttgtatttttggtagagatggtgtttcaccccattggccaagctggtctcgaactcctgacctcaggtgatctgacggccttggcctcccaaagtgccgggattacaggcatgagccactgcgcccagccgcccctgctcattctcatggatgaacatgaacaattagcttgtccccttctcttccctcctaaaaaaaacaccttactggagtgtgagaacacccagaggacattagaggatctgggcggaatggagatgtggcagcccctgctgagccgtcccgggatctgcgcccgctcttcatgcttgggaatgttcccagccccccactgcccaccatagcctgggagcccagggcctcccgggaatggggcagggcgcttcctggtgctcagcacacctagcccaagagcctcattccgagaagctgcatcctgggaagatgctgtggcagaacgtcgggcctgtgcaggttggcgggggtgacggagagctgtctagggttgccctcacccctgccctcgccctggctgcctggctggctttggaacctacagcaggagggtgctgggagggcatggggcgagggccttgtagcttttcacggccgtgggtgtcacagcactccagtaaattgtgaccctaatggagaggatggcctttggaaacgaactgcattgagaagggggatgaaattaatgagataatagcagggccaaggacccggagcgcgcgtctgccctcacggaaggctctgtaattccttttccgcaacgggagctgcagatctaaaggcctctcccatccgtccggcaggcccacgctgccaggaaatttcattaacgctggaaaataggaaaggtattaagcgtggataatgaaggccagggagggaacagtgccttaagatagtcttctttctcgcctttgtaatgggaggcatgaactttcccttcaaatccatttctaatccatttgaaatactacagcaaattatctttccttcagcccaaaagcagccagccaatttactccgaacagaagtgacaatgccccaggatttatcaccataaccttgactacaccagggcgaggctgggcctcccctctcctccctggggggggacaaaggccaggagggggagataacattttaaatgaaaagcagcagtaatggggagaaagacacacacactacaaaagcaggtgtatgaagaagctgtctgtgcagtactgccttaggagtagctggaaacttgcaggccagaggctgcccgggctggcgaggggcaccacaggtgcccagagggctgagcccaggccctcctgtctctgaaagcccctgtcctgcctcagcctgggcccctcggacctgctgagtgctgccagcctcgctaggcacaggtagcaacagtgggggccgggcggacctctggctctcgaccctcagggactcctgtcacctgtccccaggacttcagtggtgctgggggcctgggcaagatgggagagaggctcactctgaggtcttggttttcctgaaagcccaggggcaaacctggtgcatcccctgccggcatccacaaggcatgcccacgcacagcctgccagctgccaggctcccgggcctgcaagccctggcctgggccactgctgccaagtggcccatgcaaggactctgaggaccaaccctggacacccacactctacccactccgagggcactgcccgtggcaggtcagagcagcccccgcgccatgtcatgtgggccgtgcaggctgagaggggcctcaccccaggccacgtcattgatcctgggcacagatgcacacatacacgtggcccagatcagtggcctcgcagtcagggcagtgcatgcacagcaagcaggcccagtgcactgcctgcccccagggtgacagcctcagcacttgcgctcccagcagcagaagccccagctcagcagaaacacatctgacaaaccaatgcggctcctcgggtgagtccagccctctgagcacccgggccctttcaggtcctgctccctgccatgggcactgcctgcggtgtctccgtgccatgcgacccagctctgagaccaatcagagaatgctgggcctggtagtcagcgtgactggcacactggcatggcaggaaggctggggaaggggcccggtctcttgactcaggcagaggtggtaaggggactgggggaggcctcctccaccctagagacccgggaagcagcccagcacccaggatgccccggcgggacacacactggtgggacccgagggtccaggccacagacaggcagcttttaagcccaaaagctgtatcttccgattgcccagtcccacagcaccttcagacacatgctgcccaggacaccctccctgaggctctgtggcttgttcaacagggtcttccaaggccttgggtcatgtggccaggggttcgaggcctaggccagattgcaggcagccctgggaaggctgggcctctccggagcacctcccaacccagctcccaggcccagtggtgcgaccagcggctacacaaaggccaacacagaccacagtggggccagagaccctcatctggaggagagctgctgatgggaaccaggggctccttccccatagcagcccctcagcatccttccctccccgccaccgaagttcccatgccagcctcggtgacatcccaccccacgtgagcccctgagaactccgtgaggttgtgtctgtgcttgaggagaacacctgggaacagagaggtcgctgtgtgaccaggggcgggagaggcgaggccagcagaggggagagctgctcccagaccctccagacccgccaggggctccacagcagggagggctgggatttgaagatttcttcctgccaagcgccgccacacggtggagccggcgaggggacatcagaccctgggagggaaactgaaggcagacagggacgatggggaccttccaggaccctcgtgttgtcgctctgcacctccggctgctgccaatccagctccagtcttgtcttttaaacacactccagcactagctggccctcctgctcccacagccaggccccgcagccagtgtcggtcagcagttctccccatgaggggcctcatcagcctccactcggaccccctgcccagggccctcagcctcaccactggcagaagccctgccccgaggcaatgcccaggccctgaacatgccacgcagagccccaggccggcactgagccagctgggtctccgccctggttcacagctgaaagggggctgcacccaccccaccctgccagttggtttgaaagctgcacatttgatcaagtccctgccaagaccctgcagtgggtcccctcgttctcaagatgaccaggttagaaagccctgcagggccaggcactcaggtcctgctggccacagcccccatgcagcctctctccagcctagaactccagttctcctgggaagttctggtttctggaaagcactgtgctccctcctggcgccaggtctttgcacgtgctgtccctctgtccagatcccagggcaggcctgaggccaagtgcagatgtcacagcactggggaggccggccctacttaccactggggaaaatgagcacaggggccgtatctgcaaagaccactgctgcacccctggccctgcggatgtgccgggcacgcagggggctctgtaaatgtgtgttgcgagaacacacccaagtgtgtgccaccctggggctcccaggaccttaagaggtcctaagggaggagtgtggggtggggaagggtcaggaggccctggtcagttacagacactcaggaaggagacctgtggcagagaggtggctgccagggcttggtcagcagatacaaggagtgggctcaggcagcaagggccaggcgctgggaatgcgggctggggcaagatgggctctctgagaacaaagggagcagcggggctcaaggagggaggcatggtcagaacacatgccctgagagctccgagaagggcgagcctgtccctgtctccccaggacgatggcaaggctgctacggacgtgacacagggacgtgcaatatgcagacgtggaaagaccctcgggggcataagtatggtgacagcaggagaggccaagggctgagcgaggtcttggcccggccctagcagccagaagaggcaggaccacaggagcaggtaccgggccacggggacacgacctcagggccttctaggccggggttgtgtctgtgtgtgggccggggacccagcagcccctggccaggccgcccaggccagtggcaacgtgcagtaaacaggcagtccagctgagacacagagaaaacaaccggagaagcattttcaggaaatggagcacaatttttcgaagcttggagcccgagcggggagtgcgaagtcagcagaagaggagcggccggggggaggcggcgccgcagcgaatccccaagtaggtcaggcagagctgcgccatgacaggcactaaactgcttaagtggggctttccactggaaacgctgacacccccatcaccgtgctggctcgggagggcgagcatgcatgtgtgtccatgcgtgtgcgcgtgtggggctggctggaagcctccctcccggtttctcctggtgctgagccactgcggcccccgaatgggttggccaggctacatggggcccttggctggagaggcccagcccgtgaggctggggcaatgcaggggaggtggttctactggacagacactcacagaatgtcctgagttccggaggaggaagacagagtccctcatgggaggggcccaagctgggccggcagggaggggcgctcaggccagacagagcagaggcgtgcagtgggggtgctaggcgggctcccggctcctggaccctgcccccacgatctcaggggcagggctaaatgctcaagggcctgtggctgccagggctgaaatctgactacgtggtggccacgcaggcctcacgatggctatggccacctcatctcacagaaagaaccctcttctaacttactcctcacaagtctggccccctatcctccaaacccctatacccagaccgtggggccctcaccagctccaaggggcctccaggtacctggggcagtagctgctgttcagcaggggctccggcaccatggccagatgggctctctagtcccgctgtcacccccacagcatctacctcccagtatgggggcctgcagagaccgtccagccgcttggctttccaggatacaccttcagcaggcaggcagggttacaggcctgggtgggagctgagagccctgcaccagcggccaggggcgccatgaggggaaagagccatgcagccttagggacagcagccttgtttgggggcccctgaggacagggacagccttgagtgcgactggtccagctgaggctgagcacggctggctcccccggcccctgggctgactcgtggggtggaggctctgttgtgacatctgaggacttcctcactgggcactggtccttccgagggccatccctgccccgtctcaccccagtaatgaataagaaggattcggaggcgcctctgcagcctggctgggtggcagggggcaatactaatgacactgcctccgttacaaacgtcgtgctccattatgaggggctgggactattttatgtattttatgtgctcacatctattcaattggtatttcgatcaatggatgcattacaagctttccctttaagagcctaataaacaacaagatggaaagtaaaattctccataaaatgacacttttaaaaatccatttcagctgaagctattggtgttttgtatgtcagctgcaaaaaaacaagtattagtgggacttcatggccccggagtgccgagttcagctcgtccggcagaggtgccaggcggccaggtgcagctgtccttggcgggcccgcgaccctctgcacctgtgccaccctttgggctgggtcatcggcccaggacccactctgtctgtgccagctactgaggggcaggctggccaggaatcctgcctaggccctcaaggacccctcaggtcactgctgtctaaagagactcacagcagacatccccccactcccaggccctgggacagcccctccgaagaccacacagcaaatccggctcagctccctggaaaggcgtggtgacctcagcaaacttcatgcggcccttgcaaggacagtggtatctgcaaaaaccacgggaaaaccacaataaaaacccactcacttcagaggggtaaccagaactgattatgaagcaaagatgtgtgaaaaccaaagccctgcaagacagtggcaaacaccagttggaacatacaaagaagagaagccagaaacactctcaaataactgaggaaaaattctacagcaggggcgccgggccaacatgtggaagttatggagcatgagtccccctggtgctgagaacaggagggaggcaggcggggccagggatctgaagtgtttgttgtgtgtgtggctgaaatcctaagaagaagaaaatgcaaatctatgatttggaggctggttccttggtgaggccgagaacccggtccagtgtttctaaggtggtctggaagagtaagcattcaggaataacgaagggcacagacaagtgggtcaacagtgaggatggagagtctgggaacagcccatacatctgctcacccgagtgacgcaggcgcccctgcacctgagtgggtcaggatctcatttcaatacatgtgtctccatggggagacaaaaggactctggcccctacctcagaccacaggtaaaaattaattcaagaagcctcaggcttaaaatataaaagctaaaatagccaagcttctagaagaaaacatgaatgtgggatagacaaatatttcttaaacaggacacaaagagcactactcataaaaggctaaaaaaccagatgccgtggaagagcaggtccctcgctgtaagcagacgtgtggggcggaaaacatccacaacaaaaacaaactcccacaaatcagccaaaaggcaaatcacacaaaaacaggccaacacccaaagaggccctttacagtaaagaagggcaccaccaggagacctgagtgaagaaaaagatgcccagcaatgccagccagcgggatgggcgtgaggccccacaccccccagcatggcaagaacaggagacacgggcctgagaatcctggccaaggccacgggccagccacaatgctcacatgctgctgctggcaggctgggacagctacctgggacagcttccaaagctcagtgtccatcaccctctgaggcagcaactccacacaaacgagggctaccagcacccagagacacacccaagacagcagcttcataactggcaaggatgggagagactccagatacccacccatcaactgcaagatggacacacatggcgtatccatatcacagaacaccacacggcagggaaaaagaatgagttcccgccaggcgcggcaatgtagcggagtgagaaacgtgggcgcctacggctgcctggctgctgccatggaatgctctgcagtgggcggctacgacaacagaaacacactttctcacaaggctggggccgcaccgaggctctggcaaggctggtttctggtgaggtctcccttcctggcttgtactgtcctcccgtggcttttcctctgggcatgtgcccctggtggcactttttattcttgtaaggacattagtcctagtggatcagggccaaacacgtataatcccatttaacctcaattacctgtttgaagaccccatccccaaacgtagtcacattgggggttagggtttccatctatgaacttggtgggggacacaattcagtccatgaaaagtgatgaacaaaagaagtcagacacagaatggcacccgctacatgaccccaccaccaagaagctcacacacaaaacagcacctgctccacaaccccaccaccacgaagctcacacacaaaacagcacccgctacacgaccccatcaccacgaagctcacacacagaacagcacccgctacacgaccccatcaccacgaagctcagacacagaacagcacccgctacacggccccaccaccacgaagctcagacacagaacagcacccgctacacggccccaccaccacgaagctcagacacagaacagcacccgctacacggccccaccaccacgaagctcagacacagaacagcacccgctacacggccccatcaccacgaagctcacacacagaacagcacccgctacacgaccccaccaccacgaagctcagacacagaacagcacccgctacacggccccaccaccacgaagctcagacacagaacagcacccgctacacggccccaccaccacgaagctcagacacagaacagcacccgctacacggccccaccaccacgaagctcacacacagaacagcacccgctacacggccccaccaccacgaagctcacacacagaacagcacccgctacacggccccaccaccacgaagctcagacacacaacagcacccgctacacggccccatcaccacgaagctcacacacagaacagcacccgctacacggccccatcaccacgaagctcacacacagaacagcacccgctacacggccccaccaccacgaagctcacacacagaacagcacccgctacacggccccaccaccacgaagctcagacacagaacagcacccgctacacggccccatcaccacgaagctcacacacagaacagcacccgctacacggccccatcaccacgaagctcacacacagaacagcacccgctacacggccccaccaccacgaagctcagacacagaacagcacccgctacacgaccccaccaccacgaagctcacacacagaacagcacccgctacacgaccccatcaccacgaagctcacacacagaacagcacccgctacactgccccatcaccacgaagctcagacacagaacagcacccgctacacggccccatcaccacgaagctcagacacagaacagcacccgctacacggccccatcaccacgaagctcagacacagaacagcacccgctccacggccccatcaccacgaagctcacacacagaacagcacccgctccacgaccccatcaccacgaagctcacacacagaacagcacccgctacacagccccatcaccacgaagctcagacacagaacagcacccgctacacggccccatcaccacgaagctcagacacagaacagcacccgctacacggccccatcaccacgaagctcacacacagaacagcacccgctacacggccccatcaccacgaagctcacacacagaacagcacccgctccacgaccccatcaccacgaagctcacacacagaacagcacccgctccacgaccccatcaccacgaagctcacacacagaacagcacccgctacacagccccatcaccacgaagctcagacacagaacagcacccgctacacggccccatcaccacgaagctcagacacagaacagcacccgctacacggccccatcaccacgaagctcacacacagaacagcacccgctacacggccccatcaccacgaagctcacacacagaacagcacccgctacacggccccatcaccacgaagctcacacacagaacagcacccgctccacgaccccatcaccacgaagctcagacacagaacagcacccgctacacggccccatcaccacgaagctcagacacagaacagcacccgctacacggccccatcaccacgaagttcaggaacaggcaaagccaatcaaggtaggcagagagcagaaaagcaggtgctcatggggtagacatgagtgggaagagccagagggaagcttccagaactcatgccatcttaggtaggaaaggctgttctcagcacatcaatacatgaaatctcaagagactggcagatttaagtgcacagaaaagtaaaaacttctgcaaacatcctcacgaaattcaaagcgaggaaaatgacaaaaaggcgactccccctgaacacttggagttccatgaatccataagaaacaagccagctggagacaagcgaatagggaacacaaaccatgttgaacttgaccaagaattaaagttaagcctggatggcaccctcctcagatccgctgtccatgtttctgcccgtggctgctgacgctgacgaggcccggaagggccagcagtcatgccccctctgtcccccaagccagtggcagcgctgacccccaggactgttcatccagatgaaggcgcttctctgggaagggcctaagaccagcaatgagaggagtgaggtggggcctgggtggggatcagcttgtgtctacctggccaaatgtcattgcctgcagggagccttccaggctgcagacaccagagaaaggttggagctgggtctggtacctatgccctaactgaatcctatccttgctctgccactctccatgactgctagtacccactgggcaggggacgccccaggtgggaagggctcagccagggcctggttccaagaagctgggtagggtggggtgggggagtcctggaggacaagcagccaatggaaaggagggagctggggcccctcagccaacctttggggggatgcgccctcccaccgcggctgggccacggagccccgcccaccaccgcctggccccgcccaccgccctggccaggggagaggggccaggggaggagctggctggaagcagcctccgcaggcaagggggcgccttgcccctgtcccgccccaggaccgccccaggcaagccagagcactgagggtactgagctgggccataatttatgcccgcccgcctatgctttatggctttcttaattcggctcctgctactattaatgtagttaatgctgagattatatctattttctggcgtcaggcggtgatttattcaagccatttttccggtggaggctcccacgctgttaaatcaagcgccttgccaattaagtgctgacttgggaagtggacgcaatcttagcagacgtccaaccgcaaattaaaccgcgcctgactctggggagtggacggggcagcgggacccttgctgacttgcaggaaagtcaggaaagtggtgggtgcatcctacccactgtggtccctgggccggtccctgggcctgtccctgagccacgggtctctggaactgcagcccacacccacactccaggccacagggttccagggaaacacccttagacacccgtggttcctaaaccacgcccagcaagcacctgacacacagggccctggcaggtactggggatggggcaggggcggcgggggtgaagggggccatgaggaaggtgggagcctccccagcaggtgggtggggctgcacagtgctcagcagctgggaggccccccggggcctggaccctgcaggagtctcacccacggtcccatctctgagggcccacatagcaatacaatagaaaggaggtagggaggccagggttgggggcagccaggctaaggactcccacccccaacaggcccagctctcctgaacactcctgtcccctgtgggggcctcagtcctctgtcaggcactgtccacatgccaactgcagtgaccacccaggcccagcccagagaccacccgggcccagcccagagaacctgctgtcaccctcctccccagtggggccctgggacaaggtaggcagatgtgccacccttgtccatctgccagatactcagcccagccttgagaggttaatcatgttttggggtgagatctggctggaggattgatatattcgagaagttaaataagatactgatggccgggtgcagtggctcatgcctgtaatcccagcactttgggaggccaaggcaggcggatcacttgaggtcaggagtttgaaaccagcctggccaacatggtgaaaccctgtctctactaaaaatacaaaaattagccatgagtggtggtaggtgcctgtaatcccagctactccggaggctgaagtgggagaattgcttgagcccaagaggcagagcctgcagtgagctgagattgcactccagcctaggtgacaaagcaagactccgtctcaaaataaataaacaaataaatattgactatgtaaatgatactttacgaccacctctaaaaccaaggtaaagtggtatttaaaacggcggcacccaggtagcgccgggtgacaaggacattttatttcttcctgtcaggggtggtttttcagtttccaggaatgtccatgcttgcccctccctccagggagcccaggcaccaactggcagacacacacatatccacggctgggcagatggggcaggagggcccaggcacagggggctccgccctccccggcctgaggggaattccacggatcccacaggaacccccggggggcccttgagctccctccccgaaggtccttgtgcaaactgaaggaaggctccctccagatttgtcaccagacactccctgcagcctgtccctgcgatgccactgccggcccacacggaaccacgctgtggcctgcggttccgccaaggtggcagcagcatctcaccagggagctcctgcatcctgtcccaagggcttgcccataacagggacagggacagccattcacagccgggcctgggcgaggctcacacccgtatgaccccacaggagccagcccaaaagggcaaagcagcatcttgagccccacggctggagacgcagtgtgccacacccggctcggggcacatgccccatcaccagctcctcaggccagcccagcctggagccatgcattggtcacagtggtacagagaggacccccctgtcctggactcacgggtccctctgccaccgtcgcccagcaggccatgctctcacagcagggatggggtggactgagcagagctgccctcaggggcaggggaggcagaggccgtgcagggctgtggggccgggtgcagggtgggccctagagaaggagcagaacagggcatgactccctcagtcctgcaggcacaggacaccctcggccctgggcctggcttggaccactcacagcacctactccttttggcctccctctttgctaggaagccctcagccaccgtgtttctagcagcccaccccacaggcatgttgcctccacctggtgcaccaggcgcagcacctaagcgtggctcgtatccctggggaggagggcagagaaggagtgaaagcagaaagagggcacactacagagagccggacacatgcgtgccgagagggaatggagaggagaaacaagaaggaaaagacagacgttgcatgggaccaaagggtggaggcctaagaggcacagagatgcagggaccagcaggcccaggtcgggcggcaaagcctcggggggaggagtgtgctggccttggaggcctccaggcgccccctcctcaccggccacccactgaaaacaccacagtcaggggatacacaccacggactggcccagtgggggggatccggtggcggccacctccctcctcccaccagggcctcagcatcaggccactcccagggccctggcccgccttatatcccccaccatctggaccctcagtccaggacacactggccctgaacctctgcagcactgaccacaggaccatcctgaactgcctgccaagagctgcccacctgtagcgtcaggaacggagccagcaaacagacctggacccagagccactgccagcttgatgctcagctccccagggactgatgccggaggggcccggggagggcctcacctcgcacccacacctgcgtgggcacctgaccacacgcacatcctgctgatcagaacagcaaaggaagaaggcgccctggcccaggggctccctcctcagggtcccgtgtcctggcccaggggctccctcctcaggctcccgtgtcctggcccaggggctccctcctcagggtcccgtgtcctggcccaggggctccctcctcagggtcccgtgtcctggcccaggggctccctcctcagggtcccgtgtcctggcccaggggctccctcctcaggctcccgtgtcctggcccaggggctccctcctcaggctcccgtgtcctggcccaggggctccctcctcaggctcccgtgtcctggcccaggggctccctcctcaggctcccgtgtcctggcccaggggctccctcctcaggctcccgtgtcctggcccaggggctccctcctcagggtcccgtgtcctggcccaggggctcactcctcaggctcccgtgtcctggcccaggggctccctcctcaggctcccgtgtcctggcccaggggctccctcctcagggtcccgtgtcctggcccaggggctccctcctcagggtcccgtgtcctggcccaggggctccctcctcagggtcctgtgtcctggcccagatctgccctgcctgccagcaagggctggggtctaagatctccaggaaaaagtccctctccctttgtccggaaaaagtcccagaggatcagcggtgtccctcagggacatcccagcctcggtgtggatgcgggctagctcaggccctggcaagactggcttctcctccctcttccctaccccaaaccaccaaggccgaggctgcaggaggggtctggccctcggccacacctggagaaggtggaaggtatgcaggctcggggggatgccagctcagccctgctgccatgggcactgccaaggactccactcacaaagccgaaaggcctgcctgcctcaaacaaacagagaaataaataaataaccacagcacactttgaaacaacttccaaattaagagttgcatccatgctgtcaagcccctgctagcagcttctgtggcaccttccgtgcaaaaccgtatctcagcccatttattagaatgatgaaggcaaaagggatctaaaaattgcactccttccttaatgagcagccgaagggatcggtaagcataatttcagaggccagtaatattttatataatcgccgagtggtttaaattgaaaacccccaactgaatcaatatttactgcattgaaacgaaatgaatagtaataagtcactaagctccctgtcctgtttcataaaataaaaaattataaaaatgagcacaggcacagggaggccatcacattaacttttacagcacttggggagccgtaaccgcctgttcccataaaataaaactctaaaaaacctgccggagtcctgcctcagcagcacgtggggaagcctggggagtgggaggggaaggggagcgctgagggccatccccacaggcctccccagggccaggatgggccccaagaccccacaggctgaccacgcctggtgcccacccacaccccacacagaggcccagagcgccctggacccagcttcaacagagacttcctgccaccctcaggccgaacttcctgctttgatttctttaccagttttctcaaatgacagagtatctcagagagcgtgagtgagcagctcaggctacgggaccggtggcagcccgccagccctccctctgagcaggccccaggctctgggtgggaaaagcacaaatgcctgccagcgtggaggatggggctccggcagatgacccccgaggggtgagcacaggacctcaccccacagtgcaggagcctgtggccacccctgccaacaggcccacacaaggcccgggcaggtcagggcctcagagcacagcggcgccggcagaacccagagcgagggccagccgggaaggagggccggccgggacaggagggaagcggcaggtcgggggaggggggtgctgtgggcagacacacgaggggatgggagcacaggaacacagcccccagagggccaggagcccccacactcaccctgagaccctgggcaggaacaaaggcctcattccaccaggtaaggctggctcagcaaggtggggaagggggcctcctgcagtcaagaatgaggagccagaataccggccaccaacgggcaaacggcctgagcagacctttcacacgggaagaccaccagtggccttacgttagcccgagcaggtactcaacatcactggacaccagggaaacgcaaatgaaaaccacagtgagaggccacacacgtgagaatgcagattagaaaggcggtaacaccacgtctgaggggaacagaaagggtcgcggcacgctggaaagcagtttggtgatgtcacatcaagtcagcagatgtcttacgtcccagcgatcccacgcgcgacagtcatggaaacacaggtgcacagaaagagctgcacaaggactcagcaggctctactcacagtcaccccaaactgcaagtgactcaagtaaaattaataaagtgcggaacaagaaaggaaggctccctggcaaggatgggaaatgcactgtgaagccagcaatgacacgagcctgaatcagatgccaagtgagtgagccaagctggaagcaatgcgagaacatctgactccattgacagaagctccagagcaggcagctaatccacagtgagacttagaggcacaggatgctccagagcaggcagctaatccacagtgacagactcagagccacaggatgctccagaacaggcagctaatccacagtgagagactcagagctggggctgcctctggggatggaggcctctaccgggaagaggacagagaagggcaatggcaacgttctttatctcgacgaggtatgcgttgcgcaggtgcatgcgttttggggtttctgttgttgtttttgagacagagtctcactttttcacccaggctggagtgcagtgtcagtcagggctcattgtaacctcgacctcctgggctcaagcgatcctcctgactcagcctcctgagtagctggggtacaggtgcatgccaccatgcctggctaatttttcttttctttcttttttttttttttttaactgtagagacagacgtctcactatgttgcccgagctggtcttgaactcgcaggctcagctatcctcctgtctcagcctcccaacgtgctgtgattacaggtgcaagccactgcgcctggtgattcatttgttagaactcacagactgttagatttatgcctcccactatacgtaaattctacctagaaaagaactatgaacacatgtggacctctagttagtggccctgctttgctccgtggtatctgttaatactactggaacttgtgtgctaggcctgagcaaatgagcagacagactgagggtgatggggcaggtgtctcgtggctggagaagagtcaggaacacggaatgagggcaggctgagtaaaccagcagagatggagtggaacttgtgctgtcagggtgcgggtgtgcatgggagtgggagcagacactcaacgcccttgttctgactcaagagggcagcagcgtgtgcccccaggccaagaccttagcaccactgacacctgtggctgcatgattcttggccatggagggccgagagccactgccccccaaggagccggggttctgcagagaaacagctgactccacggtgagcctggagcacctgccgtgcagaacgtgatgacgtgcccaggaatgagaggacacatcaaagggacgcaggccagcctcaagcggcttccaccagccaaggctgggaccacctgagaaccagaataacagagcagattacagcctatcaagtggagtaagactcctgggtccacgccgttaaagcaaatcaacaacgacgcagggcaaaggcgacagggaaagccaccactcacagcatggaaggaggggtgggaaagttatcccaacatctagaatgagtggacagaagtccggtaagaaacaggatgctccctcagtcctcacacttttccccaacaattgcccaaagtaacctgctccgcagagaaactgccggatggcctaaacccagcggtcaggccaacactgctgcaccaggcagcctgaggccacaccagtgctgccatggctttcccgccaaaattgcgaatctgcatctcatcacaaaaagacatcagataagcccagtggaaggacagtgcacaaaatagctggcctctcttgtccagactcccagcccttcctgcactggagaactgtgcatggtcacagagacaccccaaagcaccaggctccgggggcaccagggctccgcttctgtgcaaaagctcgtttataaagggagagaaagcaatactgcaaatgcgataaaatatcatataaacaactggtgagtttcagtaaggaagtcctgggtggtatttttgcaacttctgtaaaagtatatcaaaacaaaaagttatcccaaaaaattaaacgcaagaagctagttaggagaggaaagaggagagagcccaggagccacacaactattctcctccctcccaggggttcccagaacagccaggacagggagactcggcacccaggcctgccccaaggcttctgcatccacctgtccatcaagcagcaccgccttcccaatcccccccaaccccgccaccagtcacagccacctcatccctgcagctgggtgggcagcagcaggaagctgcccccgaaggtgcagccataaagccaggggggcagcctggggtccacatgggccatgagccacagagcagtaccacctccgacaggcaacagcccaggaccagcaccgcctgcccctgtcccatcctggcagctgtggtcttttggtgctgactgcacccaccggtaggccaaggtctcagtggagtcctggagtaggcagagcacagacgcaatgctgcggtcaggagggccctgggcagccaggggccagggcaagcctgaacacagatgtcacacctgccggccagcagccccacagcaggagctgaaccagggccgtcgctacatggctgtctggtacggccaagtccaggtcccctcagtggtctccgggtctcacgtgtgttatctgggccgccagcagctcgaggcctggccaggtctctgcactcgaacacgctgtgcctcccacagggctttctggggctccccggtgctgtgccagctgcttccttccccaagagagtcccctctctgcctggcaggcaccacagcacgaagaggccccaaaaagcctgtccctaagtccccacggggccatagcttccatgcaggcagggccagacagagatcaggccctcaacacacaccgggtgagcgaatgcaagtgaaggagccaaggagaacggcaggaactgcctgggccacgcaccggggcccggggcaggggctgtgtcacgcagcctgctacagccacctgcctgggggaccctggaaagaaggtcaagaagccagacctcagcctgagtggcagcagccacaaaaccccatagactcaaggctcctacccagttaaaaatcacaacccaaagcaccacccctctatgtgaagccctgtcaggccgcgttctcccagaacctgcagggctgagccttcctgcccttctggctcggggggaatcaggagatcccggtacttagggtcacttgcacccagaccccctgacctgagtccacagcctctgagtgtggcccgctcaccggtcatcttgcctggccagcctgctgtcctgccacggaggcgaggaagggccgtggaggctgtggtggctccaggatgcccccagagctgtgctaggacatacaagtaggcagcagtgctcccaaccagcctcctgccccatgcagccctgtcctccccggctgaagggggtcaccccgtgttctgcccactcaccaccttgggcctactggcccccacactgctgtgtggaccaagcagcccaagggggatgggaaccgggggcagaggggtacagggcggggcggaggggcacagggcggggcggaggggtacagggcggggcggaggggcacagggcagggcagggggtacagggcggggcggaggggcacagggcggggcagaggggcacagggcggggcagaggggtacagggcagggcagggggtacagggcggggcggaggggcacagggcggggcggaggggcacaggacggggcagaggggcacagggcagtgcagggggtacagggcggggaagaggggcacagggcgggcaggggcagaggcagagccatggctcaaatgcaagccaccaacgtgagcctcccccaagaaggggcggagagctgccgaaaccacgcaagccgcatttctgggccctttgctggccaggaccactgccaagcccaaggttgcaaacactgaaggactcagcagaggctcctggctgtgagggaagcctgggagcagagggaagggcctgggagcagaggctcactcctggccgtcagggaagcccaggacgaagagaaccgcatgtcctgggttctctggacagagggatgagggggcctggaggttgaggatgccatgcagggcatcaacacccagggccagagcatggtgggagccgggaaggcagtggcaagggctcccagcccctcccgcccagcagccaggccccagggctccccgccccctctgtgctctggccctgggtcttgcccctctgtcctgagtgggcacctagacctgcgcccagccggtgttcagtgcaaacacagtgggtgcatctctcctcccacgaaaccaacacttgcttttaacaaaatcagtcgaaactcagcaactccattaaccaaaaccagaagcgacaatgctatcattcttcagcattttcacagcattcagggccgcccttgaatgccctctccagcattcagggcctctccaggctctttgtgtgagctgctcacagtagagccagcaccgggcagcaaggatacagacaggatacctccaccctccacggaggccctggggaccgggccaagctagacacgggcagacacagggcttcagcactcttggcaaaggcccaagctccccaggctccatgtcagaggggaggtagcagggaggcagtaaacaccctggaaacgtgccctggagccacaccggccctcacagcccaggaggcccgcagcagtgccgcctctcagctggcctgctcctcaccgggggctggccctgccctgataacccctggccccccaccagagcagcggccgggctgcaaatcccaccttcgacaccaccccccagcccctatcctctctgcaaacactccaaacccttcgtggtatggccatgctggcctctcaaccccccacaggcccctgccctcaaaggggccttctctgagccccacacagatccatcctgggtgggcctcagcacatccggcagcagccacccacagaactatctgcttctgttgtctgcttgcttcctgaccgctccccacagaaggacagcacagtgggcagagcctgcctgctcaaactctggagctgcctgctgcccaggtatctgtgggtggggggagccccacccatccagtgccgggcactcaacaactgacgctacacactgacacccctttggtgtctaggacctccccatgccagcctgtaacagggtcccgggcctggggctggctgagcagagcatctgcacactgccaggatgaggcgggcagggcgtctctggctctcaccagatgcagagcaagccctggagtctaagtccattttctgctgctataacagaataccacagcctgcgtcatttatacagaaaacaagtgtctttggcccacagttctggaggctgagagatccaagagcatggtgccggcaccaggtgagggttttcttatggcagaaggcaagcaggtgcctgagattgagaggcaatcatgccacaccctgcctttctgatcaggggcccctcccaccacacagcactgacccatccacaggggtggaagcctcacagccaatcacctctcacagaccccacctccccacaccgtcacgtcacaatgtctatttttttttttttttgagactatctcactctgttgcccaggctggagtgcagtggcgccatcttcgctcactgcaacctctgcatctgggttcaagcggttctccggcctcagcctcccaagtaactgagattacaagtgcctgctaccatgcccgaccttttttttttttttttttaagtagagacggggtttcaccatgttggccaggctggtcttgtactcctgacctcaagtgatccgcctatctcggcctcccaaagttctgggattacaggggtgagccactgcacccggccatgtctgttagatgtcaacataagttttggaggagacattcaacaccagggcacccagagttgggccatgatggagtgctggggtttttcatttttgtttttgagacagggtcttgatctgtcgcccagactggagtacagtggcatgatcatggctcactgcggcctcaacctcctgggttcaagtgatcctcctgcctcctcagtctcccaagtagttgaacccacaggcacaagccatcacacccagctaattttagtactttttgtagacatggggtctcaccatgttgcccgagctggtcttgaactccagagctcaagcggtccacctgcctcggcctcccaaagtgctgggattatgagtgtgagccaccacgcctggccacagggtgctggttttacataaggattcatcccaagttcctctgatcacgggtgtgagccatcatgcctggccacggggcgctggttttacataaggattcatcccaagttcctctgatcacaggtgtgagccatcatgcctggccacggggcgctggttttacataaagattcatcccacggtcctctgactacaggtgtgagccatcatgcccggccccggggcgctggtgtgacgttgggatcccatggtcctctgactacaggtgtgagccatcatgcccggccccggggcgcgggtgttacgttaggattcatcccacggtcctctgactggcacaccctttgaggcacatcagaagatggcgagaaccctgctgtggactgaatgtttgtgtccctcgaaacccgatgctgaagccctgaccccagcgggatggcgtgaggacgcagggccttcagaggtgatgaggtgaaatggtcctgaggtggggccctcatgatgggacgagcatcctcataagagaccccagagtgcacacgcactcaccacgctctccctgcctctccctgggccatgtgaagatgcgtgggaagacagctgtctgtaaacccggaagaaggcccttgccagacaccaagtctgcccagcaacctggtctcaaacgtccggcccaggactgtgagaagtcagcgtctgatgctgaagccccagtctgtgctactgtgtgacacggccccagccgacgaagacagtgcccaaaccagaagacgggcaggaggtggggcagggtggctggcgtcccaggaggctgtgcaggcacacctgctcattaaggagacacgcgtggggagcgcagcatcgcagtgaggacccctcccgtccccaggctgaattcctctttaatgagacgccactttggagaagcgtttcagagcccttcaaaatcctggcctaactctcgtcaaaactgcacagattacttaagatttaccgcacagacacaaactaaaataaaataaaataaggcagcccagtgagaggcagcctcgtgacaggaccatttgtagtcagatggaaaagcctccgattcatctgcttaagcacagcagcttctgtttatttcgcactttcatgtcaaatgaatttggaaagagaaaaaaagtgacaagcagttagggatataagtcacatttcagcttcagttcagattaatgaacttgctggagctggtgagggcaccggcaaatctacaaatctcagaacaacaaaaaaattaaatcccctcagcagagcctcagccttcagggtgactcctccaaaacccttcactgaccttctgcctcgcacccctgcattccaggccctctgggacaggcttcacttcaaggcagcagtcctggggcccgggggagggctggccaaggccggctctcagggaccactgtggcatggccgaggtatgcgtaaggcagcagtacagtaagctcccagggtccccgagccagagcaacagccccgtcctgtgtatttggcagatgcgacgggcaccacgctcagcagaacaacccagtcccatgcctcagcttctggggagaggtggcacatggccagcacaccgccagcatgcccccgtcagctgttgccccgccccaagcagccacatggccgggcatctgcaggccagggcaacgcggcctctgatgggagcacaggtggcaccgtggatgccacccgttgaggcaggagtcccgttctgcccttggcatacaggcactgctccttttctcctcccaccctctgccccaccccagtctccacacatgatgtctggcgtgtgcctcaatggtgtgcccatcctcagagaccctggctggcagcacacagaagccccagaagctactgcccagcagcctctgccttccatctgacaacgacgagcactggccggccacaaacctgaggccactggtcagcacccagccatctcccgaccacctcccccagcacccagccatcccccgaccacctcctccagcacccagccatctccccaacacctcccccagcacccagccggctccaccaccacctcccccagcacccagccggctccaccaccacctcctccagcacccaactgtctccaccaccacctcctccagcacccaactgtctccaccaccacctcccccagcacccagccggctccaccaccatcccctccagcacccagccatcccccgaccacctcctccagcacccagccatctcccgaccacctacctcctccagcacccagctggctccccaccgcctcctccatgttcaggtccagagaaagccgctgacagggaggagaggccccagcccctattacaaacccagccatcaacgggccctgacgctgtcctccagccttccacatgggcccaacatgaccaccaggccgacagtaagtttctacttaaattaggagggggagagagagggcgcgtgtgccaaatcaccccctgggacagggcagaggcctagactcaggccgggcactcacttgcctaccctccttccctcgggctgcagggaaggggagtttctagagcttcccagaggagggaacaggcctaatcaccctgagccctccccagtgcccagggcagagctagggccaatagctcagggcctggggctctccaaccgaaagctgagaggaactgcagaggggtcctgggggctcatggccaggagaggggccccttctcgtgcctcctcagggcggtgcagtccccgccatgagcatcacagccaaggggaggggacgggaaaagagggcaggggaggtcccagggacagggtcagagagaggacaaggtgagggctgttgtcagcagcagagctgtgcaagcttcactgcggcagcctgtgttactgtttcttgtccccaccttgggcagggcccagtcccattcctctcaggacgggtggtagaggtcctgccccctcctccgtctttggggttccagctcaggccctgtcctgaacaccccaccacaatcaagcctagagaccctacccatttcgcatggtacaagcaggcagggacgggctgtcaggttcacgctgcactgcgctgcccccaactacaccctacccaagatgctcagccactcccagcacctgggaccttcatgtgcatcctggggcagggtcagcctggccttcacacacagacccccagggccttccctcaacactcagagccccctgggcctcactgtactccccactgccgtcccttcgcagagcctctgccagcggctccctctcctcccagagcagtgctgttggcctcgtccatctcccaggagctggcagcttcacagagagcaggcccggctccatgctcggaactcgcgggtttgcttcagcaacagagcaagatgctaaggctctgagggcaagaggcctagatgacttcctctcagggtgaccagatctccaatcacagtgaggggtcggctggggcatcccacaccggcgctgtccctcagccactagtcaccctgcctccctcccctcccgcgtgtccaccagcccctgccaactctgaccaccgtggcttccaggactgctggggcttgcccgccagcccctccagggatgggagagggagctggggcccaaggagagctctggtctcaggctccagccagccaactggcaggacagcctgccttcttcctctccatggcagcccttagtccatggtggcctgggcctgccgagggagggctgagggtccagccacatgcaggcagccctggctctgatgcagcaccggagatggcgcatgggccaggctagaccagccgctggcccagacgccctttctgcctaaacaaccccgagcccaggcacgcaaacaggcaacagcaggccaggcagccatgctgggacgcaggtggcaggtgaccctgggcgaggcaggcccagcccactggtggccattcttcccaggacttcctaagagtcgtgcccctcagctcagcaccctccccactccactcccacaccctatccacaagcccagggttcgtgtcccgaagggtcccagacgcctggcaaggagtggaacaggactggggtgaggcggtcaggaaagcaaggagggcccctcacacaccccctcagccacatgtgcatcctggggcggactcagcctggccttcacacacggagaagacactgaggcctggagcccatggccaccaaccacagccagggcctccaggggtgggctgaattcaggcttctggtgctggggcccttgatccatcaaaggcgatgcctgctccacctcctgcccacccatgcctgtggtgcagcccctacaccagggcactcagagagtcacggccgctccctgcagggcagctggccaggcttcactttggaaggacagggaacttggagggagcctatcagctgacccgctgctctcagccacatggcgccgacaggaggccctgggcgctgggccggctgccacctcctcctcctcccggcctcctcagccccagggcatgggcacttgtttctgtgcaacaacaccatcagggccctcctgggcaggcccagctacaggaaccagaccagccggacccaaaccagacgccttcttggccttcagaatccagaaggagaggccctgctgggtccgccctgaggaaaatcatcacttggccccgagccgcacccctgggagaggtggaccctcgacgtcgggctgacgacgaccacaggacgggaagcaggagcggagaatccataaatctgaacctcattcccgatgatccggggctcttattaagtaaattaatttaagttaatttagctcgatcatgactcccgatcacagtgatttagtgtgggggaaattgcattaggaaaggccatgctcaccagatagaagaacggaagaaaattagatccacttagcaatgtgaattaatatggaaatagcaggtgtaaatttaaccttatcgagagaataaaaattatcttcataaatttgcagaaatagcccccgagatgcttataaatctatttaaaacaaaaatattacaaaaagtgcagtaaaattaatttaaaatatactccagctattgcctccagaaaactcagcagcagggccaagctgagtgtggcctggtgatacgggaggcagcaggacaccacctggtgggctcgccagctggctgacctgccacgaggctccagagctgggtagggctgtccatactggtgggtggatcccctggggttagcctcaggcctggaaacctctggctagcagcagggaaccaccaggcagctacggtccggtgggtggccgtgccctgggccgtggctgctcgccctgaggccctgcccaccatctctggcccacgccactcccccaggagcagattcccgcggggagggtcagaagacagagggaggggtctgccactgcctgcttcccatctgcctgccagagctattaccctctcccaacctggagatggggcaccaccaccacagcaaaggaaggggccaacctcctagagccaggcctcctgaggcccagaggctgagcaaccttgactgagcaggtggcaaagcctcccgggatagcggccccaggagggcaaaagctgttccctgccgacagagccgccctcccagcctgcatcgaggtcagagtgcgagtgggggccagaacacggacaggcagccagcagcagggcaaggagtagctcacatcaccgccttgacaatcatacattgacagcttccagacagaccactgaaggcccagcctctcccaccagaagcttctccccgagagatgctcagacagcacatggcgtgggccctgaccgtctgggcagcagaagctttcatggcacagagccctcaccagctaataggcttgctgagaacagcagagcatgtgtgtgcatgtgtgtccgtccgtcttcacgtgtatgtggtaaacacaagctggcctcctatttggtgcagaaattgctaaagacacagaaaaatcaggctggtccccagccaacgagcccaacaccaagcagttctgggatgtgctcagctccccctggcccttggattctaccctgcagccctcagggcagggccagacagcccagttcccaggcctgcaggagcctgcaggaagccttcctacctggatagtgagagccgccgggcccgccaggagggcagagacagggggaagggcggggcgctgagaggcgaggccggcgtcttcttgacaatgcggtagcgggtcttgatcaccttgctggtgggtgcagtccgcacggcatgcaggctggacgctgtagagaaaacccagggcacagacatgggtcagggaaggccggcaagggtagggtcagagaggccacccacagtgccagctctgcccaccgcctccgccggagcttgaagaccctccatcgccccgtggataaaaccctcaacccatgtggcacacacatccccagggcgcctggcagccgacgcttcaggagctagccagtgcagcctctgagaggcgggcaccagccccgcacaccctccagccatctggagaaacaagggaatgcccacaccacaggaaaaccaggagaagccaggggtctggcagccggggatgccttggagtcccctagacagtatccgcaacagggggactcgaggtggctgactgacttccagcagagcagtgaggaaggcagatgggccacctccacccaggccagaggggcggggctgggaggctcctggcctgtgccctgcacaggggaggggcgctggagcactcacctcctcaagcggcacctcctcaccgctgtgcccagacagacttatgtacttagtcactgttttcataacattttgcagggtgatagacacgacggcttttttcttgctgaatgtttcatgcaattaacaggaatcttttgcccgagttcccttccacttgatagctggcaatttacccacagcttcgagggttgcgtctaattgcccagcttgcatcatgtacagctctgactgcccagatcattaaagctaactcagcagtgggcacaggcccgccttcccaacagcttccctggcagcccaaggctcaggggctgctgcaagaggcccccgcccccctccacccccttcagggtcgcccacaggaggaccccacccagcccagcccaggggacctcacttccttccagtcagtgcccagcttcccctgtgcccgggacccctgactgcccaggacacaccctcttggcccccacagccaaacagccctcgaggcaccctgctccttggacaggaccagtaactgttaccatttcccaaattcttttccagagccctaaacgcaacggaccttgagcagccagggcccctccttgaggccgagcttctagcccatctctccacagactcgctcactctcctgcccacactgccctgtccagatgtcagcaaagagcccctccctcaggcgttcccccagcaccatccaagctgcagcctctactcaggcacctgtcagcctgcacaggagcaagtcaggaacacttggccccaacatgacatcaaagccttccccagagtcccccagagtccacatcagagagtctgccgattgtattttcaaggtcttacaaacaaggagaaaccagcaaaaaaatcaataatagcttgtttcaactaagcgctggagaacgtaagaagtccttaagttatcaataaccccgaggtgacctcaccaccttccagccctgctgcaggctccttgcttctgcctgaggagagcatgggctgcccggctgctcctgccccacctgggccaagctgggggccagccttggcacctgggcagtcagggcacccactggagcactgccagccatggggccgggcctcagggctgccaccagcccacccccaaccccagagtgcccaaatggcccacttgccagcctgcagcctgcttcccaccatggcttcccacaagcctcccaggccgcccaatgcctgctgctctgggacgcagagcctggggcgatgctggccccttggagccacagcatgacaaagctagggtacagtcctgctcagaggccaggtggggccaagcaaggcaggagggacactgggccacactcgggacactgggccaccctcgggccccgggggttcatgttcccctccccatcaacctctttccccaaattctaagtacaggagcccccagacctggcccagctccattcccgtcgccaaatgcacagcctcccttcggctaaaatcacttctaaccttgggaaccagagctcgccctccctcccaggtccagcacatgccaagtcctctaggaattcccagccccgactgcacacaggactggactctgcattctagaacacttctgcccaggaggggcagcttggggcaggcagggcctggcgggcggcggcaccatgatcacactcctgcgcagtgctggcagtggtcaggtcaggcttctttgccttactgcgtgttacttcttagtgcccaagtgtcactcctgaaaaccacacggtaataacgcagcgccagcctcttgtcacagcccactcaggctgggcaggtatattctgcacgtcacctagatagacccctctcctacagtccctaccagactgggggcacttcaaggggctcacagtgacaaggtggcagctagtgtgggcccaagctgggctccagcctgcaacccacccccacagcagggtcgtgtcccccacggcctggccctgcagaccatgggcagtccctgtcattcccagatgggcagctcggacaagctcatgacaacccaggatgagcagggcacagccggacagatgggtagtagcagatgaattctgagctgggcacccagcgactggcaggagcaagggctcctaagaccatgcatggcacacggacccagaaagtcaggctgcaggaaggaagggtccctccctggccctgttccccagggtgtgcagcgatggcgtgggcaggtggcaaggcttgggaggctgcaggacgctgctctgtagccaagaaggacccaggcagaaacaggcctctgccctcctccctgaggacacaggcccaggcgcccatccctcctggctggctggggtttgtgtagataatcgtgttatttagataggatgttggtttaattcccctcattacagactcccagggctgtaattttttttctccacgtgatgcattcccgtggcacactccgcgcacatcaaaccccttgcgcctttattgccggcgatgccccggcccgcgttatcagccccacacacgcagccctctctgcccgccatcaagaggtcacttctaatgactaatcgatctcattagctttcctaattaaaaactttactaccgcaatggaagacaaactacaaagaaactgctggcatcatatgtgaatgagatatgagcccatccatcagcagggtttgagctcttgcacacggcaccatgccctcaggccggggaccaggtgggacagccctcaggcacctcgagagccctgctgtgtaccaagcaccacatgcccaatgacgcatcatcaggagggcggccgctgaggctgggcccggccatcaggggtccaggagtcctgcagagcctggccctgcccacccggctcactctcctcggacaattccaacacagatggctggtctgatcagatgggggtcgcagccttgctctgttttatgtggagcaggagtgagggagagttcagatttttatggaacttcaaagggaaataactaggaagaaaataagttgctaatttcacaattggttaatgaataagaagatgaaactagaattactactctgtgcaaagaactgtctgaggctgccaagcaggagagaaggctgctccaccacttcactgtccagcccaccagggccaaggtgagtatcctggggagctgtccagctatctgtccagctcccagcctgctgatgggagggtccatcagggagggtctcgcccatcaactgaggtggagacccagaaggcctctgaccgtgccccaggccagcatccaccagcccctgggccttatgcacagtgggctacagagatgggagcaccagggcctccagaaatagcaggcacgagagtgggccctggtgcagacgggcccagcgcaaagacagcaaaactgtcactgctgggctgccagcccgagaaaataccctggttctagaagccccttccccaagcctccgcaggcttcatcccagctggggagcggggagagctgagcaggaggccaagactggcacggaatttgctggaatcagccacagccacccccacagcagcagacaggacggcgtggggcccacgaagggatgatgttgacttgcctgacagacaccttgcaccacaccatgttcccgggagaagtgacagcagcgagcggccaggatgggccagacccacagaacaggcctggggcagcccagaccctgcatgcaaggagagcgagcagggaaggggctagtccaggtgcagcccccggggccactgcagcgctgcccagggtgacggatggctgtgggctgtgggctgagggcattccggccagtcaggccccccatccctaattcctgaagattccaccttctttgtacactgcctgatctgctttttatcaacagctgccctggcacctcaccatctccacactgcctatgtccttctctgactaacggcagcttgcacgcctgcaaacctacttttcctggtgtctgtgacccgtttctgtgtctttccagtcctcttgcagtttctgaggcggtgccaactctgtgccagcccaggtctctggccccggtgccctgagcacgaggcaggaggggccgggcagcagcaccgactggggatggcaccttccagtacggccgtgaatgccccacaggcaagcaggacacggcctaaagagagggcaggaggccctgtgccatccccagaaacctgagttcacccggcccccggacacagctccagtcacactccccgccccactcactggctgggcctcttcctccggcactgcctgaccaccccagagctcagggggttgcaccttcagccccacagccgcaagagggcgccagggacgaggcaacgtctcctcccacagagcagagttcccacgattaatcgcctaattagagctgtgattacaactgagagtgctcagtggcgcggggaggtacacgcagcgggcaggaccccgggaagtgcccctccaggagagccgagcctgcctggaaggagcagagcctggggttcctgagagaggagagagcagggcataggcccagcgccagaggagtcggggctgcaagaggcggggacagcctgggcagggggtgcccaggcgctgtggggaagtcggggcggggggcgtgggaggagagctgggggcactgggagtcagggccagacccgccctgtgctgctgcatggctggcaccatgctcacacccacggcctcagctggctccacagcctctgggaccatgccgccctcaggaagcacctgccaagcgcaggccccaccttccctgcaggtccagctcaaaggcccctcacacccccacccctcccagcttggctaggagactgctgaggggcaaaggcaggggagcagggggagccccagggaacgaggcaggcaagttccagaccagccgacaaggcaggtgagcccagagtccccatctcctctcctgcagctcgcaggtgatcctgcccccaccaaggctgctgcacacccaacaccaggccccacgctggagactctcaggcacaaggagtcccgtcaggcagcgtccctgacagtggctgatggcgctcttggagaaacagccatgaaaactccaacagagcatgtggcccatgttcccgagagccctgggctcttgcatttcagaccgtgacatatgtctgagcggggcgcagacccccgggcctgcttggggtacagcgcctgctactgcagccagtcagaggcagcgtccgcagaactgtctctcgttgaaggcagctcaggcaacagctctcgctgttcctgggacaggaggctctgcccattgtgagcacagatgcccttccctgcatagccaggcctagtccgaggcacctcctggaaggcacctgggcctggcagctcctcacagcctttgctgaggctggtgggggtggacagggtggcccagccaaggtgaagggctatggagcagctgaaatccagcttggcccccgaccagtgtagctcgccagggctgcacaacaagggcccctccaccagcccctttctgaagtcggcccagtctgagttgtcccctggggccacacagagtcgccaccttggtagcctggtgctcacccctggcacttccacacgctaggtcctgaaggtggcgaggccaaggctacactgggggtgacatgggctctggcctccaagaaggggtaggcagaccccaggggccatcaggagcggcttccccgaggtccaccatgtgcagggggcagtgaggtcaaacaggaggtctctggccctcaagtgccaccgtgaggtccacaggagactgccctctctcccaggagcctcaggccgtgtgtccccaccactcccacccgggctgccaccgcaggccccatcctggctcgggccctggtctccccagtgtctgcagcatccacagtggagctggcctggagccattggcccacccagggcctgcctcccagcgtccactcggtgttaccacacagcaaacatgatcctgccaggacacacaagtgcactcaggagcacacgcagagactgacatgcacacggtgggcggtgggcatgcacacaggcgtgagcacacgtgcatggtcattcccgatcctgtggctctcgcccctagcagccaggacggggccgggttgctcaccccacaaacctgtaccctgctctcgcgccccctcaggccctcgagtttcacgcagagccaggccatgcagttcaaatgcagcccagcccaggagctgggctcaccgcctggacgttcacctgcgggcacccatctgcaggaccaacagcctcgtttctactgacacctggtgcagtgaggggctgcatggccacgctccaaggccactctccgaggcaggacaggaaagcctccttggttctttgtctgtttcttctctctgccctcctcagtcccctccctgtcaggcccatgtgcggctaggcccggccgccgcatctgctgtggtcctgggtgtctgctcctgcaggacaaggcctgtgcccggccagtgcccccaccatcctgcagacacacacccctcccgtgaatgctgggagctcagggagcgtgccatgccttgcacccaccgtctggattcaccagtccttactgctgggttccgagaaacatgagggtcagtccctggggcccaggcctgccatggggctcccgcctcgctccccgatccggaagcccagcctctgcttttctcttccccgaccacacatgggcagttcccagctgcttttctcatctagacaccgagcagggcaggatggagccagcctgtggcgcatacgcactccccccgctgcaacgcctcggccctccatcatgccagccaggcaggtcatcggcagggcccctggggcgcagcgaggggctgcagtgattagtactgatgagcacacaaaccgggccagtcatgcgtgacatcagcttccggcagacggcactggcaggctgtggggaccctgcagttgtgcggaaaagtggaatcatagtgggcaccacgggaggctcaggctctccccacgaacgggcctcccaggcccctccactgtttggagggaaagattcgggtagggctcctgcctgattctggccagctcaggcagaacgtccccatcacgagaaggaaggcacctctgcccctcctggccaccacacagaacccacaatgccagccacatcagctgagggcacctcggcccctcagcccacaggtgggaatgtggccaaggcctagaggaagacaccagcccacgatgcccacagatggcacagctgggccaggcaggggctgggccaaggagccttcgcaggtgcctttggaagggatggagactggacacaccggccgcctctacctgtgcacccggaccaccatctatgtgggcagacccctggctgtgctggcacaggctcactgcccacctggagccagccccaggggttacccacactcagcaccctagcatctagccagccctgccgcttccagcccaggccctgcaggtgcagggagtgtgctgctgacgtggctgggccctccgcccctgctggccctccccttgagtggctgggtgtgcttcaggcccgtccatttctctaaatgagccgcaatggcaaccgaggcagggggcggctggtgagtgccccgcccctacgctggcgcggcaggagctgccaggaccgcactctaacaagcctcagatgtgggatgactggaaccacaaagtatgaatttttatgagtctaataaatcactccacttttcttgtatgtgatggctcccaggacctcaaacgctgcagacagagggaaggagcccctgtatgtggtggtggccaggagcagggccacggggccgctggggccctcctgggcaccctcgaaccctctggccccacgccctgaggctgctccgcagggtggagagcagagacctgctcgctgcccccattaggccctccctgccagaatcccacattggcagaaaaacttgcctcaaagcctcgtcagcgcgaaaggaaactttgcaatcacacacacacacacacacacacacacacacacacacacacatacacacacacactcactctcatgcacatgctcaccccacaacagagactgcagaggaccccagccccgagacaggaggagcaggtgcatccggcccctcctgggagccctgccaggactgcctgggaggctgggccccagcacctccccaggtgggtgcagcacgtggccagccacatgagaggatggcccctcagctttcatgtcctggcctcgcgtccctgggacgcagccccgtgggatccggggattcatctttgacaaacatttacggattatcaaatcacaacggcagcccgacagggccataagtcaccctaagcagccatccgcagtgcagtctgaggagtttgggcagctcagtgatgacaaatgaccgctgtcagccgccctgtcccccccgtgtgggatccgtgctctctgttgttccacactacctggtgtttaatgacaacactgtcagctggagacgcagcaccaccgaagccgctgccgcggactgtcagagccctattaaagggaagattgagaccctactcttcttaaagtcactcaagcaacacaagctgctagttcccgttaattattgtgcgcgagccatcgatcgcacgccgacacctgacccgtctgtatgaaatgggaatagtttgctccgtgacagttgctatagattatggagagtggggcttcctcccctcttccccacggctctacccagcctcaggtgcaggggaagggagggggcctccctgccctccacggctggagaagacagtgcagcaggcagctaagggggttcccaaaaagggtgaacacaggccttgggcaggggtgcagaggagcaggaggaaaccggaccaagttgggcctgtaccccaggccgcgctccaagcaggtggggtaggctcggggcatgcaggctgcagcgaaggacagctgggcttgggcctggccaggtgtgtgtgtggccaagcgtgcacccagcctcggtccccacttcacaaagaagggcactggggcccagggcacgtgctctgtgaacgacgtctcccaagctctccccactggcctgcagccccagccagcctgtgtgttcagaaccccaggcctgcggctcacctgctcccagtctggccataagaggcacctgggacgggcccttcccagggctgggagctctgccggattgagaacgcctcttcaccttgtctctgctttgaccccccgctcctgcctgccccgcacctgagctccctccccgaatctccaggcccacctgtgctccctgccccacctgcacacacagttactgggagcactcagatactcgagggcggaagagcagcccccagaggacagacctgctcggggccaggacagcagctccaggctctgagtgaggcacggccaagccccgaggccctggccaccacgtctcagggtacaggacctagaggcggccactcagcacagcctcaggtctcctggtccacagggcccccagcccttctgcatgagcgccatggccctggtgctgcaggaggggctggcgctgtgggccagcaggcagctccagggccaggatggcctagcgcagagtcaggctcctgtctggggggacccaggtgattccactgggcagtccaggctggaaacggcctcagcctaacccagggagcccgaggcccttccctcccagcccacccctgaccttcacatggctgggcctggctggatcccaaggtcagtggaacagatctggggccaactggctgccgggcggcacggagacccagctccgccatgtggcacggccttctctcaggaatcctcttctgcttcctctgagcatagcccaagaaagactctttggagagagtcctggcaacaccctccacagaaagcagcggcccctgagagaaacgacgtgtcccgctcagacagaaaccgcaggctgccaggactccccggccacatgccgctctcctctgggccactcctggcctttcctgtgactgcgggacagtgggcaggccgcagaggggaggtcgtggatgccaggcaccaggtgtgccctgagggcctcctccagggctggtcttggcagccacagcaccggggccaggcccaccaaagctggagatggcacgtgggagccacaatcgcagtctcagggacactggcccgaccgcttgtgctccctctggcacatacaaacgtgcaactggggaccctgagaaggcagcaaaggaatccctgccctcagcccacccaacgggagccacaggggcaagggacagaggctcccctggccttgaccggggtggcaccagcccggcaggcagcccattgcctttgagggaagcccatcccctctcctctggatcctccatccccaagcacggggtgcagccccagcagcaatgcctgcctcccggtgatgcatccccagtgcacagtgagcgagggaccctatgggggctaaggccaggccagggtgcagcgagcactacgccggcctccccaggaaggtgactcaccggcctctgaaggaggggaggagaggggtagcagcgagtgtgctgacggctgactgggggcagtggggcacagggccaggcaggcagtggcccagcattcgggtcagggtaggagctggggaggcaggctgcagacaggccccctaccagctccattccccctaactagactcctggccaatgccctggggctccagccttcggggccaacacagggaagggtgggtgagaaccaccggggccagtgccagccctggccttcagggccccagaccatagtgcaatgggagggacctggggttgggagctcatctttcggtaagatgagctcatgtgtcttgaaagcgcaaaggttaaaaatgagtaagccttgcattcctcgttaccccaggcctgagcaccccacatcacagccgcagaaacggaggctcaggctgcccggaggcaagccccaagcggcaggcaggatctgaccagtgttcacgtgtgctcacactggcacccgtgggaaggacaggcgagcgtgccgtgctgtgtgcgtgcacatgcgccacagcggcccacacagcagcacggggcaagcggcccgcctcacctttcacagccgcaggccccacgttcaggccacctggggacaacagcctgaccagaccccagggcagccaaggccaccactccatccatgcacaggactcatcacgggcccaaaggctgcactgcaggggacgcaggacacccccgcagtcccagaggtgccctgccctgtgggaagccacggcccagcacctctgagcccgacggtgccacaggggagctgcgccagccccatgccatcccaacagacgcaaaccaccccccagcctgcctagggccgccccccaggcctggcaggactggaacagcactgctcgccccacccacctccttcccacacgaaggcacaatggaactgggtgggcttcttcggggctcaaggaggggccctggcagaaggcaggagcggtgggggtgcccagagctctgcagggcagccccagccctggatgcatggccagcatcatgaaaatgctgcctaggggccaccatgagaaagaggcaggtggggtctccccctcaacagaacaaagaagaggctgagagctcttcagcaggggactgatgtctcccgggagagggcaggttgggggcaggctcccctgctggaccccgacttgggaggaagtaagagcacccttccggggccactccagccctgcatgcggtgagggggcagctggaggccaccaggaaagcctgggggtggtggagccgatggccagctgcccaccctgcgcccccacacagccctggtgctgcttcgtcctcccaggcccacgcagtgggaaccggctgggaagcaccggggtgcaggtcagagatgtaccgcagggtgctggtttcagccgggcccacccagacaccccgagatcacccagccttgtaagcttctggctggagccaagttttgcgtcctccaatcctcaggcagagcccaggctgagccgtttccatttgccacaaggttctaggcctttccacgttttgtgagcgtccacctcgagacaccccagatcccagctggccagcactgccccgctaacagggctgtggggctgaatctcacagtgtccttctgccccatgggacagaacatctgatttcccactgacaggcagctcacggtgcccactagggcccacccctgcccaggagctaggccaggagctgccccctccctgcctcgttggctggtgctctgcccagcagcaccctccatggctgggtttctggcccgtatacccagagaggggatcaggcttcatagcagcaagtttcccacacacactcacagccacacaggtagacggcccgcccggcccacagggctctcagctgcaaacagctggcctggggcagtgaaacagaccctgggaggggcaggcccggccccgccacagcccctgcccagcccagagggttctcaacaagaaaaccacggccaccccaggggcagcctggctcctcccaagaggccttgccaacgagacgaggcaaggaggctggagacacagggcagaggcgcgggtgggggcactggcccgaggtcacagggctaccgagcacaccaagatccaggccgtgaaggtggtgatatgtgggtggagcctcgaaagtctgaagggactgaccccacactccacccactggtaccccctcccaggtcttgagggctcctcaagtcctggtgccccatgggcagcccctgcccccagcactatgtctgcctctggggagctcccagcaggccgggaggactgggtgtgggcaggaagcccaggctggagcagctccgggcctcctgcacatggggcatctgctacttgtgttttcaaagggcccagaaacaagccacgcctgcaaccctccagaggcacccaccggggcaggcaggaggtgggacaggcatggaggacttcctgggaggccagccctatccaagcagcctccccgcaccgccttacttcattctcaccaccccacagccgtgaggccaggactcagcccctcccccaccagtgcacctgcctggggctctcagagtctggggcccccagaaggggtccccaggaagaacgtaaattgagcacacatgcatctttcaggggtgctggaacaggagggagggtttttctgttctccaccccaccatcccaacaatgcagccccagcctctggccacagaggcggctcccatattgaaaggagagccagcatcagtgggcacggctgccatgggagtcctccctgctgggggctcaggggatacccgcaaagtgccctctatggaagggtcagactagaaggggtgtgtccacccaggtgtgtctctggggtccctctgctgctggtcaccctgtaagcgtgtggcccagtgctgagccccctgacgcctggtcctctgtcggccttccctagggatccaagttcaccccgaaacagaactgatgacctgtggcctcatcagagcctggctcactgcaaacgtcatgctgctcctcacaggcctttacatgggccacacacaaccctgtgggccacagcacctcacagcacagaagactccctgacctcactacaggcctatttcctttgcctcattaaaaatgtattggaagccaggcacagtggctcacgcctgtaatcccagcactttgcgaggccaaggccggaggattacctgaggtcaggagttcgagacgagcttggccaacatggtgaaaccccatctctaccaaaaacataaaaattagccggatgtgatggcgtgagcctgtaatcccagctactggggaggctgaggtgggagaatctcttgaacccaggaggtcgaggttgcagtgagccaagactgtgccgctgcacactccagcctagggaagagagcaagactctctgtcttaaaaaaaaacacacacacacaaatatattgggctgggtgcagtggctcacgcctggaatcccagcactttggaaggccaagttaagcagatcgcctgagcccaggaatcggagaccagcttgggcaacatggtgagaccctgtctctacaaaaaaaagaaatacaaaaattagccaggtgtggtggcgcacacctgtagtcccagatacttgggaggctaagctgggaggatcacttgagcctgggaggcagagattacagtgagatggcgcccctgcactccagccttggtgacagagcaagaccctgtctcaaaaaaatatatatatatattgccctttgatttcagcaagagtcctgtcctgggtgacttggagccatccagcctagcccttcacatacacagaacctgagccccctcatcctgatagtccagggcccctcagggtcaggggctagtgacggggcaatctgccacaagccctgcccagaggtgccccagactgggcctcttctccctggaagaggtgctttacctcctcctgctttcagcagtgctggccactactccctcgtcaaccagcactctggtgggcagaccctggctggaccacctggcccccacacctcccactgcacacaaccctccaggcttgctccacgtccccaggggctatagcaaagacagacgcacgatgaaaccaagctcacctgcagcgccagcggctcagagccagatgggggtcccacaagagcaggcagcttcagaatgctgccgcgacgcccctgcagttcatgttttcccggtgccctgtctggaaggtgatctcagggagggtggtgtttgcagccatcttggaagacactccccgctgcaagctccatgtggccctacagacggaagccacctcaggacaactgccaccatccctcaggcaccagcttggtgagctcccagaggcagtaggagaccacagctcagaattccaggacatccgtttgaggacccctgtcctcatccagcttgggcaggcagaccctctgctgcattctagggaagtggccaccgccaggcttcacgccaccaggagtgcattctccgcaggctccccacccctgaatcaccccgagataacggagagggcaatcagcaagagaagagctgctgcctcccaccgctgacctgctagagccagagcacactgagacgcagcacaacgctccagggccaactgagtcagagcggggccgcaggatgatggagagcaagctggcatgggctgggggcgggtgaaggacggggcctcactacaggccccacagggccatgtctgagcacccaaggccagccaagcccccggggcagcctggatgccaggagtctcccagacacagctagccagcgggggagggcgcaagcctggaacagaagtccgtgttcccaggtggccccgtctctcccgggcagcctccccagcccctaatgggcaggaggggcaagtgtgcctgggagagacaccgggcacagtgcccctgcagtgcccacagcctgtttcaggatgggccctggagcaacatggccggcacagagcagatcgtggtgggctctgagccccactccctcagtcctccccacaactccagcaggtggggacacagtcccagagtccacagttactgaagccaaacagtctatgacaccaggccctaggggagagctccctgggagtctgggctaaggttcccagggccctgacatgtgccatgctctgctaggagccaagccactggaagcgcaggacagcctcagtacttcatgcctgactgtgctggtcagacacacccggccgaggggccaagagctcaccgccagctggtcggcctcaaagaaaccccagctgggccaagaggccgcagcctcagagccaggcccccagcccatcacgctagcagcaggcaagtcgcacagaggtgggtcaaggaagcggccaacagcagctggcccctggcccttggggaggagactggcccctgtgagcttcaggcacacacctgacacctgcactgggcagcaccttcgaggcaaaggggagtgagctgcgctgcgctgcactggtggccgtgtggccctggccttcagctccccgggggaacaagaggaatagggagggcagctgatgcttctgcccacaagaccccacagcagggcacctgccagccacgctctgccccaagcccatgctctgtgtccacgctgtgcagaccaaccagtggcagaagctggcacatgtaccagcccctggatcaaaggcaccagaagggagcttggggccccagggctgatctccgagaccagggctctgtaatacacactcgagcaaaccaacagctaacttgacacttgatgtctgcaagctgctaaacttacggtcatcgtatctagccacacacctcccttgaaatgccatctactctctccgtgagccccaaggcccaggccaggcagagtcgcacctcgccatctccagccaagcccagacacagccatggcacttgcttggcttctcctggcctgggtggcacctcccagcagcgctcggcctgccctgaggctcccccaggagctggtgacagtaccagcctcctgctgagtgaaagctcctgacagcagggtcagcacagcctcggagagccacaggcgaggggaccagaaaggagggccctgaggggtggcaggtggtgcaggcacgggcgtgggcgcggtctcctcttcaggattcctgtggccatctagaagccctgaagagggacacatggcccagccctttccagaacagctgagcccagagactctgtgtccctttccaggcagagccacccaagggaccccacagcacgaaagggagaggtctcagctgggagccgagagaggagcgtccctggggcccatcctgagggggctccttgcatgtcgccctgctcccatgaggacacggaccagaggctgcggtcaccggactcagccctggaaagagggggctccagtcaagggtgccacagacagccctggtcttcctgctatgccttcccatgcacctctctacaggaagcacagtttgaccagctgggatgccgccactcagcacccacgcagtgaccagagctggccattcactgaagcagttctgtaccgagggacaggatgggacaggaggacagggaatgggccaggccatggaggcgggcagtgcctctgcaccactctcccaggaggcctccccacccagctggatgccacgcctgccacacaaccccaagcctgccgtccgcctgggcctggcactggccccgcttcagcggcatcggcctgcggctggcccagagcccagggtgctggcactggtgctgacgatgtggggggcctggagaacccccacagccaccatagttcaagtccacccagggctacaccaaaacccacgctaggatgcaggctgctgccccagtggggccacagagggcactgacttcagtgggggtccagtgggagaaccctggagagaccctggctggacattctctgtctgccatcaggcaagagcccagcacctcccaccaagagtcacacccatgacatcagggcctcgccaggctggcccaccagtcacagtcccaacatagccccagagctcagcggatgcccagtgagcaagggcagggccagttctggagaatgagtggcaggaagaccaggtgcctgcgggcaggagacactggcctggggctgcttcctctcccagtcctgctgctggtgccgagcaggagacccctcagggaaccaggacttccttcccatcaggaccccgcccagcacgcgattggacttggtgcagggggaaacaaccagtggggatcacggggttcccagacgatgcccaagtccacatggactctgaccacacccagctttgccacgacccacctgtgggaccacagcaggggccctcaggcaagggtcaaggtggagagacagaggaggctggcaggggccacttacgggcagcagatggggcacagaaggctacagccccagcaggggactaaacaggggcccagcaacatcctgaccccatgcagagaaggggccaaatcccagaaggtgcaggccacattcgtccccagctggaaagccgcctcagtgcccagagccacacccactccccagtccctcaacaggaggccagctgaggctggcagagccatgcccccattactttggtgggagaaccgagagctggtgaaaagacaccgccaggaggcaagcaggaggcaagcagcacaagccctgctggccatgcctgaagatagacccctgagaggccggcacaggaagaggacaggcgggcagagtgggaggaggaccaggccagcaggggtggccatcgggacggccctgtgccgtgcccacccgccacccgagcacttggcaacgtgcccctggctgcctggtgggggttagcaggtggtgacagagcctgtgtcctgcaccccaacacccactgcctggtggactcctgagagaggccaccagggtgagggacctacccaggctctcggacaggtgtcctgcacttgattcaaagtctgccaagacacgtgactggggggatgtgccagccctgggctgggaagagagggacaagaggactacctcaatccattcaacaaaaggagcagcccaagctgtccccagtgtggggacccagggtcctacggtggtatgagttctggctctcctgagaacgccaccctgcctgcgcagcccaggtcttcagcttggcacccacagcacagtgcagcaccaccacggcacacacgcgatcccacgccagttctgtgaagtaattaattagcacagccacaacccacgcaaaactggaggccgccggcatgcctgataatttatgcaagattcaaagatcgctgtggctgcctttcctgaagcctaattcagcattttctttttcccttatgaaagcaggactccagatctaactgctctcatgccctttcacggggttcaccgcagtaaaattgaacagcccagctgcacacagcaagcaatggtggatcacataccccagaggcaccaggcagagcctcccaggtgggcaatgctggccagcagcacagcccagcaggaacatcacaccgggccaaagcacccaaaggcaccgctcagccccacagcaaacattcctgaccccattcacagatagggcaccgagcaccagcaaggagaacgggcagacagggccaaagtctcccgccaggccacgcccacaccacgcctgggggctcataaccctgcctcctgcatccggcaaaggtccaggcctccagcaccggacatggggctgctccccagtacctagcagcatgggacagggtgcctgctcctcactctcgctggggccaggggagagtctccggcccctctggccctggcaccctcccccactgccaagacacagcaagcccaccctggcaaccaccctgcggtgcacctcgggccctgcgtgctcctgcctcctcgggggccgccactcatctctgcgcagggcaggggagccatattgtttctgaccacagcgctccagctccccacaaggctgggacccagacccagccaactcacaacagaagccaggcggcactgccgaggcgctgtggggccagcggccacgcctcggccaggcagcgacagacaccctccacggtcaagcttccatcctcaggctctgtgcagcaggtcagggctccacccatgcctcacattccatccacggccagcctcccggggagatcgccaggctcagaaaggcctcccagcagcctggcacaggaggttacggcgaggatggcacagaaaccagcccctctgctggaggccggggatcgaggctggtggcactctgcccacttgctcactgagcctctgagtgctgctgccgacctccaccggcctgcacatctcaaaggggcaggacagcgtcagggcagggagccctgtgtggcttttcctcctggtgggcagccctctgccaggccctcacccctcggttgcccgctaagcatggtgactgccccaccttcccgcccatggcctgcccatggggcctcctgagggagcgaggccctcccttctgcccaggtccagtcctctgggagggggggcgcctcaccctcaccaggagctgccgcagcctgaggctcacgtgcacgcagggcggccagggtgctccccacagcaccttcttaacaggcaggacggacaataagccggcaattcctgcaatacaaaacatgaggcaggaggaaggaatgcccatggtggcggggtggctggcacgcgatcttagaggagctggcctggcagaatggaccacggcccacctcacagactcccgaatgaggggagcaaactgtgcacacctaagggtgggggacgggcctggccagaggttgggcctggttggagcaagccgggccttcgaggtggggcagggccagtcgagagaaagcggttgggtttttcccatgcactggaatccacaggctgcgctggtcaccgggagaagccgctggggacagagggacagaggggtagggggccatcacactcccaagctggtgcctgctcagtgacacccccataagcatctgtggccaaacagtgcaaagccacagcacgggctgggtgcagaatccacccaggcctctgatgccagggctgcgtggcaaaccaccccctctccaaggcaccgggaggcaacacagaaaggatcgtgtgcacagggaggacccaaggacacaggagggccccagggacctctgaggactcagagaggtcacatgaacagccgtcaaggcaggcccttctgagaccgagaagtcaggaggcagcgttccaggaaatgtcgcaccacagtcggggggagaccccacacaggactgggcgggcggccagggctctggggaggctgcctttggcttcaccagggctagagggtgagacccagtatccagagagcgccgtgtgcctgagggaccccagcctctcaggtcccacctgggtcctgctctggggctgggggaagccacgaccacctggtggcagggaggggctgagggccaacagctcacacaggctctccctaagcacttcctcagagaaactcggactcggggaatgggcatccaggccccaaaagagtcacccaggcaggacagccctggcacctagtgacaccagccagaggtgggtccaagacccacgcctgccctttctgccagtgagctggggtgagtggagactccacttctcatctgcaaatgctgacagcagttcctccacacccaggggcgggcacggcagactgagggacgggtaggaatcgccctccgtgtgtacagcaagctctgggccagaggcagatgcccggcctggctcctgtcaaagcctgggcagccggcaggcctcgacccagcctggttgtccacacgagaccaccacgcaagccaggccctttctgtccaccacaggtgtgcccaggacctgccaggcccgcaccctccaccagcacactggcgacaagtctgggaaggcggctgcttcccaggcagggccctgggcttattccaggccacgggggaagggggcaggccaccggcatgcatccaccatcctgggtgggtgaagcagagagggccctcccactccagcagatgacgacaccactgcctacccacctaccatgacttttccctggcgtaaaatagcagacgtttccatgtggctggtaggaatcccatcacctcccgccaccaagaagctccccagcctgggcacagggtggtgggtgggagagctggccctcactcctggcctggcctggagtgtacagcctggacagcatccctctgcacaggccggccaggcttagggagtcatgcctgtcatctcagggtggccgagcacagcgacgggccccaggaggatgtaccacgaagctggccccacttcccccgcaccacagtgagagcctggccacagtgctcagccgtgtgtactgtaaacactgtactcgagaacactgattgccacagttatgtgagtggcaaacaggacaccatttttcagactccaaaaaggttttcttctcttctgcccaaatgccccctctagcatcggtccaccagagacagatcaacccaggcaggtctctactgcagcctccagcaaacattactcgcccaggccacccttctggggctgtcttctatctcctttttttttttttttttttttgagacagggtctcattctgtcacccaggttgcagtgcagtggtgcgatcatggctcactagagcctcaacctcccagacctaagcaatcctctcaccccagcctcccgagtagctgggactacaggcgtgtgccaccatgcccggctaattctcgcattttttgtagagatggggttttgccacgttgcccaggctggtcttgacctcctgggttcaagtaatcacccgcctcagcctcccaaagtgttgggattccaggcatgagcctcggcacccggccagtgtctcacatcctcatcccccagctgccaacagacccatccccaggagaaaagggaaggaagaaacggaaggcaaggggcacactgacagcagaggaagagacccccaggaatcccctgccccgcccccagccgaggtctgactccaggcccagaggacttcggagggccgggagaggcagggaggggaggagaggcaccgaagagtcaggctgaaaccttccaaacagtctcagtccccaggcgtgagcggccacagtgctgctgaacaatgcacttttgaattcaattaaagcgattatctgttgtgccaaataaattgtgtacagcatatatcctgtggcactttacacctccaggctcattattccctaactgtttcctcctgtttatgcctctcaaattaaattgctgataatatgcgccaaaataaaaaatgaacgcaccttgtcccaagaaaattgattctcccttttcctgaactggcgatggccaggttttatatactctgttcttggtgatcattagtaattcaattttctttttattagcccccttatctgctgagcaatatagtggcagggctgacctctttcgcacgggtaaatgtttaaaatcttttccctgattaattttgccagttaagaaaaagaggagaaatggcccggctcttagccatcacaatgaataaagcttaatgttgattgtgacggaatttctaatgccagggaaattgattgaacgcggcaattacgctgcaatagtaactcaggggagatgggatcgctttctcctggccgtagccttttggttatttaaaataatccaatttgcaaggataattatgtattagcgttttatctgccacttgaaatgaacaggggagtttcgatactggcccagcattagcaggttattgctgcaaattacttggtatctgctttctttcacataaaaaggaaattacgcgattaccaaaaaagggtggacggaggcgataggaggggcaagcatgccctctgctggccactgggccgcacggcaaggctgaagtgcggcgggggagggaggcggcagcagggctgcctggcagctttcagaagcccctgtccctggtgcataagtccacagggcagtcgtccccagctggacactgggacactgccgtctccttgaagaggagaggtggagctggaactaagcttttgctgggcagaaaatggggaaagaaaactcccaacagccaaatgaaggagcagtcccacctggctgccccatccacagcccacacgaccccagcatccaggaacgaacaccccagccgatggaggccttggccacccgggagggctgaaggagggcctgggaagggctcactggctcaccagagcactgcagcgttcaacgaaacaaagctgggccctgcccagaagcccactggccaaggcagaggacaggcaggcctcagttcctaggcaggcaggcaggcatggagacggtgggccttgcaggagggcacctgggggagccactcaacagcttcctgggccccagcctcccatctcctcagcagacgccctggccacgcccacctcccctgcggccagcttggagtctcacggtggctgtctctggggtcagccgcctgagtgaccaggccaggacgcaggctcggcctctcacctccgcgcacatctccacgggctccctgcctgcttgagagcctgcggactccgctccttggcctggcgtcagtggcctcacgcacaggtcctcccgactctgcccactcgggcctgccagacaccccggggccctggacacgcccctcccagggtcctcccctgtccctccctggcttcccaacgtaaccagaaccaaccccccgttccctcctgtggcctacaagaccctttcccaggacctggtccctctgccccgttggctgcatcccctccaagccacactcccagatggtgaactggccccacagcctccttgtgctccagaacacagtaagctcgttcccacctccacctcggcctcagagctgagccctattcgctcctctctgctcaggtcacctcctcagagaagccctcccactcgccaaccacctctctgcagctggccctgtgctctccccctgcctgttcctcagaaggcattttccacccaggagcaccttcctggctgatgtacaagcactccagtggctgcctgtctccaccactggaaggcggctccagcctcatcatctcttcaccttcactgcagtatccccaggagccggcaggctgccaggcacagtgactcaaccacgcttgccagttgggccagtggtgggcaagtgagtgggacgccttccccaccccttcctcagacaggaccctctcctctcactccatgcagccgccacgctggtctttttttttttttttttttgagacaaaatgtcactctgtcgcccaggctggagtacaatggcacgatctaacctctgcctcctgggttcaagtgattctcctgcctcagcctcccgagtagatgggattacagacgctcgccaccacacccagctaatttttgtatttttagtagagacggggttttgccatgttgccaaggctggtcttgaactcctgacctcaggtgatccacccgcctcggcctcccagtgtgctgggattacaggcatgagccaccacgcccagcctcacgttggtctttaactatgagtttggctgggcacagtggctcacacctgtaatcccagcactttaagagactaaggcaggaggatcacttgagcccagaagttcaagaccagcctaggcaacaaagcaagaccctgtccctacaaaaaaattaaaaattagccaggcacagtgacatgcacctgtagtcccagctattcagcagggtcacttgagcccaggaggttgaggctgcaatgagctgtgactgcaccactgtactctggcctgggagggaagcagggccctgtttctaaaaacattaaaaaaaaaaaaaaaaacgacgagatcaattacgcccttccctctagtgaggcaggaccgcagcagcccctcagctgtgcactccgaaatggtcagccggtgaagctggtggcctcccaaacccactcttcctggcaggagtccggggggcgccgagcaaggccccaccagcaggaagcaacctcccccatcccctgcctatgccccactctactagaggcctgaagagggagcaggccaggtgagcagggctgaacctgcacccagtggggagcctctcaccccaaccaccacgccatctgcaagccttggcctcctagggctcagcagaccctgctggcctcccagagctggacacctccccaacccctcctccccaagtgaccaggggataccgccaactgtccaagccacccctaccatccactcccagataagcccacgacctaaccaccatccggccacctcactgtggccaccagggaccgcatgggtctctgcttgctccctgtcaccaggatgaaatccacatgtcctggcgtgcagcaggtgtcggctaacggggtacagccgaccagcgcccccagccccacttcctcccaccccactgtgctgcaacacccggctgcatcgccccattcagccctccacctgggacccaacgccctgccctcccgcggcagcccccacacggctcttgggtctgcccaggcccagctccttccagagccgtctgaagcctccctagatgacggtacgcttggctgggtttcttttttttttgagacagagtctcgttctgtcgcccagactggaatgcaatggaacgatctcggctcactgcaacctcccaggctcaagcaattctcctccctcagcctcccgagtagctgggattacaggcatgtgccaccatgcccagctaatttttgtatttttggtaaagatggggttttgccatgttgcccaggctggtcttgaactcctggcctcaagtgatcttcccaccttggcctcccaaagagctgggattacagccatgagcaaccgcgcccagccttggctagatttctgagcaccggttcccagtcggagtgcccaggtccaagcctgctcaatccccaacgccccaccttctccagatgtcacagacacgagctcgggaagtcactgccctaacgcgcccagcagagccccagagtcgcacaggaccaggtgcacacagacgaacgtggctccacactgacccccacggtgtctggggggtgccacacccaagggctctagaccctcaccacatacccccaaccacgtgcccgcctggaggccgctcccccagtgtgtcctggcaaacatcaccgcagtgggggtcaacctcaaaggggctacgccccacaatctgcaggccggggccttcccaggccaccacaggggctctcaggggctcagaccagttctctccaggcgtgactgggcacacttagagtggtacagcaggagaccagaccaattctttcaggccactcaaaaaactcacacagtaccatgtgacactcagaaagggcagggcaggtagacctgcagccccagccagctgagcacagaagggccctggaggaggcagaggcctgggggtgcccagcgcagcacaagcgagggcttcacccctgcttaagggctcagcagccgccgccctctcctccctcaggagggacacagctgggtccataccaagggacacacagaagaggccacagcacctgcccagcagcacatcccacagccagactgcagggcgcagcatccgggccctatcctctatctgccagcccaccaccaccgtctgccaggcagtgccctcccagccagggcctctaccagcatgaggcagggaaggtgcccatggctcctaacacgccagcatatcccatcaggcaggcccagccccagtgcccagcgcccctgctcccagcataccttccttggtggggaggtgggcccggctcggtggcaggcgacatagtcggtgcgtggtgacctgtaccaggcccttgttgggggtcttcttcaggacagggctgctcttccccctgagggcctgtctccgccggaggctgaggtggctcttggcggtggcggcaggtgaggtgccgcttttcttgtctccaggaaggctgtggagacaaaatacaggcagctctcaacaagccctgggggttctgcccacccacccttcctcaccaggacccgaggagcgtgggagcagctcctgaaggccaggaccaggccacagcgggtcctttctggaccctgcctccctcagcccatggcggccctgcccaccctccacagccaggctgaggcggcaggcttggatccacaatcccagatgaccccagaactagggcaggctgccatgctcccagggagagcagaggggcctcagtgctccgtccccacccgcatgtccaccccctccccatctgcccaggaaaaaggagcctctacgtggggcaaagagaagggccgacatccctgaggagagcggccaccggccccaagtggcctgccaagcccctcagtaagggggcagcttctccacgctccctctccacacttcctggacagagggagctgccagcatggtttagagcagagttgccaccgagaaacagccaggagtgggagccgggtgcccatgcgcctcaacacggcacctatctgggggacgagggccagagagaatgagctacacgagccagcaacctagaccagacggcagggcaccactgtgtctgatgacagaggcaggacccccgccctctgcccagcaggtgcagccaccaccttagctgccaacctcatggagtccctgagcccagaccaagcactgtgccatgacaccatctctgagtctcatcacaagtccgcaagggtggaggccgggagagatgtgcgccaagcaagtgagtgactctgcctggctgcctggccaagggggctgggacctaacaccaatctgctcgccctgggaccaaaggccaactgcagcctcaacactccgcaagggaggccacagagcccaaagccaggaatgcctaaggaggctcccgcctaccagcagcccccggcccctgcccactcagaccagctggagcagccctcagcctgagggccagcaaaggccaggcctcctggagcccaagccctagacacggggcatgcaggaaagaccaggcacccctggcagggcccagagctctggtccacctcccagcacagacccgtggccggcaggtccaggccaggggcagacacactgctctctgtctcaccatccccctggggacacatggaccctggactggtccctgggagctactccccctgcgcctggcctggcacaaagccttccctctgtgaaccctgtgcaactggaacggaagctgcccccagcgagctgcttgtctctcaccggcaggagaaaggatgggcttgccagcagtgtgagggacgggaaacctgtcccctaagtttatgccggccagggccccggccccaggcaagcccaaaccaccacagcagcacttcctgcctcatttcttgctggaaatgtgaacgcaactgcaggcaaagctccgagctcagcagatccattaggggtgccaaacaaaccctcctcacagcccctcacactctaccgcagccggccgggatgcccaccttgtgctgctgcgtctccggatgatcttggtgcggctcttcactttgtaagccgagagcggggtctccccagagaggggcttcaagccactgtgtcctactgctggtctgtcccccgacggggacctagacaggactggggagagctgggaggcatggtccttgctgctggcctccgactgccaacggaaggaggaagaggaggaggcagaggggctggaggccttccacttgtacttgctgggggcagaccctggcttggaggacgtggctggcttcctgggcttgggctctgggtcagctatgagctgcggcttctccaccttgtttgccatgccagcagaggccttgcacacattctctgcagccactctgggactgagggccctccgagcaacccggggactcttcgaggaggcagccacccatttgtagttgtttttccggaacttgttagttcgacaggtcacaaccagcgaggcctcccgggcctgcctgggtcctgaggccggtctggcggggccccccactgagccagacggaactggctgatctgtgtggccagcatctactctcctgtccccaaggagctgtggagcacagctggccacggaatgagaacccagcttccggcccagggccacgccagtgcgtgggggcagagcggaggatgggaagctcgccttgacggcaatcacactctcactgactgtccggcggggctcccgggggctgtcgcccacactgcccactgacttcaccatcctgggcttaccaggctccttctggcagaccagaagaggatcttccacactgcaggtccccctggctcttgttggcctcgagggctgcagctgtccccgagggggctcaccttcaccttcccggggcctttggtcactccagggggtttcctcaaattcttccaaagagccccgctgggcccctgaggcactggcagagccagactttgatggcggtttaactttgatgaccacgttctgaccctgactgagctggacctgtctctcaaggacatgctgctgcgggacaggaggctggcccccccgggccccgtgcaacggccgcacagcatggtcggcaggagggtctgagggtcccgggggccgattcacgagggagtatttcttgcgccacgaaggcccatggtgggaagagtagcccctccggcttggacgagggtagcgggcactaaaggctctgccactgtggtaagtgggtggctgccacccagaagctgctggggtaccaggggccggggcattgccgtggagggttttgtagtcatcaatcagacctgagaagacagaaccacaggcccagttagccagagggtaaccgcgataatcatgactaccctggaagggcatcagctggcaagatacccccagatcccatctcacttctgagcccctgccagtttcaggaggggcagcccccagagcctgggactcactgacaactcagcccgcgtcacctgggcctgtcgcttctatgagccttttctccatcagctccacttcagtcctacttctgcctgcttcacacagaaatgaaccgtgtggtgtaacaagccttatttgctggtctactgagtccacagtcatttgctgagacgtgtcactcagtctgaagagaatcgcaatgatcccctctgcactgtttgaatcagaggggacaagtggccgcacaggccctctggcttgcctacagatggaaaggagtcactccactgagtgtaacagaactgacactctcgaggaccccatgcctgacaacaggaaaaaagaatactaggagcagaggccattgctctgccagattcatagtcttccctgcagaagaggaaacatcaatgggctagagtcctactgcagtgaactgacacaaccacaggactttccaaataagtccctggatagctaccccggtgcaggagggccaggaacacaggcaagggcggcagcagccagcctcccagttatcagcattcccccaccacaggccctgcccccgggggcacagaaagccacgtccagacgtgttgacgccccagagcaggtgtgatgggagctcaagaagtgtccccaagtgggaggcagcccacctggcctcttatccatacacactttcccaatccttaagtcttccctttgtgagagtaaaagcaaaaaggatttttaatttttaaagcttttttttgtttggttggttttggctttttatttgagatgtggtttttctctgttgcccaggctggagtgcagtggcccaatcacggctcactgcagccgggacctccagggcacaagcaaaccttccacctctgagtagctgggactacaggcgcaagccaccacgcccatctcactttttaaaatttttctgtagagacgggctctcgtcatgttgcccaggatggtctcaaactcccgggctcaagccatcctcctgccatagcctcccaaagtgctgggattacaggtgtgggccactgcgtccgaacatggattttctttttaagtttagaaagaccaatttgggttttttaatgtttaagtgtggaagctgaagcctgttcagtctgcgcctggaatggcaaggggagtgtgactgttcggagaaaaggggcatcaaaaccgggcgtcgaggctgggagcggtggctcatgcctgtaatcccagcactttgggaggccgaggcgggtgaatcacctgaggtcgggagttagagaccatcctggccaacatggtgaaaccccgtctctactcaaaatacaaaaattagccaggcgttctggcgcctacctgtaatcccacgtactccggaggctgaggcaggagaatcactcgaacccaggatgaggagattgcagtgagccgtgatcgcgtcaccgcaccccagcctgggtgacagagcaagactctgtctcaaaaaaaaccgggcgtcaaggaaggaacccgcgtgcgcccttagcctgctctgccgaaatgagccatgaactagtcccagccccgcagtggggcgcggggagagagtgggcgccgggggacgcgacagcccgcggtggtggggagggccgccgccccccgcgggttactaagcgacggccctgcctccaccctctgcagccccagcagggccggcaccactccctcgacaaagctggagccggggactgacccgggccctgagccggcccacaagtcctggcggaccctaccgtcccccaccccagccgccacccagaacacgcgggcggtgagcgaccccttcgacaagggggcaggggacccgccgcgaggtgagggggaaagaaggggactcgcgtcccggccccggccggacctaccctgcagtaggcggatctgccgccgtaatatctccttttcctccatctcccgagtccgcgacggccggccaggcccccacgacgtcatcgctacgcgacctttttcccgcgggcggggcggagcgggccagggcggagctgccaggagcaggcccggatgtctgccgaccgccgaggacccgccgtcgcgctgacaacggcagcggagaggcagagccgcgcacgcgcagaacgaggcggggacgtcactagtgagcgccgggaagtggcctggtaacggctgggaagggactgcttgggctctgggaggccgcgcgggcccagcttgtgcagtccgggatcgcgtccccttgggagacttggcgaggggcgagacctggggcccacccagcccataccgcagttccttcccacagtccctgcgtttcatttcgccccagttgagtgttgggggggggggggtctacgcggggacccatgggagaagggccagttaacaattactcttgacccaggagggtctgtgaaacctcttactgtggccagaggagaagacatcggagagcaaggttccctggatagacatgttgaacctctgaaaacatgaaagtttttagttcgtcattggaaacatgtacaagtgtaaacctctgtgcgctgttggtgggaatgtaaatggcgcagcaccgcagaaaactatggagattccacaaaaggttaaaagtagaactaccggatatgagggcgatctggctgcgacacctgtcatcccattgatcgccagggttgattcggctgatctggctggctaggcgggtgtccccttccttcctcactgcttcatgtgcgtccctcccgaagctgcagctcagtcgaagagaacgaccatacccaatagaagagctgggcttccctggtagaacctccaaacaagctctcaaggtccatttgtaggagaaggtagggtagtcaagattccagacacatccaaatgaggcgctgcatgtggcaatctgcctttctaggagaaaacaaaaatggaactacggtatgatccagcaaccctacttctggctatattcccaaaagaatggaaaccagagactcaaacatatttgtgcccccatgttcactgcagcatttttcccaatagccaaaagacggaaacaacccaagtgtccacgggtggatggaaggataaacaaaatgtgatccatacaaacaatgaaatatttttcagccttaaaatggaaggaaattcggccgggcgcagtggctcacgcctgtaatcctagcactttgggaggctgaggcgggcggatcacgaggtcaggagttttgagacaagcgtggtcaacatggtgaaaccccgtctctgctaaaaatataaaaaattagccaggcgtggtggcgcacacctgtggtcccagctactcaggaggctgaggcagaagaatcgcttgaacccaggaggcggaggttgcaatgagccaagatcaagccactgcactccagcctgggcgacagagctagactttgcctcaaaaaaaaaataaaaggaaaaaaagaaggaaa

SEQ ID NO: 681 - DNA, 23761 bp, Homo sapiens
  source 1..23761: mol_type = genomic DNA
tccaaaactctttcgcggaatgtcaaggacagcggagtctcccgggcaccctgtcttttctctgcattctagggaatgatttaggcctcaactcctgggcgccctctcgtgcaaggctttcctgggggaatgggaaggtgtcggtagaagggctggtatcctctctggagccatgggcaggcacagctgtgaagactccaggcagcaggattgagcggagagctccgagccccagaaaagccttgactggaagtctcgagttcattcctaatccccacctgctcctcaccacaatgctcagtcggttaaagagctttaatgagtgctgtttctcaaagaggccgggtcgaggagaggcccctctaacctgtccgcgagacggaggaagggggccctttcgcgaaatgaacgggagggggcgctaactccagtgttaatgcccagggacctcctttctcagggacatgtcttggtttcccctcatggcctcctttatcacacctgcgcgtctctcgcgcgccgggatcctttctcccaacgttttacccaggactgcagcccttgccctacgagttgagtctctagtgtgttatctaaggagacccagcattcccaccccaggagtcgttgtcttcccactccatccagccccttgctccaaccaagcccacgggaaccaactcctcaggagttaaaaaaaaaaaaaagtgtcaggcgaactgctcactgaggtggctcctgagcagtaggtgcagaggcaacaatgtatgcgggtatctagaggtccagtgaccacgcagtggaggagggaagatggctctggtgattcatttgaaataagtctcccagtggctgggccagataagagtgtgcgtgcatcggatgctaaaactcaccagatatctcaatcggggcccagggaagtgtcatgtgggctgtagcctcccagtcttcaggcataggccttcgcgcaggtatctgaatggagccttgaggtctgagcaatcacttctcccagagggggcagggtccagctaggaagatctctgcggccaactgtgcctcagacactccaccagcgcttactcaggtcttacagccgaactgtcctgtctttttctttccttgttttgattcccaccagctattggacttttctctgggaattcaggggtggttatttgacgttgctctgagctggaaatgtagaaaggtagcctttcctggcagacactgagaggatcctttcaactttttccattctataaagtattaataaattggttgatgatgtcagtgccattagggtgaaattgagatgagagaagtctttctcacaatggctgctttagggggtccctccattttgctgtcctgagactaggcccccagagatatttgtgtgaagcggtgaagaaagactgaggagagaattggaggcttctggagggcctcgaatctcgtccaggatgaagaaacaataacaggacaccaggattcaaaagaggaagagaaacatcacattatttatttccaaagaaaatagccaaatgcagcgccatgtacacaaaagcctttggagggaaaaggaatcacagatttaatatcatttacatttatatatttacaagatcaagccatggctttcaactttgttgttcattcaacaatcactttcagtcaaacaacttttattttcaagttagttcataatttaactgacactaaagagacagatgataaatcacaaacagtgtgggtagagagggtacaaatagtctaaagatttcagccaggcttttgtgtatatgtgaattatgattacaaaatgtttgcctgtctgtataattcacattcattgcaattattacattttctcataaattagcaatataaacaaacatatggagaccttcagttaacaaataaaatcaatatcaggaagaacattttgcagcaactataataacagcatgggttacagcttggaaaaacttctttacaagccatttattcagcacacacagagtagggggaccagcacatccttatttatttaaaccacctttaaaaccaccacaggagttttggggaaacctgaactgggtgaaagtttctttgctgggcacaatataaaatgaacaacttcacacgtgaatgaagggaaggatgggcatttacatgcattttcgatcactgtgttgtagaccaaaccttctaaacttcaattgccaagattctgaaggaaacaggaaattaataaaatatctctctccttcagctattctccttcttattaacggcagaaagggcttgttgattgctgctagtgagaagaaacacacaatgggtctatttttagcagaggtggctttgaaggagcaggagatattaacaattgcttggctgcattcttaagttccaaggatcctgggcaagaatattaggagcctgaggggtacccaaaggaaacccatctatgtgacccaacttgggctgattgaatgcaaaccagagcagaaagaagcagaaacacaattatggacttagggtatgtattctgcttgcaccctctctgcattcttttcctcatgtcccaaagcttgtcccgagggccccccaacttctgcatacttcaccagaccaggccctgaccctgatgtctaggcattgcttttgtttatcccttagcaagacttagacctaaagttatgtattgatgcagtgtgtggatattgttttaaaagaagtttgatttttatctctttagaaacggtttgaaactaacggggcagagggagtttgacagagaggagaacaaatcgctgacaaagaaccttttacgtttcatcagcgttgttaggacgacaagcaggaatgtctcagataataactcccacttcaaagatttctcagctcaatagaaagcggaccatcctttttattcaaccacaaggactggcactaaagaagactccactgtttgattttttttttcactgtgtttatttttcccctattcactggggtacttggataaaataaacaacaagacaattaagggaacatggacttctaactttcctgccatcttccccacatccccttggccttgggctcttgagtttgcatctaggactagtccaggcctaagggtaccacacaccctgccttagaaagaaacaagtttcaggggccgcaagagacttttgggatggaaaggaagaagagtggcacggaaagccagagtggaaattcccaagggcacagtctgaactcctcagactcccccagggtggctcccttccccccaagtcgccattaaatttaagcctccatcctactcaagagtcagaaaggcgatttgcacaaaactgagcttggaatgctcatttgttaagcttcggaggctgctttaaaatctttcactcctgatcctggagcctctttggggtgcagtcaagatgcacagagtccttgtgctcctccctttcctgaaagtgtcccctgcgccaaagcctcccacatcagggtgcagagtgaacccctaaacgtgggcaagtcgggttctagaaaggaagtatatactggagagcgcagtgacagtattaaatggcgtgaaagcaaaggtcagcgcaaatgtatcttaatagagtgtctgtagtgaagtgtgccgcctttgaagcggccgctccccgcgcgtatttccatggcgagcctaacgcggcatgctgatgcaccgtcaaactcacactttcaaccccaaaacccgactctttgaacaacccgagcttgattagacctttctccttttctttcccctcttacaaaccatttcctcgcctttagaaactcgccatcaaacccaaacgcgccctctgatcaccgcagaaagcagaaacaaagggggctgagcggcgattcaagcggctcttttcttccttcacattattatccatttttattatgatcgggtacaagtgcccattcgcgtgggttttgtttaccggaaattaaatgaaaatgatttagtccgcgtcaaacaaaaatatatacttgtatacacaagaaaaaaggtctgttagacgtaaatattatgtccttaatgaaaagcctggacgggctccaggcttggcctttcaggatttcagtgcgacttgcacattgccatagaaatcctaacttaccatgaagatgcaccgtggcgaagaaacactgctttgtgcgcgggccctttgatgtagcaggcgcgagatgcggggcgctcagctgcgcggagcgagattaccttgcgagcaacgcggtggacatctgtaacaagcaaatgaaaaattaaaggcgattagtggccgaccaaacattttgttttatttcattattttagattgagatagaaagcaaaatggggagcttagaaacagaagacaaagaaaaaagtcctacttcaggaagggggactttttaaacattggcagaagcagcaagttccgcaaatgccctctgcaccttagtggtggggttggtgtttcactatgggaaggagttgtttgttgccgactgcccgcgctgggtcaggcagcctctgggccctattgtattaggtgtaggcaggaatttcagtccccctttctcaaggacggattcactaaaggtgtatttggaagactgcattttttatttggagtcatgaaaatagttccactccagttaggatgttatttcatctgatgaaagttgtgggggctgcgggcaggagtgctaattgtctaattgcgtctgaagaggatagagcagaagaaaattcatcagtggcagggccaggaattgtttgctgggctcagattttaaaattgaggtcttttgtggggccctccccagagagaaaacctacctccctccccaatacacacacactgattttcaaattcttagggaactgagatgagtctgccaaagctttattattttattttcctttacttcttcaagtcttagctaggattttggggcagccgcattctccctgcagatggggggaggggggaaaaaggacctgatttttttccctttggccgcaattgcaaaggcctttctcgccccctccttcaacatctggttctttttttctggggacttcatacgcagcatatcaaatacacattcaatctagacccactgggtgtttgcctttacaatatttattattgtggatcatttctctagttcctcctacacctttttaaaaataagacgaacattgtgcaattactaacaaagaccatcaccgaattgacgcaattcacccagacacggccgcctaggtcaggtctctccactttagaggcttcgactcagtgacgtcatcagctcgctctacacccggagcccaagcacctacaagactacacaggcaacgcctctacaggggttggggtgggaaaaaggcccggggaggcctcacagcattgaatcctgaagcctctctggtgttcctttgtctgtatttcttgttgttttgaattcactccctactccaagtatacaatgtatattgagtctgtggacgacaggcagatgtttatctgtgtgcccaggccactccataggggtggaagcgtctaaccaccacccacccaccccctgctgaaaagacgatgaatctcccttacctcctttatagaggaggttggaaaaattaggacttgtgtgttttttgtttcaaaggatacctagggaaggggaaaccataggaaggcaaagaggaaagaaactggagtcaagaaaacggctctggaattccctttgcccccttcccttgatctgaacttctgaggttggaattaatgtgggggaggggagggttagagtgggggtgggagcggcccagtcctcgagaaaaatatttcccattctgcgaagcatgcgggaaatctgtggctttacttttgtcatctgcagttgacaggattgcacataaattctccaacttttttttccatctccctgtctcttttcgcccctaaccctggttttatgatacccagtcatgaaggcgcgtgtgggggtgatggtgctgattgtgactacagaataaatagggggaccatatttatcttctaaaataatggacattatattagcgtattcagtgagctccagcaactattacaggtggccggccggccttccttccttccgccctcgccctcttcatgcctcagaaacgtggcctactctgcattcggtgtgtgcggaagcagcaatcacagaggcagccctaataccggaggcggcggcggcagcagcagggccaggtggtagctcggggctgaggatcgcggcgggggcagccgctatggggcccaagccctgacacacgtaccattcgctcaagtcggcggtacgcgccgccaccgccgccgaggaggccacctgggacttgtggccgcagtccgacgagggcgacacgagggcagacggtgtagccgaatcgtagccagagctgggcggcggcgagcgcccgtgcaccttcatgtgcttacgcagcgagctggggtgcgtgtagcacttgtcgcagccccgcaccttgcacgtgtatggcttgtcgctagtgtgcacgtgcgaatgcttcttacggtcgctgctgttggcgaagcgccgctcgcagccctcgaactcgcatctgaagggcttctcgcctggcggaggcaacgcagagacattagtgcttgtgggtcgtgttcccgtcaggtgcttgccaccctcccccattcgtctctcattttctggaaaagaactacaaaatattttcagaaatccctttccacggcgcctcaggtcgagcacccctttccctcgtgcagagagcgcccccggtgccctctcttgaacgcctccatccctcccgccttcctcctctgggctcatggggagggtatggaggaggagcgacagtgactccatcttagtcgagtttccatcctcgaaaatcctgatccactcgggttgtttcctccaaattttctccacttggaaccagaagcacctctgctcggaaatacattaacggaggagctcacaatatagttaacggggaagctcacatctgctcgatttaaagttgctgtttcagactaacttctctgccgctaccccgcccagccgttcatcccccccacccacccccatcctggcccaaattgtttcctaaagtaggttttgcgcaaacgccaaagcgatgaaataatttaaggatgcgcagccgatgcacattgtgtgtgcataaagtggattcgtgctgcagggagaggtattctgagcaatgattcacttcagaagagatttttacaggaatggagccccctccctctttccttctaccccctgagggcaaacatttagcagcattcttcaaatcttgcctaaaccttccgggatccctccagatacgctcgccagtaataatatttcattacgctgctccagaggcttcctggagaccgtgctgtgggcagctggccctcccagtccgcactgacttgcgatgtcgaccggtctgcccagaccacccccacctggctgtcgggcctctcggtcctaagacgaggggttggcgcggtagggtccgcacaggccaaatgggatccgaggtgtctaccgcaaccacgcccttgagcgctgcggcttcgggaagaaaacagctgctgctgtcaggccaggcctggctccgcagcccggagggccaccaggcggctggcataggccggggaggggctgggatcggtggctgcgatgccctgtagagccgagggaaggcgcgagtgcacgttagagtgacaatattggccggaccgagccccaatcggggagctcacggccagctgaattcgctgacgtgtaggagaggaaaggaccccgagaacccggaagcctagattcctgccggagctgcaagtgctgcggaaatgggggaagaaggtttctgggcgctttaaacaaatggctgcctcccagcgctctgagttaagggaccggctacctagcgtctagctgaggaggaagacgcgcagctggagaactgttgcctttgtagttgcttctcccgccgcatccaggaaaaacaggcgctttggggctggttagaacaaacaaagccccaattcccgagccctgttgaggctcggacagagaggtttgcgcacaacctgcgcttctgcgcaatcagcggctcctgagcccgggtctccggcaccacctggtcgctggattcccaccctacaggagcacagctagtacactgaacagtctggaaggtgttggcacctgccatttcgcgggacactggcaccattttataaaacagtgatagaaagatgcggaataaatcagtgttcctatttgcccccatttttatctcctctgattcctgccagcatttgcaaacccaaaactttcttccttcttctctttcaaaaaaaaaaaaaaaattacaaaaaacatacaattcagggcctgcaaaagaaccaaggttattttgagaaaacagaggtgaaatggaattagaatttggtgcccctccccaacaacccccacccccaacaaaaatcccgccaaacgcttatccgatctcgtgagcgcctcactggacattcacgtaaaacaaaaacaattatttcgctccagacgaggagcagaggagaaaacagcagtgcactgagtgataccggcagccgggaagttcgcaggcccctaggaggccaggtgaggccgcgccccagcttgctccggagctgcaggaggcgccctggtctctgcgcttgacatcacccccgccccccgccaacacccggcctccagtccttccccctccctccagctccctgcactgcgccctgggtgggtgggtgaatgtgaagaggcggcgttgggctaggcccctgcagcccgctcggagcgtcctaggcccggggctgcgctgtgaaagacccagattctcatcccagaggcccagcagtcctgaaaggcctcctctccgaccctgagccgggtccgccgaacaaagttcggaagctcgggctagctgggccagcgccattttctcgcacttgtggctggatctggttgtcccggcgactgcgccccggcgcggtctcttttcctctacctcggatccccagcactgactcgccctcagacgccggggaaggtgtggtgagctcccggccccggccgaggggtccctggagaggagctgggtggcggtggccaggccgagcgcggttgctggcccgcgcctccctccccgaggcaccattgttccgggatcgctgtgaccgccacaaagtgaatcctttcggtgcggacagtcgccttcaaagccaggccccggattcaggtcagggagaatctcagctcctgagaaatttgctcctgtttgccgcttctgctactcgaggaaatgaaacgccattaatatttgaaaaggcaattattttcctgttgaatcgagaactgtcttcatgaataatttgtagtgaggtctattgccatttgagaaatattttttttccctctctctctctctctctctctctcactctctctctcttctttttatgactaggagggggatttgagggaaatgcccgagcaggccagactctgtagttcgttgttggtcgtgtttgtttgtttgtttgtttttgtttgttgtttcccccaccccccaccgctaatgaatcaggaccgcgaaccgaaagaacgcacaaaattctgtcctgaaaacacgaaaacctgagccagccgtggcgcactgaacttgcttctctgctgtaggtcgactgtgctaagaatttaaccattttctgcttcacagaattcaaacagtgggccggcaaagagctgtaaaagtttgtttgtttaaaaaaaaaaaaaaaaaaaccctgtcattaaagatgagttccttctccagctcaggactgcgagtctaccttccgggtgtccgccgccagctcccggagtagcaggcctggggccaggattccagtgtgacctaccgccccttcccgaagctaaaacctctggtgagggggtgagatccatgcgacattgtgggaaaccctgaaaagaactcagggaaaccgtacacttccagacaagctttagaaataaagtgccaggctccaagtggactttggtctggtctccgcatgtgccagtgtccgggccatggaccttccccgggaagggagagtttggggagaagataggcgttagaacaactagccttaggaagttctttgactccaacaattgtcgatgttccagcaagaataggggcgagtaaggcaaggcaccgggcagtaggagaagtggggcaccaagctggaattcattttattttctcctgtccccaccagtccccttctcccgcccccaaaatgggggaggggagaagatgttgatttcttaaacttccagggaggaggagcgagaaaaccctaactaaggagagtacaaacaatggctgctaaactaattaatgtaacttcacaggctgttctggaagtgtgaaaactttctccttgcagttgtattaattagagatgctctggccagaggagttcaattttgcaggctcttgaacgatactcctttttttctgttaactagaagtagcagatgtagttgacacatgtccccatttcccttagcagcttggtaaatgatatttaaggtggataggtctgtgctaaagcgaaagtgagggtccaccaaacatccctagtgtccggccaccaaggctcaaaaatacgtacaaagttagcccattcgacccccaactcctaaagaaggctccagggcctggtaacctctcagtccaggtgggccaggttatcaggactacaggtggaagagttctgctgcgcaattccaaagggacaaggaaaaaagttagacagctgttcttatgtctttacgactttggggaacaatgctgttttaaaatatcttaaaatcaaactcttaagcagagagcacatgtttgcacacacagggtcttaggcacgttcacccttgtcccccccagaacagaaatcccgcactatcctccctacacacagcctccggaaacttctgtgattctaagaatagaagcgcataattaatattttatggccttggctcatggaaacaaccccaaaatatttccccctcccctcagttgggacttgaggaaatccagacccgagggcctgcttccccagagggtccgcacgcgacagacagcgccgaatactgacctgtgtgagttcgtttgtgtattttgagattttctgatctagcaaagaccttcccacaccccgggaaaggacaagggaagggcttctcgcccgtgtgcacgcggatgtgatttacaagtttgtatttggctttgaagggctttccctggcgcggacactcctcccagaagcaaatgtggttggcctgttccgggccgccgacgtgctccacggtgacgtgcgtgaccagctcgtgcatggtgctgaaagttttggagcagaggctcggggtcgcggtgccgtcggccgccagccacttgcagatgagctcctgtttgatgggctggcgcatgtagcggaagaaagcgccaggaccgtggggcgcagcgaggttcaccgtcaggttcatgcccccgtagccatgcagggctgcggcagctgccagggcgtcgctgcgggccgcaggccctggcgggaagggctccggccgcgcgtacatgtctccagggagccccagacgcaggagtccattcaaaggacggctgggggaggcctggggaggctcctcgtggaggcccgggaacaccgaggggctggaggcggcggtgagctgggggccatggtgtccagagctgctacctgttgtcgaaacaaatagcgcgcatgagaacgggtggcgtgggctgcgcgctcttccctgggccccggggggcaggcccagccctgccgcactacggcctctgcagtcagccgtggaactcagagccagacagcgccagcagtgaacccggtggacagagcaaggccaaacacctccgccgccattgggccgaattgctgttgggccaagtcccccgccgcgccatgagctagagagggatggtagcggcagagtagatgtaaggggtaatggaaggcgcagggctgagtctgtgggttgctgggggttctgctccagaggggtaggagctgagccccaagcgcactttggcggctaacaccccggggctctccggggcacgatgccctgcggggagtggaggtgacagaaatgatgatgttggaggtggtggtggttctgaagcgccccagccatatatattttcagtgccccgcttggctaggagagggcggccggctgcttgccgacccacgctccccggagctccctgtaccgggccgctaacaccactgccacctgacagtggggaggggaaaggaaaaccacacaaaaaaacttctgtaaagttttttttttctttctttctttctcttcttcttcccaaggtttggatttgggcgcgcccacccccttggctattaatgcctacgcgaaatcctgcacactacagaagtagcagcagggcgcgttaggaagtcaatagagattcagggccgtggcctggacccacagagaggaacaatcgcctgggtagcccattggcccgcggccgggtccgacgtcagtgatgacaggtcctgccgcacgcggtcggtctctctctctctctctcacacttccctgctccaaccgccaccccctcacacacctctcccccaaacatataccctctttccctccctcaccccacccccacagcatctcaagcttccactgctcatgcgctctgacccgggcacaaatccttttctctccccttgagcctcctccccctcctctccggaaagctgagtggatcagctttgactcagggctcctggaagtactcggggctgggttatgccaccattcaccacaactttggggaggcagcattgcgggacctcagtcggggctgatgggcagcatcgtgtgcgcagagatggcggtctcgttgggcagtttgtccctgcagcctgcaagaggagggggtcgggatcgaaggaccgaaggaggttgctgactcaggagccaggagctgagaaactcctaggctagcagccgttgagcctaattttattttctggctttctccgaaatgtctcgtttccctcatctttctggtccttttcgtctctcttattttccccaaaacgtctacctcacttcgtcttcctttctcctcccctccccctctctttcctctatactctcttcccatttagccttgcaggcccctcctccccggtgttggagagctcaaagacgcgcgaaactcaaggatctggccctgaccagggacgggattaggcgggaagtggtgacggcctgaaaaggctgggctcgaacccgtgccttcctgaaaggactctccccgccacaagtcacacccacccgcaggcctgctggccaaagaaacaaaggagtcgggcgtggatccaggagaaacaggttttcgctctcggatctccctgggcaaatcagggatcctgagcgctataccccgcagtcgtacggagcctctgggaaaggggatttaagggtgacttccactttcagcttcggctacttgttgcctgcggtccaagccttctctgcttcctcctacctcgtcttaggcctctgtagaaagtgcacgccgcgtttccccttccaggctctgagagggcctgcaggcccgtggccgcctccgacaagatgccttccagtgctaggggggccactttggcgggatgggggtcggttggttaaaaaaaacttaagttctggctcagtcgagtgtggcaaaagccgagggtcgggggttggggggctttgggggcgagcggtagtcctttgtctgagccgaccggctaaggtcagctgcgtcgtccggcgatttaaagggctgctggccgggactcctgccttgtcgctgcagccgaaaatgccagtctaagtgcttgggcttccctggcggccataaaaagtgtcccccaaacagagaaaggcttgtatctttaagaaaagttttaaagattgagtaaaatatcccataccccttagcagaggcaagaaattttggcagataccagcaatgctgaatagaaattgactgaactgcccctcctcccatccccagcaccaaggactattcttatacatttcctggtcagtaaataaggccttaaaaaatttttttttaaaataattaactgatgtataacagttggcagattctttgagaccttcatttaatgcattgttcctcccttgggtgcactttagggagggattaacttccacaacaatttctctctacttagacacgtccaggtctttctgctcctcctacaggaagagcttggataactctaccaatagatactcctcagtatttaaaaaaaaaaaattagagaagagtatttgactgccagacccccactccctactctcaaaaccaagggcttccacacagcagttttgtgactagactctcaggatatgtctccctggctttcactttctcccatggtttactcctccaccaacaggcaccatctctctgatccttcccctgctctgatccttcatccaagcagtggcatggccaggtctccagtgaaaggtttacacatctcaatgagtcatttcacctcccaggtgtatgttgaatgatgcaattgtctaggcaactctggactgaatccatgaaggactccaaaaagcaaaacaaaagccagagtatgtttttacctgagactccttgcccagttgtttttactatccgcatcttaacaccaaacttgttcagcttatgtggtattcaggtttaagtgcaggggaacttctgcaatatttcggcaattaaaattttttttctctgctggaccctaggtaatctaaaactaacagttcagaatgtttgtcaaactcactttagctttaagactctgatttgcaaaaacacggattttttttttttttttttttgagagggagtctccctctgtcgcccaggctgcagtgcaatggcgccatcttggctcaatgcaacctctgcctccctggttcaagcgattcttccacctcagcctcccaagtagctgggattacaggcacccagcatcatgcccagctaatttttgtatttttagtaaagacggagtttcaccatgttagccaggctggtcttgaactcttgacctcaggtgacctgcccacttcggcctcccacagtgctgggattacaggcgtgagccactgcacccggccagatttcttaatatatacactgtgaccccacctccatcaaaagctttgaataacagtatggacagataggagaagaggggtttttagttgtttcaggctgtggaacccttaggaagcctggtgagtctgttgaacttctaatagtccagtatttgctgcacatattcatcatagaagaaaacactaactttccaatagaaggttgtgaaaataaagaggcatttttttctcctccaagtttatgggccctctggaattctaaccactgactctctggactccagggttaagaaacagaggttttatacacatagtctgctagcatactacacactttctgttagtcactttgcctttgaaaagctttgaacttgtgtatgacttttttgtgccagcagcaaaagggcaaacacatctgattcagccaaaatcctggagagtaggctggccccatggagctccttcccagatgcagccttctcttgaaagctgaaaacatctggacccattttaggtagcttcttcttgcttgagtagccaggggtcagtagacctgcaggtcactgaggttgcctgatctttgcaagttccttagagctatatggtctatatgttggttggctaaacccagcaatgggaccagacattctcctcgaaggacatttccccagagacagcaataagggattacataaggatcttcaaggtatatctttgaaataagccccaaagcagtatccagttcaaggtgatggggcatcaacaactgagaggtatattttagtctttagagagatcattttgagtcttccagagcctgggaagcagggaacccaggctacagagattatcaattgggctggctaaggaatggtgtctcctcagtgctcttcagattttttttccagaaacatctcactatacctgcccccaacaccaaatgcttgactgaaacattctattcctacccatgcctggagatataacattgttaagtctacttttctgcttcatttgtagagaaaaagagtatctcacaacccacagatctttagcacatgtcaaaatgaaacactggaagcttgttttcttggggacctatttggagcatattccaccactagaccccaaatatctcttgatcttcagagcctctgcaaaccagtgcccagaatcatgccctaagcacttttgctcacctacccagacgaatgcagtggcataaacaagtgatttcctagttcttttctagaaatagaacatttggtggccctaccatctgccagagctccttaaatcactggtttgaatgtctgatctcactgccttggaaagaaaaaaaaatggaggatatttcagatcaacagctgggctatttttccattttaatattttaagcaatgctaaattaaatgatgattgtttattgtaagttatgcccagatcaggaggtgggccttactcagctgagggccactgtatagaacctggctagaaacaagtcttgtcatctgaatgttctgcactaaatcaatagtcacttgttcagttctttcttccctgtttctggccaggttgccaccctaaacagaggtaaatttctttagaggctagtcacaaacagacttcaagattcctacacagggagtttgcctctattcttatgcaaagaaataacataagccccaggaggccatccgtatttctaagcccaaattgtgcaaaggagatgagatctgttaggattttggcaataaaagaggatattcttctcctctgctatggaaatttgagttttaaacatcattaatggaactgagtatggaagaaaatatacttggatatgctttaatttccaagcaaggattctacaaaacatcctgtgacaaaagcttaggaaacattgcttttgggtcttccaaaacagtattaaagaatcaaaacaactgaatttacataacaactcatacctctcttgagacttttgccattaaatcatccccagataatatagagagccatttcctgggttgtctatttgactttggttaggaaggttcctttgtctaccaatgagggaacatctttggaggcaaccatcagctagtgatatagttgaaatgaggaaaactagacgcctggaagggaaaataccaccctaaatcatatgcttattctaaatggaatattaaattaaattcttcacaatgaaggtattcctgacagagcagctgtcagtcactccctgttcagacaccacattgtgggaacctcgtcactaccacattgcagaaggctggtatccctggtaaagatgatgtatatcatgtaaaccccatcatccagatcaaagtctgcttctttcatggaagccaatacatgtcaaacctcattccaatcaaattgtctggaaatgaattcaagatgaatatgtcacagaataacgtgacagtggaattgcagaaggtcaggggtggttgtttcaatgagagaatcgtcaaatattaattctggaacgtccagatgagtaggcattgagggggattagctggctgctggtgggacgttgtgtcattgatttgtgtgcaaatgtattgaacactaaggagttctaagtttcatttgaactcaagaaactccccccaaactctcaacccaacataaacaaaagacaaaacaaaacttcctacttaaaaaaaaaaaagaagaagaagaagaaaagaaaccagcaaaccaatattcaaaggaggattttaacttacttgactctttaagagtgtttcggtaaagccgtaatcgtttcctcatcaccaaggatgtcttgtatctcattttctgactttgagcctgtttgggaagaaaagagtgacagtcactagttaaacaattttacacgtctgtgtggcaacatcctgtggtttgaatgtatgaatgaaagaaggagttgatctgaagatctttcggtctttctttgaccattttcaaattttgaagctaaagaaaaggattttgccgggaacagcccatattgcaaaatgatatatctttggtgataaaaacattgaaaaattataatttcccagctaggcttttatttgaaactcctttgttgttttttgcaagcagaagtaatctctcttttagtcagtgctcaaaaatctgtagcttcccaaatttgaattaattgcgtaagaaaccttattatttttcagaagtttattaactgaaatttagtgaggtgtggtggggagagcctactgaactctgagaggttagcagctaaaatttgatttataactgttggaaccaagaggagaggaatttctttgcaggttttcaaatcctgttctgcctgtggtggtgcagaattccttagcctcacatttcccataccccagacccatttgggattcatcaccggttgactttttaaagttaatataaaatttgtcaggttaaaaaggtataattttaatcgtttggttcaaatcatccacatttcatagttgagaagggtagaaataacacctcccataagatatacacattactcatcagattcactttgtgactaaagttaccaagccattggccgccttaaatacttaaagccatcctgaggacctctgcatctgtcaggcaaggctgaggcagttgagcagccagacagaagcatctatccggcccccaccctcaatttggcctagaaagaaaaacagtcattgaaaaggtctcaggctggacaaacacagcaagtcctctgtcaatggggatgtctgcccacagaacaagcagttgtttaacttgttgaaccacaggccaaatccaagtgggactctgttatcttaaacggtatccagttctctatgcacaaagatctctctctctctctctccccctcaacgtccaaccagaattccaactggcttggcggcttttacccttccatctcccctcttttctaggtccaggcctaggaggcaggggggtagactcaccttttcccagagggtattattattttcaattctttctaaccaaaaggcattcttccccaaaggtaataagctccttccagcacaaatcaggaaagaaaggaggcctaactttgcattcctacagaagggcggcatgctgggcgtcctcgctctgaaatttcctcatggcaggatgtctggcatggaaaagtcctggttggttggcaataatagaatttactcttttgcttctgggggaaatgggtgtgaggttccctagagatccctgtccacccataaggcagccccaacccaacttctaagaggtctggatcacttctctcccaggtcctgtcagccttttgtgcactacagacccatagacatgcaaacaaatattgcagagattggactagggcaggcaacagggaccttaggaggctctctgtagcgtttccatcacacagcctacacagggaactagggtaaacatctcctttagttcaaactctgacaccacttagcaaacaagccagtcatcttgctgaaagagaggtgagagaatttgggagcaatcctggggcccgtggacctgaggtcccaaacaaccacggaatgtagaaactcagtttcgttttccccaaatgcttgctccccacatcaaccacggcctcctaattaccagtccatagcacatcctggagactttttggaatctgccctcctggccccaccttgagaagaggaacgggtgccagggagctccagtgattgatagtgccggaggagagccaagaaggtgggacagtgggtaggtgcaaaaagcaccatttttatttgggggagcctcggaagctgcaaattgtggggccgacctagccggcgcaggactacccaaggtcagaggtcagctgcagctagagacttcagttcccgagctgctccttactgactagccggcaggcgcgggaaaggcatgcccacctctccgctgcaacttgtccctggcgggcgcagagcaaaaaccctgaaagctggcagggagctctgagccagagaggaaactggccccggcctttgcccgctgcctgatttactcatctgcaccctgcacctttctggctcccctccattcgaccctcaagcgccaggagtttgctgaggctgggttgtgcaggggcctttactcattctcctgttctctagagggagaagcttgggtttcccagctcggggctgaagtaagtgtgggcagcatccgggtgcccagaatagagtttgtatcagtagatcaggctgggcatttagccctccctttgaatcacccctcccccaacctgcaggcggctgagacaggagaaaaaagagcagcatgcagtggtgtgggtcgctgcgaggacaatactgtcggaaagcggggaaaacatgaccttggaatccaaagggagtttcctgaagacggtgacggccgaagtgcaaccctccaaaagcccctccgctttcctaagactttgacatgggccattcatcaaccccaactttcagatccaacctttgagccagtcctagctttctttcacagctcagctctattccctcctcattggcccctaatttccaatgcccctgggtctaggctaggggccagaatcctaggagctgcggcctgctccccagagagctagttgctgctcttgttcgcattggagataaagaaagccaagtcccgaacccactgctggccgcgcgcagagagcagatcccagcagtcagcttcctgaggcaggaccagggtgagggagggcaaggagccgccctgaggtggactcaggcggcatctgccgtcaggttggggcggagaagttccatcgtcttgctgccatctgggctaacttggcgctttgaccctggagaggggaagcagagactctcctagccacccccttgggggcagagcagagatacctcctgtaaaggccccctcccggcacccgccttgctcatttttcgcgagggaagctctgggccacgacttccattcttgtgcccacggtggggcacccaggcaattcacaaggagagaagggaaggcaggcaggcaacaaactgctcctggttcctgtgccagtgggagccccatttgtaccccttttccctcctcctgggaagaagggatggactcatcctctgcgttgcccctttgcggaagggccccctcctccccttagtgtcagtggggtggggcctttatccacggttgggggaggggggtaggatgaaggaggagatggggcagaaagactggctgggcctcttcccccactggggtttgggtgccagtggtccccttgagggtacttgctacccggtcgctggaggtacagttctcatctgtctgccccctggactcacgcacttaccccactccacctgttgccaggatcgcctcatttctgcacatcatttcggggtggctgagaggggaccacaaacccctccaagcctctcttttgtggttccagcgaggcggtcatccttcacttctccttttccagctttcaggaagcagttagggaatgtatgatgaagcagaaatgagccgtcaggatgatattttaatggcttatatgtcacgttggtgcatgtggctttgaactggagccgttcgcgtttcctgcagagagcgccgcaaatcccacttgataacttctacaacccacaacttttttttttctcacattcactcttaccctgtatatttggatgtgtttcctaaaaataccctcttgtcaacgtccccgttggattttccacggactggagaggagaagactgacttttcttttttgaagaattattttccctctccccctcccaacagctacccttccccccttaggtcccctcccttgttgtgtgtgtgtgtgtgcgcccgcgtgtgtttcctgaaaggcgggcgaggtgggttcaatatctgttctccctagtgagaggaatacagcctctagagaaaacttctccatacagatgaggttttctaaactccaggggaagcaggatccaacttccccttgtaggtaaaaagacttagtgcctccgatatatcttttttttttccaaccaagtgtacaataatttttaaagatacctcggccctttctttacctccactcctcattccattccactcaaagttggtgggaaatgctgggctgctagactcagacttgttgatgggaacagaacaattaattttttttccgaatttatatttcccggcacaagcacaaatgctcagccaggtcccttcaggcaccgggaaatcatcccggatacccaagccgacttttgagcaagcacagcccatggaaagggcagtcccgccggccagccccaagcgagaatctagttggtgagaagaccagaaaaccagaaaggcgaggagcggcggacgctgaccctgccttcctccagcccgtgcagtcagcgctggcgtcagggcaaaaaatatattcattttcattttcctctcgctggggcacggtgagtttcctaaccgggccgcctatgaaaggatgagttgaggtttctttgtttggaaaaagagtttagggctttgattcagctgcaaagaagccaaatgaagttagaaacaaagggtaaattgaaggattccgactcttggctttttgtgttttccttactagaaaataattagacctaatgaatatgcagacgcttcagctaaagcctcggccaggactgctgggttttaaacagagctgcggagaaatgcaaccttcgtccccacaaccccccgcatccgcgtgcattttttgaaatgcataaatgttgctcggcttaattgattgagtcacagggatttttttttcctgcttttaagtaccatactcccctacctttcaacaatcattttaatatatagtcaatggctctttgtggaagggacaaaaagaaactacgcgcagttgttgaatagactttgcgctaggcaaagacaggttaatcgagggccgcatcgcgaaaacaagcgagtgttgtatgtttgcactgaatccaaatgtctgcattttcctaactaaatcaaagggagtgttatttctttttctgctcactcatctgaaggtaagtaaattttctctggcgatcaaaagcctggtcggcaacaaagaccgcgcccgctttttccaccgtcctggtgtggcgagttgcggaatttcaataactgtgacaagggtgactgatttgtgaactagaaaaggtttgaatgtcacaaaatttacattggtcctatctattggggatttaaataccgaaaaagtattcggggatctctagggagcttt

SEQ ID NO: 682 - DNA, 11903 bp, Homo sapiens
  source 1..11903: mol_type = genomic DNA
gtgtggccatctccaactccttaagagaatataattcccaccctcaaactctatggagtttagattttaggaccattagctttaccaagagcatcctgaatggggaaaatatatatacataaatttcaaataattgtgtgtttgaagattctcctagcctgcaaaacaaaggtagatgatttaaacagtatttgcaagggccacgttttgcctagggaagatgaagtctttgatgatagccaacttagtgtcaataagtggctttctttgagacatattcagatgggaacgtcttgcttgccaattgccatagaaatcttaacacaccatgaagattgtccgagcgccaagccttccgttctggactaaattactttgaagtggcgcagtacgagcagtggtcaattttaactctatagactggacagagaatgctgggagtgggagattgtgcgttttaaagcagaaaataagaaggggaaacttgttttatacactctatacaaggttctgctcattgtcagatatcttttatcttttatatttcccatgaatgattcatgtcttggtggctttgtgtcacccttcttttcacaagaaacttcattagagagctataagttttcccattgattggggccctcatttatgagtgtttttctccttcgtgtgctggttattgtcatctgagttaaaacaactctttgcaacctgtttcacctttactacatttaacaaacctgacttttaaaagccactataacctttcagagaaatgcttattgacattactagcagttgcttttaactatctgacttttatcagttttgtatctgctaacaaaaacacaagcaaacatccagccttgtaaatgtgcatagccaaacacctgcatttaagccacttgaatattttgctgccatgcaagaatctaattgttcaacacacctggcccaaaatgctgagcttaaattaccaatagccactcaacttccagaacaaactacagtaaaattgcatcttgatctcccacgccataagaggcatttgatgcccactactcaatttcattcaatacctatctcagcccctgactgattttgctttcaccttctttttgtctagaagcctcaccgtcccttcctccacattttctttattcttttttttccttttggaggctgggcaccaaagaaatgctaaaattcactttttggcttttcactgattagaatcaatcaggatattacttattttaacaaataaatgcagtaacccaaaagatttatgctactgtaagtataacctgcaaggcttagtcttcataaatatctgtgtttcctagataagcttgtaagttgttaagttaaaccaggctgcaaaaatattgtattgcttggggagaggctgagaaatcaagagaccaagggaagacattcactccattagcaacctgttctatttgtatgagagatatgccattatgtaaaacataagcaataataacaagaatacctttattaaatttgttacttcataatcattcttgcttgctctctattggaggtacacatttttttttattttaggtgtatcaagaaccaataaatctgtggcaaagagttaacctatgcatggtaaaatacataaaatacatattcctttgtttcataataaataaacctgtagcataataaagaatagtgcaaactaccattgaaaaagttgtataaataaaacaactcattatacatcaggaatattttgttctaataagtttacgatacataaattatccccccaaaagttcataccttttctatttgaaagggctttgaaagtgaataatatgaaaatcaaataaacttttaaaatgtaaaattatctcatattcaagttttaaggtctttttctttataaaggagggtctgcatgtttcatattcatcacaacaatctgaagacaacattgaaaggctttccaagtgacagcaccatgcactgtactagtaatataatatatctataaactatatataatcttatcaacacaatgcaaaaaagacatgcaggaagagtcttggttttcacattacgttgttcattcaagtaagcttaaaaatatatttttccattttctttccttttttttttaaataaaccatggatcataaatgacaatctttcaccaaaatgtataatataattctttggtgtgctttgaactcttccaggaaagaaaaaaaaaaaggatgatgtctgaaaataaattaattcaactgtacaaataatagtgttcacatacaagttattaacaatgacaagactacatcaaccactcacagcacacaaaacaaatttctacaaaccctggggagggggtgtcttcggggtctctaaggataaattagtgctctttagtgtatctgtaggatgtttctgatggactacattttgcacaggagatgtgttgtaccaaccgaaaataaatcgactaagagttattgtcctaggtccttgaccttttttatcctagcttgacagctctggcaaaggtcacacattcatcagtgtttggtggtaactataaaccttttaaaaatttttaatatgtatggcaactccctcccctcttttaatgtaaatcatacacttcacacactgtcattttcaaatggattccagtttggtgtgctcagtgctcaggtggaagaaaatgcattaaaatgcagtttcaggcattgaaaaatagactttttaaaaggctgatacaacagtataaaagaggtgttggcctgttttaaaaacaacagctttccaaaaaaataggcatgatgccatcatcacacctcctcaagacttgactgtgaatgttggcatcccaaagaacttaggatcgaaaacagaatctctttattacacaagaagtttggacacagttaggaggcagtatctgagaattcagataaaaaaaaaaaaacatataggaaaaagaaagcacttgaatttcttctattttataaaatatcacagtttcacagttgtcttttgcagcagcttttcttctctccacttttgcttgaacaatcacagtagcacaagatatggagatatattaaggttgctgcatctttttttaaaatcacacagtaggatactgaagaaataatcctgtataaaaatattgtattaagctaagatcagtaataaaagagtggaaattaaaaattacaaatattaaactcaaagggtttttacaaatgtttttggacacaggtacggaacaggatctgttggcaatgcagcaggtgtgtggtttacaatcaagaggccttggcagaattagggtccaacaaggaggctcaaaagcagcccatggtatggtgtcaaaggcatttgagaggcactctgggaaatgcagagggccttggtgctgtgttaagttctgacttaatgctctttttctcccccttttaaaaaaaataatatatatatatatgtatatatatatatatatatatattgcatcggcagtgtgtatcgccattaactaatctctccattcattttccttggtacaatttgcccccagccccatcctcctgcaatgtacaagtccagcttggttgttttttgtttgttttttaagaaaaaaaaaaaaaaaagcccaaatatcttaattaaattaattaaatgtacaaacaccatagggtttcatactgaataaatagggctaattagacccggtggcaagtctgagtcacgggtttgtctcaggctcggcattgtctcaggttaggatgtggtccaaggactcccacttattatttcacttattattattaataataaattctaatgtatcgtccgcacaacttcagggttcccgtaaatttcctcatcttcagtctcagaggtggttccgttgctggaaggggtgtggaggtggctgggggccccactggcctggcaaacgtaccactcattgaggttggtcacctgaggggacagagtgctggagtgactcctggctgggtccagcacaggggacaagggggcgcccactggagtccccactgatgagtaaccaaggggtcctggagaaggtggcggggacttgcagtgaatcttcatgtgcttcctcagggagcttgggtgagtgtaggatttgtcacagcctcgaatcttgcagtagtagggcttgtcactggtgtggacatgggaatgtttcttccgatcactgctattggcaaacttcctgtcacagccatcaaattcacatttgaaaggcttttcccctgcaaggaaacacaggaaaggtcaacaatggctttccaagacccctctcttgacagaaatcttgaagcagaaccaaggttgtgtttttcctattctcccagagaccaactcccagcctaattcttcttcctaattcacaaaagggaagggatgcttcagggatgggcctggattctgctgacctggtggctttgcctggacctgggctcctgagaggctgtcaggccctgcagtcccagagggatcagggtgagatccctagtgctgagctaagggccagaatgtaacactgaaacccacctgggacccgcagaccccctcccccgacagacacactcccctcagggtctgtacactcaaaaacacaagcaggagatcctcctgtcaaaataaacacaaaatgatacttccaaagccacaggcggaagtaagcgtataagaaaaagagaaaaaagcaaacacatacactaaattaaaagtaaactggggggtacagtcaaattataataatggcatttcctttcagtgttctccaggatttcattgaaggagaggggcatcaggagagaacgtggagatgggaaagggaaagaggtaaaacaaaacaatgtttttctttagaaatagaggcacctgtgaaacatactcccaccactcgatttttacagggctagctgggcagagaacaggctgttgacctctgcattctacagctttcctcactacttgcagggcagttaagagcacagcagatcgagctttaacatacattaataaagaccacaagccttagcagaacctacctttactttatgccataagtatacttactctcacagctccctacattgcttactagtcaaaaagaccttaaaaaaatttaaaaaggccagggtcttttggctgtcacctccttaagctggcctaaccaccccacaaacacgcctttaaacacaaggcctctagtccaggaaatggaaatacttaataagacaactagagaaattcagccacactacattttggtgttaaacagcaagaaaaggaagacagcaggtaacagtctaactgaattttccctctccccttggtatctctgaacttgatagagttgagtccataattaaacaagtcatttcatacatattattgaattaatattttcctcttttaggtaaataatttaaaaataaagttgaatttctcatatttcagcagctactctggtgatacactaggtatgacattttcttttgttttggataacttgttttcaaaaacaaactgttaagcctcagcttagtgtacatacatttctgtggtgacttttcttacaccctctgcagatattttactgtagtgagtttttaaaaaatatttcgccaacgataactgcttccatggcagagtatgctagcacatctgagagtattcaggcagatgcctggaatttaactttccctacctggaaatactgtttaaaaacagaattagacattattcaaatatgcctcctacagtgatgtataaagagagaaaaaacaaccccatgataatcacaacctcgaaaaattctctgtagatgagctttaacaaaaacaaagctaatccctttttatcaaaacatcagtgatttgtcctgatttctacattacactttaagtcgtagataagaccaagttaacatcatattctttttaagaaattaaaatcagcctttcttcaatatggaggcgtaattacatgggtttactcatccaccctacgcgaaggtgcaatgctgtttttgagcatggtcgtttctgttcaacctacatatcccgggttgtgaagaaacgctttgaacactgctaactcctccactgcacatgaaaaaggggaacaattagactcaggaaagggacagatgtcgtggaaggaaaggtagaacattagagttaaataaaggaagaggtgcacggagaaaacagaagaaaacaaggcaagggcgatggaaaggcctgtgttgttcagggggcctaaggggaataagcaaattctacctaactagaaaggctgagagacctcagtgtttacatttaagattctgatagacgagtcacgtcagaatttaactatttacagagtttgagagcctggagcctgtgggaaagtaaggaactacttgcggaccccgccagctcctagcagctccctctcccgagagagcgcgagtcgggcccgcgggacggttataaacgggactgggggcacgtgggtcaggaaaggggccttcggaagtggcccggggattagtccctttgatcaatccgttccgggatcccggataacccccaaaagggagagcggcgtggcagggagggaaagaagtccggatgggccctctcagaacacaatgtccaatagctgagcggcccagggaccgccagaaacaccaagcgcgggttggagtctgaacccgaggcgcctgcgtccctcccgcagggacccccacgctccaccgggtggggcccacgcggccgccgggagggggcaggaaatgcaaccgtccgcgagacgcagagccaaaaacccaaatgaccgcgggtcccctcgccgcctggggtcccccgcgccccccccgaccccacgcacgcgcgcgtgccccgggaagccaccggggacagtgcgcagggcgtggcctgtcccgccgggggcccggatcggcttctgcgcccgcagctcccggcagccgcctagggaaggccgctcccctcgcgaggcctgggcaggcgggaagggccctaggccgcgcgcggccccgcgcttgggagttccctttcggggccgggctggggagcggcttcacggtccctggatcctgccctgccgagaagtgctgggcacaggagcgagcagccggcttagcgggccagggcgtttttacgagagcctcctgggaagtttcttcctggaaaaatcattaaggcggactgatcccgattagagagaaaaggggctcctgggaaaacgtgctccccaccggccatcaggcggcccgcaggagccaagccaaggctcccgcctcgggccaccccgacgctgctgcccccgcagagccccgagcgcccccggcccgagcgtgggacccggcggctacctcctggccgcagcagcgccgataaatctgccaagtgattactgaacgtaaactccagttacttaagtgtcctccgaggggtaatcgtatctgtccctataaatcccgactgcgttcgcgctcatcagcgcttccgcccgacgcgctggtccgctcaaagggggcacacgacccacaggagccatccaccgcctcgcgccgcagccgccctcctcagcgctgtgggatccccagaggcagggcttgaggtggggtgggagggtccccacgacgccggtggctccccaccaattccacgacagggtaggcctcaccgatggtgggaggctcgggtcctcctacaactagaaccttctctagaaaggcagatgtcaactccagcaccctccagggcgagtgtgatactgcgtgtgagagggcgcgtggggcgtgtaaatgatgtgagtgtgaggacacacaggtgtcgcgggaatggggtgcacgcgcaggaggatatgagtgtgtaaagttgtgggagacgcacgcagaagaaggtgtgcgtgaagagtgtgtcacggtgggcgagtgcgagtggtctccggggttccgaaagcgcattcctgtcttcccggaggggtcccttcccctcccggaaggcctgcctcgggcggcccaaatccggcagcaaatcccacgcccggtcctcggagcgcggagactgcgcggggcctacgacccggtgggaagagaggcgcttgccggggcggcccggcctctctttccatcgccctcccagacttcccagggccgggcgggtggggactgccgaccgtcctgggcgccttcctgctccagctgctgctgcgtctgctccgaggtggcggcggcggcggctggcgcgcgttgcgggtcccggccgaggggctgcgggcgcgctggagactccgccgtgtgggaacccaacgcggggcctgtgtgtgctatcgaattacttattcatagaaaaaaaaaagggggggagagaaaaaaaaagaagtcacatgtccgggttatacgtatgcgaagagaagcagcagaaggagaaaaaaattaaggcgagcaggaggaggaggagaagcagcggcggaagcggcggcggcgcaggagctggtggcggcggcggcggcgcggccggggacagacacccacctgtatgagtacgcttgtggatcttgaggttctcggagcgcgcgaagaccttgccgcagccggggaaagggcagggaaagggcttctcgccggtgtgcacgcggatgtggttgatgagcttgtatttggccttgaagggcttgccctcgcgcggacagtcctcccagaagcagacgtggctgctctgctcggggcctcccacgtgctccaccgtgacgtgattcaccagctcgtgcatggtgccgaaagttttggagcagggcttggcgccgccggccgggggcggtggcggcggcggcggcggcggcggcggcggcggcggcagcccggccagctcgtcggggtcgatccacttgcagatgagctcctgcttgattggctgccgcatgtagcgcaggaaggccccagccgcccctgggaggtgggggtggtgctggtgcgggtgctgcgcgggcgccggcggcggcggcggcgccgggggcggcgcgtggtgctgcaggtggggcccgggcccggccgctgctgcggccgccgcagccgccaggttcaggtttaagttcacggctccgtagccgtgcagggcggccgccgctgcggccgcaaccgccccgtagtgcgcgtccccagagcgcggcgcgaagggcggttcggcgcggccgtacagctcagccgccgcggctgccgctgccgccgccagccccaggcgcatctggccgttgagcgggtgcgggtggccgcctggggcccccggcgtgtcgtgcagcgcggggaagagcgccgggccgccgctgccgtccgggcccgcgtaggtgccgctggcggagatgaacatgccggccgagtggggaggcggggccgggtgctggggggagccggtgccggaccgctgctcccctccgagcggggccccgtgcatggccgccgcgggggccgtggcggaaaggtccctccggaggacgaagtccctgctgtggcctttgccgctgctgccgccgccgccactgttggtggtggtgtagcccgagagggcaggaggaggaggaggcgggggagggggagggggtgaaggggtgggaggaagaggaggggctgggggcgggggcgcggagggctgcgcgccactgctgcccccgccgcaggggtagctgcccgcgccggggtgcgcgaccaaggctgcagcacgggcggcggctgccggagcctccgggtgtgccgggaacgcctgggagggagggctgaggcccagcgtgctcgcctgggccatgtgctcgggtccgagcggagtggtggccacgccggggtcagcgcccaggtcccgcaggcggaggtgcgcgacggcggcccggagttgggagtgggcgggcgggccggccagcgccgggaagcctgtcatattctgaagcggctggacctgagccgttgccaaatccgctaatctcagcgctggcgggttcctcttgctcaaagggggctccatcagaactacacaatcaggcccatagaccctcactggggggactttattccctctgcccgccttcaaaaacatgtatgtattgggcgctctttaacttcttttgtcctggcctcttaactctgcttattcctgttcccactctatcctccagcgattggcagagtgaacaccacatttgagctgcacagtgggaccgagattttggaaatggcacgggtgggattggagggagccgcgtgattggcagtagcctcggctgctcgattggctcccgttcaggccctcgacccagcggggattcgcccccgtgcttgcggccgcctgcgctttcgcttcgcgccccctcctccgctggagccacacgtccccgcctccccggggatgcccaagttgcacttgcagaaagtttgagcctggcctgcgcgcgcagcgccccgctcttccttgacgcacctcgcggagcgcgcgccggcacgcgggcagagggcgcggggtggtgaggggctgaggacccccgaggggcagtcccagtttcaaaaaccttggcctcacttctctgtgtgccttctggcacccaagtactttctgcctctacctccacctctcttgtggggtggaagagccctgggctgctgtttgggagagaagggtgaatagcccgtcctacctgtagtggtgatgctagaaacttcttgtttggacacccaacctgcctagcgctcacctagggcgcatagacagtagacggagtgaagaagataaagtctattggttgcaagacaacttgagtgatttggctccgcgaaacaccaggtgaagtcaaaataagtctttcccccaaaggaaccgttttacctcgactttttatctcatggagagtccttttcaacatggttcaaaggagttggatggaagtgtaatctcactactcatcggttctagatctgccacttccaattagatctacagtaggggcgggggagaggagatcgggcagcgattctaacttttgcctttcggagatacagtggcggggcaggccaaacggcatctctgcagagagaagccgctaaataagcaccgtcctttaagtagaatttctccttccggtccagatcccagtccacagtccacatgtatgcctcagtttctttgactgatccacaattagaactgatccaataaaatattattttgaaatcaagaaatatctttgctttttatttactgatagaataatctttcacctttttatcgttttctcataaaccagtctacctctaagatgtcttatttgaaaaccataaaaactggcttttaaaaaagcgaatcccatccctttccagaggtttggtatcaaatcgattttttaaaaatagaaattccctgcatcactttttggtgggcggagaaatgtgggaccctccccccaaattaaggattttactgccccaaaagtgtccttttcagattttaaaagaaagcatttttgaaatttgtgatgttacaaaatgctcaaatattaaagccaggattttaaaatttgtattttgctgtcatccgtaacattacttgtaaaaaaaaaaaaagtgataatgattagaatgtgatctttttctttggggatacaataaaatatgtttccaacttaattcatttgcagtccaagtaaaagtagactgcacaaagccgttattggggagatggccgtgggaagtaatcagaaatattctgaaaagagttgattcgatagtgccattcacattggtgtgaacgatgtttaacagggggcttcggtatgagacttaggaatgtcatttc

SEQ ID NO: 683 - DNA, 250493 bp, Homo sapiens
  source 1..250493: mol_type = genomic DNA
gcgcgtgcgtgggcggcgcgtgtgtgtccaaagagggctgcgcgggcgccaattatgattgggactgggggtgccgaaaatcaggggtggggggcctcgaggaaggggtatggaagaggaagtgggagaggagggcgtgtgtttgtgtgtgtacgttaacgtgaggatttagtgcccaggggaacgtttcgtgttttgttttttgattgtatgtggggttgtgtacagcgatgtgtgtgtgtaactgcgtgtctctgagcgtgcctgctgtggccgtgtaagcgggcatctttgtgagggaaagtaagcgagtgtgtgggggcgcgtttgtggtttgggggggagcgtgtttgcaatgctgagggagcgaacgtgtgtgccgttcttgtaggagtttccgtgagagtggcagtggacgtgagccaaagtgggcgcgtagttggatgctctcggggggggggggtgggtcggctaggggaactcccgcgagtgggtgcacccaactgcgcctcgtgagtaccttagctctccgctatctctggcagtgcccagtccggggcagagggccaggccccagcctagcagctcccacgcagcccgcgcgcacagcgccccgggcgctccgcgccgggcctaggggaatccacgcgtctctggactgtgctaggtgccgcggatcaactgtggccaccacacccccgctcccccacagctgtcggggggccgcgctctagtctccctcaaagtcacccttggtggtggtggtcctcttcccaccccaaccaccagtccccgggctgtaggaacaattccaaagtcaaccccaggggaaggctttggaggtccagttaccaactcgcttaccccaattcgggtacctgacagcgcccggggccacgagtgcactccaggcgggggcgtgccagcgcggggcaggggctctcgggtgagcagtgtgattttggcttcctccccaaggtggtccctacctaggctcagcatttgttcccctctccaaacttactggggctggggcctgcaggggggctgggggctgcagggggcgtcagggagtagcggagggagtagggcaaggagagaggtgagtggactggtggcgtagcggggaaccaggagccaggagaagaaaagctgggagagcgccgagaccgaggagcgaggaagagaggaagagaaaggaaaggaaaggcgagggagagaacgaggagaggcgaaaaggaaaggggaaagagagcgcagagcgcgagccaagccgagcgccggcagcggcggcggcgcggcgcggcgctccactccggcctgactccgcaccggcttttgcgggcggccggcggcgcggggccctttggaaatagaatagccaatgtaatctgacacttcaacttgctcggctccgggcgagttgattcacttactcaccccctaacgccgagttccttttcactgtctgtggacattaaaaaagcgagcggcggcggcgggcgccggggagagcgggcggccgggcggcaggcgggcgagcagcgatcgggcggccgagcgagcgagcaacgccggcgcagcgcggtgaccccagccccagccggcgcggagcaggagccggagccgagcggatctcggcgccctcgctgcgctcctcccggcccgagcctgccctacccggcggtggcggcggcgcgtcctccagcggcggcagcggcgctcgcagcgcccggtaagtttggggccagagccaggcgcccgctggctccggggctacctcccgctccccggggactctcggggtgcaagcgtggggattgggtgctggggtttttcccttaaagtgtcccccggagcggggcgaccggccggcggcgcgggctccgctccgctctccttggcggccgggggccgaggcccggcggccggcgagctcccggctgcgcggagccggcttgggctgcgcgtgggggccgggtttgtcagggtgtgcggggcgtaagtgtggtcgtgcgcgcgcggacccggtgcccgcctcctgccggcgcgcctccagccctcgctccctacacccgggggccgggcaggaccgggaatcggaggagggagggaaggaccgcctcggtctccttcgcctcctctggggagatgcgaagttgtgcgcctgtgtgtgtacaggaaccgctggggaaagcgctggatttcaggatggcaaggggtggtggtgttaacttgtgcgtctgaatttccagggaaaacatacacttttgtaaatgggaggtgggggcgcggttaagttgtttgtgtgggaattgcccggggaaagctggcgcgcggtacaaacgagaaacgcggaggtgtgtgtgcagggttttctcccagggcttcgcaagccagaggggcgctcaggccagtgcctggacggggctgccccggccaggaggggagcccagggggaagatgtgcgtgtgtgtgcgcgcgcgcgttgcaaatacgaaagtaatttccccgtgttctttcttcctctccgtctccggcggcggtggccccgggggagtgggaggccagccggggcggaggttggggggccggggctggagccggggtcgggggggggaggcgggttctggaagcttgcttcacattcctggcgtctgggctggggaaaaaacagtggggagcgcggcctcggcgtctagggcgcgggcagcgggcgcgcgtcgccccctcgctggggacatctgtccaggaagccggccgggcggggatagggcgcggtgcggagggcaggctccccgccctggagcggtgggggcgcgggcgaggggcggccgccttcccggccattgtgcgccagcagattttcacgggagactgccccggagccgccggagaaggccgggagccggcctcagccccgggtttaaaagacactccaggaatgtaaacaacccgggcgggagggcgggcggacgggagcgcgccagggcagccggtccgggccccccacccctccccggggacagccggtcggcactgccgcccagccctacccctctacctgcagcaaactttttccttctctgccttcccttcccacctcgtccctccagcaggtcacagagcgagggccgctcccaggtgggccaagggtgcttggtacccttgcctgaccggggaggcctgacggccgggtccctgcttcggtgcccggagccccggctgcgcctgcccgggagccgtcagcttcctgggtaggcagtgcccgagtaactggggctttgagcctgcccgcctgcctccctccctccctccctcccgctgctccttcccccgcgcgctctcccccttctcctctcccctgactgcttttccaatgccctgacatgagggaggaagatttaacttggcagcccaaacaaatgttctctcagaggtcctccaagaagctggcggctgggctggcggggtgagggcacggctcggccagcctttccctcctctctgctctgccacggacatttggagccctctgggtggacagcccagggcatgggagagtagggcccagccccaaagatttaaaagggcagtgggcggccgcctgtggaagcccctggctccgcgccgggtgcagagccgctccgagctgcctcctggtgccaagggttttctgaaggattttcttgagcaacagtttgtctccctgctgcaacctgggaaccgggcctggtagaccagagggttaaccagtgccgactcctcctccctggtgggtgtgaggacaggctggttacacagggcagggcaggaggccagaggctgttcccagaggtgcctgggtttgcttattactgtttttgaaggtacagataaagaggcaggcgccggggctggagagccgggcagcttggcgctggtgaattccagcctgcgttcgctggcgcttgtacggtcccgggagtgtgaagctgctgttgagctatcggggaagttgagatgagagagcaagctctttcttagccttctcagccccggctgctttgtgagggggtccagagtgggggaaattcctggcccctcacttgctggctcctggccccagtgcaggggccgggtgggtttgtgaataccccaagccttgggctgacctttccctcttcaagtcgaggatgttgaaacatcagcatcaaacaaaagacacattgaaagccctatctgctacagagcacgtgtgagttgggggcccagggaatgcatttggagggagatggtgttttcttctgagctttatgattttcggttgggttttgttttcccccaaaggacagaagcgtctccttgtcccaaatcacgaggttttgaaacgctgttttcacatgtaaatctcaaaagtttagacttctgagagttggtggcagtgactgggggtgggggctgggtggggggaggagaagggagcagtagggagtggattcaagaggtggatttggcattttgggtagggcttactgagaagagttgggaataagaaattgctggacttatgaataaatagccttgtctatgcagaaaagggttgctggcttctttgtggggacaaaatgtcccttttccctcctaagcaaaggggggaggagggttcttgttcctctcacagccaggggcaaaatgaagaaaggtccagagactgcggggtttggcgacagaaccagtttctccctcacgcacgcgcgcacgcacactcacttccctagccacaataacaacgatgtctccatccctggcccccatagatatgcctccaacataggacaggtgtccatgcttgactcattccagaaaattgcaggggcaaggacccaactgagaagagctgcagacttcactttttttcctgtttcttcctgatggcgggaggggtgaagggatttaggaaggaaggcactttgaggcctgctgcatcctgagagttttgtcacaagaatacctgcgtataaagccactgaccctgagggtccaacgagtggccatgaccctggcctcagggtgaggcattgttgtaagaaattcaggcaccaaccaattaatttccagaagcttctgtaggcacttggtcgtgggaccaggaagcagggcctgctggttcgtggctgggtcctctacattttcattcataactttgctccccagggccctggcccagcccctgtcactgctgcctggtctttatgaggctccttagattttgtgtggacaacaaaggccaggctgccacgattacccaggacactgctgcagccttgcctggcgacagctctgacctcttagcaggatatagtgctctctgctcatgccctttgggggagtgctctttgtccttaagagtccctcaggatggggaggcagcaatccacctggctgtaagctccggggcgttctgaggttgggccctgcctttagagaggatgaagggagaaggctgagaaaagcagtcctaggcataggctctggggagaggctagaccccatcatgattgagagggtctccctattaccggaggagatgggcgagaggaccaaggtgtcaggaggctgttgcttgctatctgtgttgggccagtaactctcctgtgctggaccttagtctcctgatctgtaaaatgggtctgagggcagaactcctccgatcccacttggttgctgggagaatgaggcagatgtgggcatgagtcccctaggcatgtgtcccttgaaggcctgggaggctctgggtacagaatgggtagaacacaaagggtttagattgcaagtgctagaagcattttgctgaagctgctctcatccagacctacttccctggcagctgattgtccagtcttggcttgcatgccccccacaggacagggtactcattacctcctggaagcctctgccttcagtgggcagttgtgagtgttaacatgttctgctacatgccttctgcaaatccacacctcctgaccccactctgggcttgagatgctggggggccctccagaccatagactcgttctttcctgaatgatcctgggttcaagaccagtgcctaggcaggcccctaggtagggggacacattcaagtggctgcttctagcccttattgggaatgacctgttgtggggggtgcagaagggggaagggtctgcctgggggtgctcactgtcatctgcctttgtgtgccaggtttgcctctgggcactttccttggagcggggtatgagaaggaagggggtgcgtgatgagggctggggttgggtcgggcccggcatgggtgccacaggtgttgactgtgagtgtccaccctgtggataaagactgtgtcctgggagagaccagaactgtggaagacagttcctgttcctcaggagcccacagtccagtgccggcaggaagatcagtccaaataaataattaaccgctaccagctggctgcctgccacgggcgcgtgatgacagtaataaccacagcccctctcctttgtatggtacttggtggatttagaagctttttccatctttgtttatccccaataacaacagtgtaagctagttactatttggaattatccccatttaacagagcagaaaaccaaggttcagagcggtcaaacaactggtggcaaagttaggactgaacctcaggccttaccgataccaacccctgcgctgcctcctttccagtccactgagtgagcgctccagccaggctcggacacggtgcagagtcaggataggctccaaaactgggtgctgggggaatgaggtgaaggaggagccattctcaggaagggtcacagatgggcctcacctgtcttccccctcccatatggcagcacatggtccatgcccccagtagctgtgtccctttcttttggcacagtgtcttacagccagagcttgcttcgagacacaaatcctgccttgactgcccagggcacacaggtctatacatggggcttcatgcccttctccggctctggagtaggaggcagaggtgtttccagccccccgggtccccatgaagcccagtgctcttccttgggttcctatggtttctgtagtccctcttcgggctgagtcagtccccaggctatgtggggcacccactccgtgtgagaccttaggttctttctgccccttgcagcctccacccttgggcctggttttctgtagctcagctgagtgccaccctaggacaaggctgtagctagtggggttcaggccagggagcagccgggcaggctgagctggcacctccccaggaagcctggcccagcctggcacacctgtgcaggtaatgactgtggcttgggagggccccaggccctgcctgtcaggcccagctgccggagttactgcaggattgtgctgggggaggctggggtgtctgagctaattagatttcttagatttcaatgctcccctaatcctgttagtctggctgtaattgtaaccacttgaaggtttcggctgtggcaggctgttgaggacagacggtggggggactgtgctctgccccagccccagctccacccctagacagccagctgagggcctggggactgccttcttaggtcttgaggatgggggcttgagtgatggtgggtgtcgtgtttttctgtagaaactgagtatcgcagactgtcagagtggacatagccctttgagatcacccagctcaaacccttcactgttcagatggggaaacttaggcccacagagggacagagactggctcaggaccttgatggctggtagcagtggagcatcaaagactagtggtctgactttgggatatttgtccctaggcacttcagggaaagtctggaatttccagggactagtgaaccctccagagacttctgcccctagagatagggcttggggggcttcatttgtccccaagcttgttccccagttggcagttacctgtcttatattcccccagccctgtgtgtgtgcacacctgcacacagctgcacacacatgcacacacatgcacacatgcacacctgcacacatgcaaacgcatgcacacctgcacacacatgcacacactggccctgctggccagggcttctgccaggactccggctgcctggcccagggtcctgagacctgagagctctctccgtcctcccccaccactcttagccagatacttgccctcttggagcctctgattcaatgcagatcaggaaatggccaagctgttctgatgggggtgtgtgttaaaatacatacactgtactttccccagctctttcttcgaaagttctgttttggtgtctggcttaaatggagatctgtcctctctccccgcaccccattctcacttcccaatccgcaggggatgactggcagggaggatggggacggtgtgccttggatcttcccacttaggtcctgtgctgccctcctcttagctcgggagcttcggggaaagatctggaaagccccttccactgtgaacctctctgactctggggtttgaattcctaagcttgtagcataaaattagtgggaactggttgcgttacctggtctggcctttcctttcctagcccaggaaactgaaccatggaaagaaacacttggtctcatccaaggtcagcagcgaatgggtgaccgatctgggcctggaaccccatctccgccagtccattagctcatgaaacatgtattgagtgtgtgctgttggcctggcacagccccccttagccactcttgagctcattaataaatgctcttcgggtctgatgagaggcccagctgaaccttgggggtggggttcacttctgagtgctcagggtgaggacgaaggatggggagttttcagtggcattcccagactcccagatcctctgcagccaggggagtgtggaacactcctggtctggcattagagcccctgcccagcagcatgtgtctttacagggtggttgcattgtgaatttgagagaagtaaaacagggccgggcacagtggctcatgcctgtaatctcagcactctgggaggcctaggcaggtggatcatgaggtcaggagtttgacaccagcctggtcaaagtagtgaaaccgcatctctgctaaagatacaaaaattatctcggcatgatggtggtgcacgcttgtagtcccagctactcgagaggttgaggcatgagaaacacttgaacccatgaggtggaggttgcagtgagccaagattgcaccactgcactccagcctggatgacagagcaggactctgcctaaaaaaataaataaataaaacaaaacagaaaccatctagggagggtacaaggtttctcatctgccgggacctgtttaagccaagaggatggtagcttcccatacctcccctctcccctccagccagccctccaggagctgacctttgtcctttgcagagcaaatgacccactgacttggtcctgccttcacttcctctgtgtatggggaagcagggaggtggccttctcaccccaccctaggagtcacctgctgagagtcacctttgtcagcctaggtgagagcacactaggaagagccagctaggctcaggacaaaggaggagatgccaggtgcctggaccttgccctgtccacaggggtcccacccaaactcctacccctactccccggtggaccttgaccgccgctgggaagcacagtgcacagctctaaccactcagcgacctagccaaggatcagcagggcacagagacctctgggaagagtcctgaaaccctttcctggtgtgtgcaagtgggacgcgaccttatagggtctctgtccaaccttcttattttccacatggggaaacccaaagcccagagaggtggtgggattggctgggggtcatacagtggggtgtctcactaagagtggggggttctgtggtctgggtggggaggggtggggttttccatcgaaaaatggtgttccatcgaaaaatgctttggtgttcctgctgttgtttacatacttaaaacaacttgccaaaggtctgccataaatataatagccagcatttattgggcaactaatgtgtttcatgcttttcccagactgcctgggttcagccctcagctctgctctttatgagctctgtaactttgggcaagtaatgtttaacttctccgactttggtctccacatctgtaaaacaggcttactagtggtgtagtaataactaacatactacctcctccataggttgagaagatggagtgcgcaaacttcctggcacatagtaagtgctcaagaaaaggtagccctagtcatggtcaccaccagcattcccattgccttacctctgatttacagatgagacggtgaagtcgattgcccaggtcatgtggtgcctggagcccaaccaaagcggcctgctggcacctaggcttcctgatctccaactccctgccgttttccacactcttgtgtagcacaaagggctggcccatcatctctgagaggcccccagtcagtcataacccaagtacattgtaattcaacctactagggcagcttgttccccttggaaaggcgttcgagagggaggtgttgcatctgggcttctgtctgagaagcttatttttttcatgtgtaaactgaggctcataataacaatacctactttttggactcttctcgtgtgaagggaaggaggccacagagggactgggcttgtcagttgtaccctattatgtggaatcactatgaatggtaactgactggaacttctggccagtcactcacccctccgagcctcagtttcctcatctgaagaccatgagccgaaacaacataatctcttcccgaagtggcttctcagggccaccagtccccaaaagcaaaagagagggcagcagagcacccccacccccaagaaattgtcaaacctatttgcctggaggagatggctcagagtaaatagtttgcttcactcagcctttccccagactacagacaccacccacccccgacttttttttttttttttttttttggagtgcagtggtgcaatctcagctcactgcaacctctgcctcctgggctcaggtgattttcccaccacatcctcctgagtagctgggactacaggcatgcgcacccatgcccagctaatttttgtatttttttttttttgcatatggtgtttcaccatattgcccaggctgatcttgaactgctgggctcaagcaatccacctgcatctgcctcccatagtgctgggattacaagcatgagcaccatgcctagccccaccctttttttaatgcaaaataactatggaaaagaccaatagaccattttgggaaacgcccgcgtaaacagtccctttcagctcaggcattgcagctccatccagcggatggtttacctactgaagaaccacctttccaggggagcctttcacagaggagaggaggggacagtgtctgcagaggcagaagtcttcccctcagcctgctttcttggcctttccacctctttttaacccaccctccagcctcccacttttgctggcctccttgtcttttctttttttgttaccagaccacaaatctgtttgtggttgggcagtcccaagagcaaggccaactgggcagaggggtggggcctctgccatgtccctagagacaggccccagagttttgctggctgtcagagccagaaggggtttgtttcacccatgggggctgtgggcccccagaacctgtggtcaagcctttgcaaacgtgcactttcctggagaggtggtctgaagccttgtttcagatccttaattcaatgtggacacctggaaacagtgtcgaaactatagccttagtccaagggtctgtagtccctggccgttgaatggagtggaactgtcatgctgcctttctccccctcttccattccacctcagtcgtgtgactcttgaagatgtgaatagatttatgttcacacctcctgcttctaatccagcttgacatgttcctggcaaggaaactgtgaccaagggatgtgaagcgacttgaccaaggccacagggcctggcactggggccgggggggtccagggaatgatgagtgagtggcaggcaggcatggccttctgcagcagctgacttcactgtgaagccatcccatcttgtcctctgtgagacctactaggggtgttgggattcagtgtcccagaaagagctggcactggggtgaaggaagtccccgcccagtccctcttctaggaaggctgggcaggactggtttaggagttgcctcctctgggtcaggaggtcagcttctgctctgcaggctgcattttgtgggtcccgcccaggttcatggttcctcttcgggggctgtggggaccactggcacttatattgaggggcacacggtgtcttcagattgcccggctggtgtaagctggttaggagtccttagctggggttgttgtgctgttggtggggagaggcagcctggggcctccagagagccgctggccggccactctgtaattgtgcatgagtcactctgcctccctgctcgcagtcctcatgtccccaccttcctgggatcctgagaagtgggctttgtgatggttgggagcaagtaaggggatttcttggctctccgcctgtctgccctgtgtgcccggcatacctgagctccacaacctccctgcgcctcagatcctgggagaagagcagaaagctcgggtgtgacttttttttttttttttttttttttgagactgagtcttgctttgtcacccaggctggagttcagtggcacgatctcggctcactgcagcctctgcctcccgggttcaagagattctcttgcctcagcctcctgagtagctgggaatataggtgcccacaccaccatgcccagctgatttttgtatttttagtagagacggggttttgccatattggccaggctggtctcgaactcctgacctcaggtgatccgcccgccttggcctcccgaagtgctgggattatagacgtgagtcactgcgccgggcctcaggtgtgatttcttgtttggtgtttggcgatggggctgtgaagctgtgagtttgacgtcagtttatctcctgcaaaagaatggccttctgattcctcccacctggcctgggttgacatctgcatttctgcttgtgcttcatctgcaggactgacccctttaggcagaaggagtgggtctgcattgggggttggaatcctcatgggcctcagaagtcttggcgccttctgccttgtggatggcctccctcctagccagctccccagaggggtctgggcagctctgctccacccgaaggctctggatgctcctatttctggtattcttggcacctttgattcccaagaccattagggaccttggcgcccatctcatctgatgcctgtcatacggatgacttatgccccatctacgctatccccatagagcaccttcccatgtgggcttgcatgcctccacggacaggctgctccctgcctccccagcagctccctctgtctagaaagttccacatcgtatggagcccagaaggatacctctcccctagttctcttctcaggaccttgcagaatgtggtgaattggtcctcaggaagtctcttccattctctgcctcagagattgtatcctcggagacttctctctgggctgagtctaaggctggagaaggcagaatgggcttcctggggaggtggccttcttatatcccctgggccttattatctctgcctctggtaagagtctgggcagcttggagacctgagacctgacctgaaaatagcttagcccaggttgtaagacgtggcagtaggctggggaggccacaacagtggctcactggggccctaggggaagaaagtggtctggcttctgcttttcaagcagggtcagacattccaggaggctgagaaggccgtctgtcttcctagcctcttgcagcatgctcgcctgccactgcagccagagccccctcactggaggtagccaggggctgtgaatagtgcttcctcccctgtggaccagcacccagctccttactgagctcctctctgcctggccctgccccctgccacttaggcgcatcttgcctaagtgtctacaggcccctgagacctgggctctgtgcaaggagcgctggatttagagacagaacttctggcctcctcctgccagcatcgctgggggctgtcgcacgagtccaaggggaaggccagcacgttgcatgctgtccagtatcactgcatcggggagtgtaatgtttcattaccatgtgcaatgatggtaatggcagcacagaaaggccctggagaccatccaggccaaccttctcatttagatgctgagtcaaaccccagaggggacgaggtcacacgacaagtccctggcagagctggagctaaaatccaggtgttcccaccatctagccagtgcccagccctgcctgttactccacagaaaccctttgctggagtaaggcacaggagaggtgcctccatggctgtggcagtggcactggcctggcctgggactcaccttcctcattttgcaaagcggctgggcctttcggctctggctgtgcccaccagaaacactcgtcctgggggcaggcactcggtgcctatggtcttggtaagacagctggctcctccagcctgggggccgctgccctatagcaggacactttctctcacttcctggcttatatggggctgccttgcattccgccttgggtggcaacagggtcctcaggagcccacctgagaccccacgcccagctttttggctcatcaggctcatttggtggcctagaccatggcttgaatttatggtctgagatgcagcctggtgtgatcccttccaggcccctaagacccaaagatgcccaaactattggagcaggagggacctgggcagccagtctacttaatgcccttctcatcccatttcccagattagagccctgaggccagagagggaaggaatccagctgcagagctgcaggcaggatcccatgtcctcccagcctcactggcttggtctccccctactttcaccctttgcgcccgaggctgtccttggccttcccaggctttgtgtggagtgaaggacgatgggggacaatgggcagagtagcaactgctacttttccctcagggctcctctagacctctgccaggccctgcgtcacttccagttctggggagcccatgcactgaatgggctgggagggtcctgctggtggggcctcgtgccagcctgagaacaaggcttcctggctgggcttgagtccccagcactctggccctggggagggcagagtctggggtccttttgtgcctcccctcgcccagctacccaaggaaggtggattcatgtattcctttgtcaagtttatcaagcaccttccatgtgccaggcactcttccaggccctggggatacattggtgaatttgacaggggccctgcttacattctagtaggcgagacagtcagcaggtcaacaacttaatgcatgacatcatgcctgagttataatcagtgctttgaagaaaaataaaccaggataaggtgatatagggacatgagtgggtgatggggcttctttaggtggtgtggtcagggaaggcttctctgaagaggctgcatttgagcacatacctcagggagacagggaagtgaactccatgaacatttgggagaagagctctccaggcagtgggaacagcatgtgcaaaggccctgtggcagatgcttgtttggcgtggtctgggaaaagcagggaggccagtgtggctagatggagtgagggaaggagagagtggggaggaagtcaacagagtgatcagggaccaggtgataagggacagagagccttatcaagtacaggaagggcttctgacttcatgctcagtgatttggaagccactgaaggattttaagtaaaggactgaggctatcagatgtgtccctctaagatctctggctgatgagccgagaatagactgaagggacaagggtggccacaaggagaccatctgggcagcatttacaggaacccaggaaaggatgctggcggcttggaccagagtgttcagtggaggtagtgaaacaaggtcggatcctgaatgtattttaaagattgactgaggctgtggccaggagcccactgggaatgcctgtccacctccgtgaaacaggctgagctagagaactggctcaagttgctgtgtcctgggagtctgagcccttctccttttgtgcttgtcaattcctgtgcctcagccactctgtcataaggtggccttttaacagttggaaaaatagaggcatagtgggtcttcctgatacccttgtctacccttggaattctgatattctgcatttggtctctctcctcccctctggctgattccctggcattcatcccctgcatgttcatacactccactctatgcaccatagtttcccaacatgttagtcatcctctatcccgaggcctttgcatatgctaagtcctccacctccactcttcagtcaggtgaactcctacccatccttaagagcccagctcaaaagctgccatctttgaactctctcccctgacactctcaggcactgaggatttcttctccactgaaaattctactcctctccctcccacactctattgcaagggatcaactgcgtggggctgggtctgtgccttccttcacacctcctctttctgttctgtgtcctcacagcctggcccagggccagcacagaggagggaacaaaaacatttcagtgtattcctggagcagtagttggttactatggaaacaaggaagtgttgcaacttcctgaacttgaggttggggtcaaagagggcagctctatcttggccacacgggatcaacccaagatggccatgctgaggttcttattaattcaaagtcacttcggacaggctctttcccatccctgagcctcagcttaccccatcaataagatgcaggtgttgggactgcttgactgtctgctctaacgttctgtatccttgtgcctccaatcctgccgtatgaacacaggcaggtcctttgccctctttgagcctcagtttccctattttgttgacctctctccaagaacatagctgcctgagtcaagcaactccagaatcctagggtcagcggctgggctggccgttgatgattgaactgggattcttgtgacttgcagaggcacaaagagggaagtcctgctttccagggtggtggggtgggggtgggggaatgaggcagcaggagggtgggttggtagggataatccaggccggctcactctggcctgaacctgcacaggcccctgggtctcctttcttcaccttgaaggtggcaggagctagtgcttgccaggggcccttggctctgccggacgctgcccgctccgcattctggtgccgtgccatgtagatcccggcctgtgctctgagggccacaggtcctgtggtggccccagaggctgcctgctgcctgtggtggcagggctgagtgggtgggcaccatgttcttactgtgtctcttctctctccacttcattgctcagaagccaagagttagccaagcacaaaaccacagcctggctgctggcaccctcctctgcaaccctgcagcacctgggcaggctggttctgggggctcagcaccagtcaccagggctcggatgtagcctcctcaagctgggggtgggggtcaaggggccaacatgcccagcgtgacgccaggcccgcagttgagttcccacctgccatttgcacatgccattgggcagagtgggcagaggcctcagcccgcataacgccccaccctgactcctgcctggcactcaggtgccgtctggcctgcaccagacccagaaagagtgacctgggatgagaggccttccatggctctctgggcctgcctcctcatctgaaaaatgggcagagggtgcccgcctcccatggccaccaggaggggagacagaggaaggcagcttgtgatctccagagcccaataaacacgcttgttaggattaccagcagcaggcaacaggcttcagcccaagagatgcccctgagaacctctttttcaggaagcaaaagcccaaaccttttcagaatgagactcttattctgggaatgagaagtgcctctccctctgtttctgagctgtgcccagtggccagggacctgagtggccatcacaacgtgcctttcccgcctaccactgctccctggctttctagggttggagttggatgaaacccctggggcagcaccgggcactggaagggccctggtaagggagaggatacccactgcccatctctgccactcatcagcttcctgaccctgacgagtccttgtctctctgccctctgtgcattgaggccccttctagctgggactctcctttggagtctactggagcatttttacctccaggataggtgaggctccctactccagacccccaggatgtaatgtgggtctcacctcaactcacaaaattctcacttctgttaagaaagggccttgccatggttgacggggatttgcacttcaccgtgtggacagtgacagaatgcgtctccccgcccctccttacctggcaaactttgtcattacctcctcccagggacctcctaggcattctcctctggactccctcagccctcagccttctcctcctcccggtaccagctaggtcagacaagacctggagcagagaaggtgcccagtaaagcctgatgagttcttgaatgatcaagtgaaagccctcaggtatccagatagttcagttggccagaaagcccatttttctcagattttactcagctatgtttgcttgttcagcatatagaatcctttttatttttattacttcattttattttgtagaaactgggtctcagtctgtcacccaggctggagtacagtggtgtgatcatggcttactgcagtctcgaactcctggactcaagcgatcctcccacctctgcctcctgctgggactaccggcacgagccatcaccccggctaattgaaaaaaattttttttgtaaagacgaggtcttgctttgttacctaggctggtaggatcttttgttatttattttttatttttttatttttattttttttaaagataatctttttggaagctctgtgtccaggactgattctctatacctttggccaatctctttcttttaaaactagggtttcctgaattgcatttttgcatttcttttatttacctggtctgtgcaactatttttttctcttttggactccatatagcaaataattctgcctctccttttatttgaatttctcatgccaaaaaggcagggagggttagtaaacactgctttggttgttctttgttttgttaagtgtttttaacttcttagtgtgttagactagattttatctgcctttcctacctgccttaaccccaggcctctaaccctccaccttcccattgcttgttcactggcattgtgtctcctaggacagctgtgtgtggtagcgcatgttgcgcactgcacaagttgggggtggtactcacattttagtcccctcacattatacatgtattagatgattttttggcaggtgatggtaaagtgttggaggaaggggagcctggttctaattctcataaagccaccttggattaggagtaggctgacattgtcccatggtcctggctgaaattgggaagtcattttgactccttccccagggctgtaccccgtgacattgggtgtccatgtccccattcccctgcccagagcatggcttatgggagtatgtagtcagggaactgatgtctttggactccaccttctggatgtttctccagccacctctcctgtctacatccccaggcagcaaccttctccctcaggtgtctacctccagcttccccttttccatcgccccttcacttggctaccagtgtgaacctgaataaaaggcacccctgatctatcacctcttccactctacttaaaactccttcgtgcctctctacgatctacaatctgaaattcagtgcccttcattctctggccccagatgaactttcacttgtgtgtgctttgcacgttgtgttcctctctgctctgtctgcctggagaactcctaggcatcctgcaaactctgcccaagcctcagcttgccctcatgcaccagctaggtcaagcggattggtcctccccttgccccggttccccaggcactgtttcctgaccagtgttgcagcccttgcttggcaggatcgcagctacctttagaataccacagccaccaccaggctctggctccctgtcacccagcagcaccagcttggatctagcaaacattccagtgcgctccctgcaagttgaataacacatggtggctaccctttcccagagctggtcggctttgtgatgtggaccatgtgcatggtctgacccctggccccttcttttgccctttcccctgccagccaaagccagagagatggctgggccatgccaggctcccaggagcgctttgtgggtcaggttgttttgcccaaagctactgggtctgaggatacctgtgagcttgctgtgcctgcattgccgctgcccaggcttggcttcctgggagaattggctcggcaacagcagcctgggccaggccacaaggcttcttgggcaaaactccctgggcagggccaggggctggggcctcatatgcactgcctgtgcaccaggcgagtctgtgggcaaatgagctccagcttgccatggtgctgggggagggccacccttctgctgggtaaacatgggtgttcaggcctgcctaggcacggccctgggttctttcggttaaaggtgcaggacagcattttgtcgagccgggagttgccagtgagagggtgacagagagggacacatgggaaccttcaccaaccttccctgggactcggcccctacaggctttaagcagaggctgcaaggaggcttaggggtccctgggccaggactactgttccgactctgagatcttttatctgctgcaatgctggctgctttctgggacttggggaaggtgggtgggctgtgagcaggtgcgtttcctaagccaggtctgagaccagagcttccatttagcggtccccactgcaaatgcatttcagtccttgctcccccaggcaaagctcacatccttgggaacatccttcctgcaccaggcatggtactttggggtctggagactgtcgcagcacccctctgaagtgggtggtattatcccattttgcagaggaggaagctggagttcagagtgctgaacttgttcagcctccacagctgctcagggaatcaggtcttctactccctacgtgaggccacagcttgatttttcttttctggtccgtggctgtttgtacaaacgagtatcctgtggacatggttgtctgcccctgcccctccgacaggacagcgctgagcaggtacctgggctggtgccacacttggggaggtggacacgtagcctcagagcccgaagcaactggtggggttcattcccatggaggagaggttctccgtggtccacggccggagcctccgcatgtcagatccttctccccacccagatggagccaagtgggccccacatcagtgaaggaaaaagcccttggctcttgtgcaaacacaaattgtggaagagtggcatcaacaacacgaggtgctccccatccatccggctcactttccttctacgagatgaactcagctcagggtgttttgtgccttctccggtttgctctagtttggttttggtctggtacaattgaagtctttgcctccttccgacagaagcactggacccctctccctgggccctgaaaacccggaggggtactgggactgctgtgttggatcagaggagtcaggtagaaattaggggttctgggtgcagggagcacttgaggtgcctgctgcatgctccctgaagacaaaatcccagggaggatgtgtcagttccgagggccactgagatcaccacctccgtgagcatgagcaagaccctattggccgcacctgggacagccttcctgggcagggccagtcctaccacctcctttgtccctctcccactccccagacccccaccccctacccctcaggccacctgctccctttttacccaggcacatgtccatgtgtgcccttacaagctcctggctttcggaagggaggggacaggttgtagagagacgggatgcgccggagtgtaattttatttctgtggctctcctttcaagctgtcacggtaaatctattttacttgtcactttgtaaatcattatgcaggattaagccttttaccagcttttaaggcttctgcaaccagggacaaccccacctctccctcatcctgccttctttccctcacctcccttctgaatgaccctactgctgtgtcttaaggctcagttagaatgtaagtggggacccaggagacagcttgctgtcattgagtttagctgccccattttacaggtgggaaaacaatccctggagagggagggactcccaggtgcagtgcctggggtgcttagtgttttgtggtgcccctgagcagtggggagggaagttgctgaaagcaaccgagcctgggcatgggacttggagggttttttttctcatcccccatggggacctggaggccccctgtggctgtggcaagattgctcaagacccacaaggagaccccgtttggaagaggagacatacttggagggagagaaggaccttctgccccctctcagggtgtggggctggtggggtaggggactggtgacaggaagctggaggtgggaatgtggtcacagtcaccctactggcatgtgggatcccgtttatttatttctccagaaatctgtgtccttctccagagaaggctttgaggtgcaagaacaatgaagccatgtgctgagatgttgagagttgcagatagtggctgggactactaggccaagagccagcagtgtgcagcggtgcgtttcctttcacgggtccatctggagcagcctgctcacaaaaccagagtgaaaagatgctcacccacaaggctgatgtgcattgtgggagctgaggtttggggggtgcccactttgagaagccagggatgtatgtgcccagggccagactgcccagctgggccatgccgggtttgacagccttaggtcttgctgccttttccatcgggatacactggcctcatcgccaggtcaagggcttcctccctattgctggggttccagggctgtcctctgcccgtctgtgccaatagagggccccgccttggggggctcacactcacctgtcctgcttccaccactccccacctagacctctgctgtcttgagcccagatgaattaatctcttgcagcaatttcagtctaccaagagaccttctccagcatcttctaggggagggtcctgtgctttggggaagctggactgggtgacattcatttccacagccctctttgctttccctgttcaagccaccatgatgtgcaatggcagctgcctcttttttttaacttaaaattttaaaattttgtgagtacataagtaggtatatgtatttatgtgggcaactgcctatttattggcctatttctagactcgagctgttctgcaaagccagagccttgtctcttatcccctagcacgggggccataacggcacaggctaaggcaatatttctccattagaaggatggccaaacaagagtcctcagaccctgacctcaaggagtttcacagtctgcattggaaacaaccttggctactcagcagaatagctgcaaggagtactgaaagcttcagagaaatcggctaataagttccaaggagtgagatgagaatgagctagagtggtcggtggggaggggcctcctggaggagggggcatttaagggctgcactgaggatggagaggctttagctagaacaaggcaaggagcgggaggaaaggtacttctgggcggtggaaccggcatgaccaaaggaagggaggtgtgcctgtgggggtgctggggcagctcagccagcacccatggactttaggggaagaacagaggccaagtttctagggatggctgggaccccagaaggaagccagggttaggagggaacacttattctagaagtggggagggagaggtgtgtgacagactgggtgaggacagagcagtgttttaggagatttagtgacagggagccacctgggttggaggagacctgagcctattaattaggcaggtgagtggagtccctgaggtgtacttcaggaccaaccaggctccctgtactgggtgggatggggcagggcttaggggctggtgctgttcccaccagccccgctccatgctgagtgggagaggaggtggcagcagcagctggggcttctgaagatctgggtgcaggcttggtctggctactcctgtgcctctgtcctcaacctgcaaaatggggagattctgcaactccacccagcctgtctgcctgctgctgtgaggagtgctggagacacagggaggggaagttctttgtgaactgacattgcctgttctcatccccttctggaaaactggtggctgccatggcatggccatttcatggctgctggcttccctctgttctccagattgggggtgaccctaggacctgggtttcattaccaacaagccatgtgatcttgggtcagtcacctccctcttccaggccttggcgttctcctccataaatggatccgtgctgataacctaagcctcgctgcacgcagtgtggctgttgttgtgctaggagacccaggcttgggctgcggctaggggtgtccccctgtgggcagagccccatacctgttgtcacagtagcatcgcaacacctccttataagccttggaacctcggccaagaggtttctgtgtacgcttcttggtctctggtgacttctaggcccatttgacatttctttgcacttcctgcccactcctggaggcccctgattagtctacttggttacaaacccatatcagatccctgatatctcccagcaagccttgcacaaggcatgtgcctttaagtgatgctcgtggctctttgaaatctggacaccagctggcagaggggtggtcaggtagctcgcttttctgtaagatgggtgtattttgttttttttcttttggaacagattttgattttctgataatagagcccttgagatagtgaggagacagtaccggaagcagcacccccaaagccgtttgaatacaatgcaagcagttgaggggctgagctaccagccagtaggagagaggttcctgggggttcaaagagcagtgggggaaactgaggtacagagagtacccagcaagagaatgaatgagtggcaggtccaagcttcagataattattattctttctaccaccccccccacccccaacacacacacacacacacacacacacacacacacacacacatattcaggggatgctttaggttctctgcactgtgccatgcagtttatgtgcattatctcatttactgttctgaagaaccctacgcgggaaggactgctgtaccccagttttattttatttatttatttatttatttatttatttatttatttatttatttatttattttgagacagagtctcactctgttgcccaggctggagtgcagtagcgtgatctcagctcactgcaatcctgcctcctgggttcaagcgattctccggcctcagcctcccgagtaactgggattacaggcgcctgccaccatgcctgggtaatttttgtatttttagtagagatggggtttcaccatgttggccaggctggtcttgaactcctgacctcaagtgatccacccactttggcctcccaaagtgctaggatgagaggtgtgagccaccacgcctggcctgtatcccagttttacacacatgcgtacgtgatgtgctcagagtgattagggccacagagccagaaggcgttttaggcaggatttgaatgcaggcctgtgagtttagatcctggctcccactaccctatgcacaccctcccatgcccttgcgtgcctcttcagggcctctctctgggccatccctgccgcaagcactctgcagacagacagtcttcctctttctaggaggtgtgggtgcagaggactttgtgtattggggagataaaagagcccgtttgggatgatttttatcagctcgagcaagtcggtttgacttacaggaagaagccaatttgcattttgggaaagagctgagtgtaaaggccgcagtgagcactgggtggatttataaataaacagtcgaccgagggcattgtatgtccccagctgtacaatgctgggttcatattgacaccacagacctgttccacacgtcacagctgccctttggacagaaagggcctaattgagtaagagagcgctgctgctggaaatgccaaggaacccttcctccgacctggcttcctcggcacaagcgagccgggtgagtccggctgcagccgggcctgtttaccgaggctgctggcattgcatgccaggtgcagagcccacgggcgactcagaaggccacgaacgctggggccaaggcggcctctgctctccctgcaacccggagggagctggagccagagccagatctcaggaaactggggtcattgcatagaggctgccagacagtctgcagagctcagcggcctgggttcaaaccttctcgcacactgccactgtcggttactttggctttctagagccagattccttggccatgaaatgggtactgcttacttcccaggttattttgagaatgaagtgagatgaagtcaacagtagatgtatctgtccgttgtccctgccctgctgtgggatgacagagtgattttggacaagaccaaggcctcgctgggcatcactgtcttcttcagaaagcaatggggctaggccaggtgcacagtggctcacgcctctaatccctgcactttgggaggccaaggtgagcggatcgcttgagctcaggagttcgagactagcctgggcaacacagtgaaaccctgtctttaccagaaatacaaaaactagctgagcatggtggtgtgcacctttagtcccagctactggggaggctgagatgagaagattgcttgagcccaggaggtcgaggctgtagtgagccacagttgcgccactgcagtccagcctgtgtgacagagcaagaccctgcccctcctggaaaaaaaaaaaaaaagagagagagagaaagcaagcaagcagtggcgctggatgctgatcagaggcctggggcccttggaccagagagggctgtccctgcccagctggctacaggagctctgactctcagaccagcctaggttcatatcctgtgtcttccacttgtgggaccttgggcatttgacttcctctcaggacctcagttttcatgggtagaaagtgggaacgattaaggttgttggaaagacaaaatatgctcatgtacacttagtgctcagcatagggctggccacatggtgaatgctcataaatcagtcatgtctataacatacatttcaagggaaaaacatctgttttgagggcagaacgctatcaagtcaaatattttcctgatttaatttcaatagtactgttataaaaaacaataaccatgataccgatagttagaagaccgccccttccaggcccacttctttacccctttgctttttggcaataacccttgtgcagagccaaccccattctcctgacctaaccagttctcacctggccatgcggcctttccgggtgtcaggcaggtctctccggttaggtaagggaggcctcatccttcttacctgactgctctgagtgcagatctatgctgcttcccatcttctccaggcgcctgatctattaccttgggcttggaacgcacctaacaaaggctaccgtgaggaggcccctcggtacctgttcatctggacacatcgtgcagacccccgcaccccgtgtggctcccggttaatcttcagggtgcaatcaatttcttcctcagaggccagacttcattgttctaagcctttctcagatccacatcttggggctgctggggtccctgcatctgtgtcctggtggtcagtttgaagcaccagcagacagcagcgctaaaggcaccttgtgtgtactacgtgtggccatctagggatgtctcctctgttgctgaacctgcagatccccgtgaggcaggtggggccacaggcctctcccctctgttttataggggaggtaattgagcagaacttaggacagttacatgctttgcttcagttgcggggctgggatttggacctggctcctggcctgacacaggtcctcagcttccaccagccttgctgcctctgaaggttgctggagaaaggaagctgaatgtagagggtgggtctggaggagagggggaggagatgagcccagaaggacaaatgtttgcacaaggagttagaaatgagatgtctaggctgggcacggtggctcacgcctgtaataccagcactttgggaggccgagacaggcggatcacaaggtcaggagatcgagaccatcctggctaacacggtgaaaccctgtctctactaaaaaatacaaaaaaattagccaggtgtggtggtgggcacctgtggtcccagctactagggaggctgaggcaggagaatggcgtgaacccgggaggcggagcttgcagtgagccgagattgcgccactgcactccagcctgggcgacagagtgagactccgtctcaaaagaaaagaaaagaaaagaaaagaaatgagacggcttcaaagaacctccagcacgtggaggtgaggggtgggaagggctctgaaaccattggccgttttcttgagtgcttcttgacccgaaacgctgccttgaggggttgatagagactggctccttcagtcaatgcctgctttcagacctggatgtgggggcctgctgggtgccagccccctgctaggctctgggaataggacaatggccagaacagataagatccctgtctgctgggagccaaagagagaaaccaggtaaacaagacaatcacaatcaaggacacctttataaattatgataagcaccaagaaagaaacaaacagggtgctgaatagaaaaccacccagaggtgagtgtgggggccttgagacaggaaggcctttctgaggagggccgtgagatgatggggtgggaaaagagagcacacaggcagaggaaacagcgtgtgcaaaggctagagacagagaggggtcccatgtggctcggggatgaccggcaggggcagagcagctgaaacacggtgggcaccatgcatatcttccagctccacttgcccccgggtcgccagcagtgctgccagcctgctgtgggcatgggctcaggtgtggacatgcctgtatctgctggggggtcccacatggtgctggctccctgcctcagccaagaggcacatgacacatgacatcactggctatttctgcctcccaccggccacctccatctttgcagcatgaagggaggcctggcctgagcccttaactggtcccctggcttggctgtctgccactgaatatcacctgctatttcagtgaccatcctgctgtcatagagggcagaggaggctgaggggtgcaagggctgtcaccaggggtccccggacaagcccaggttcttccgcctagggtcagccctggccctgcaacctttgtttatttactttgggccttgctcaaaactagtagcaagctgcctggaatgcaatgtgacgaactcgagataataataaaatcaattggactgtttccccagtaattctagagactgatgcatcattaatgttggtaatacagtgcctgtcagatcacaaacttctcaataaatgtgcagctggcaagctctgatagaaattggaggcaagcagagaatgagatttggggcctttgatatatggggtgtcagtggcgcagtgaagtttttatcaatttctgtcactttgggcttttgtgctcacagcatatgtggtcttcatggcacctctctgtgggctgcttggatgctaactgcacccccccacccaacagtgtgaggaagaggagttcctggagaggcctcagcagcactggtgcccttctgtgcagcttcattaccaggggcttctcaggcagacgtagacgggcaaagcctttggacttgactctgtggatcactcaggcactctccaagcattgattgagtccctgttggattcaagatgccactgggccctcggaggcctttggaggctctggaggacttgatggaagtctggggcttggggttgtggggaatggtcaaatgatcattcctacctaagggtcaggagaaaatggaagcagtgtgtgagctagcctggaagtgtcttgccaggtagactaggagaagagactattagactggggagctctgtgggcccaggccctgaagcatgatgaatcctggagtttatgcgggagtgaggactttggccaggccaggccccagcggcattggagagaaggcagaagctgcctggaggcagtgtagtgtggtggttagcacaagcactctggagctagacaggcaggctccgaatcctagctcccacacttagcagctgggcaacctcagggaagtgactcgaccgctctgtgcctcagtttcctcacctgtaaaatggaggtggtgatagttgaccacctatctcgaaggactctagcgagcataaatgaattaatacttgtatgagtgcctggtccattgcaagcacctgataagtaattggcattacttttgcataatgagctcagtgaacccaccagtcacctgaaagccatacagtgagattcagagagttgaagtggggcatccgcactcatacagccgcccagaagcagaactgagatttgagtgcaggtgatctcaaaacctgcgtctctaagctgctgctgaggctgcggttgagaagcgtgggccttgggtgcccaggtggaggaggtggcatgcggctgggggcccagcaccctaccgaggacaggcctgtgaggtcaccgtcattagcaaggagattgggtgggcagtgagtcagctcaggcttcatttgtcagtagccctctggagctggagaacttctgagactggggacttgactgtggtgcagacgtctgcattggcccctggaggctggaagtggctttgagtagcagaggagccaaatgggaaccatgttggcggcagattccagaagtgagtcagaatttcaatgttcccagctcatctgcttgagagcaggtcctgagacccagcaaggcctgcaccccctcctcgacacccacccaccctagagcaccacagtgtctgcaaaccagagcggagggtccctaggctgtgggggtgacttgggtgtgcgcacattctgatgcagctatcactgtggtgcacctgctggggacccaccgtgaggccccgggagtcggtgtgctggtgctggataccagcgctccttgagagtgccctgggcacagggaccccatgctcccatgagcaggggtgctcctggcccttccccaggctgcctttgaaaaggtccttccccctccccatggctccacacaacaccaggatgtactcctggctggttctgcatctgtgtttgcctttaaaaaaggtgggttgcaaggccccccagggcctcaggaaagaagaagcaatcttgttagactggcgtgtggaagacagaggggcctgtgctgcactgggaacagggagcggtggcctctgggcccaggtctgcccccatcccctccccggctcccttcaaacctccctgagcctccatgccctgcttgggacgtcccagtgtggagcccaagtccctgcacttgttgggtggtggaggatagctggtcctgcatttcccaggtgatgtgcctgggaagcatctctccataaaccccctgtgacttgggcttggaggaagtgtcccttcctgccagaggagcgggggctgggtgaagcattgagaggagctacaggtgcatttgaaaaagcaggtaggtcttctttttaccacctggaggtcctggttatgggggcaggtaggagcacggtgctgacatggtcctaaccggtgtggttcccatcactactgcttgtatgacccgaacaagtctccagccactctgaatgtcacttatcaccacagtgcaggtcctcatgcccacctgacctggggtgtaatggaccacacaccctgatgctcagagcacatctcttgttgaatgctaggccctggatgactggtcctggcccaaccccaggagtttagagcctcactagggaacaagactgggcatgtactacctgtagcatgaggggctggtggctgtgaacaagagccctgctgaggggagccccagggggacaggttcaggtcagcctactaggggagggcattcaaggagggcctcccagaggaggtggcctttgtgcttcagcccaaaggatgagttggggaatgctcagcagaaagaggcaggtgagggctgggcatggtggcttatgcctgtaatccagcactttgggaggtcaaggtgggagaattgctagagcccaggaattcaagaacatcctgggcaacatagacaccatctctgaaaaaaaaaaaaaaaaaagagggcaggtgaggttatcaggcctgggtgggtgggaggcaaagcctgggagctcagtgggggcctgatcacatcccagagggccttgaatgccgaatggagtttatccttgactcagggtcaacaaggaaacattgtggggtgaagagtgctgtcctcagatctgatttgcagaccagtagctgcagtggctgcttggaggatgttctcacaggggtcccatgatccctgctgcgttccaggagagagggcatgaggctcattgctggcaggggcctgggtatgggccaaacagtgctgcagatatcatgtggctggtagggggtgaggatggtggtcatcgggggcactgggtgctgtggtatctgaagggagtgatttccaagtgccgtgagggtgcccttggccctcagggcttttgcacacagcatccctgggtgcctgctaaacgtgcagatgctgttctcaccccagcacagctgggccaggtgcatttagaaacctggctgaaaactgcaggtctgatgaggagcacaaaggtcgggtccctagagaacaggagcctttgaaggaagagggtggagctgattgcagactgccgaatcttgaaggggtccacagaggggctgcagggtgtggacttggctgcagcaaggagagaggaggaccaagctctccccttgatgagtaattcagcatacagttgaagctctttgcagtaggtgtgaggaaggcaagatcttggcactggggatgctactgattgtctaatggaaggggttctcagcacaggcaaagggctgagctcactgtgctggtgaagggggcaactgagtaagtcctctaggatgagggggaagttcctagtctggaagtgagggaaaaacatctgaggcagagggaacagcatatgcaaaggctcagagtgctggggggatgctgtcagaggggcacagctcttgaagccaggccagcagggatggactttgttcctgtctaggggcagcaagtcagccaggctttcttctctcaagtcagagaagaaaggccagggctactggatcctggaatgtgtgaggtccttggcccagtggatgtctggtggccttggtgtatcttattggcacggccacgttcacaggacccgtggggtcaggggagggcctacttgtgcagagggaggggtagtctctaggtaggcaactggcacctgcctccatctgggtgaaccagggcagggagggagggaggcgggtggccaggtgacggccgtcctggcaggtgcgttccatcatctgccatgaagacagccgtggggcctcaggggctggagctgtttctcacactgtccccgaccataaacacacacactgagattccaccgttgtccctcccctctctgaggatgtgatgtgaggagcagctgtcaattaccatcagctgccacaatgcagggaggcagctgaggaccagatagagcaggagtggccagctccaggtcacacggcaagtgggacctccgaccagctcccagcctccccatggcaccagggacctcacgtgggtcaggatctctccaccttctctgtaactctggctcctgctctcaaggaggaagagctgtcccctagcaataagctcttcccatctggagtcaccagcttgttcagcttttcctcacctccctccacctacaaacaacccaagggaacaaacccagaaagccaggtcccagcctgttggaccaggcctcgcccagttggagcagaaggcgtgcagtggggaacgcagcctgtagcccctctcacagggaggcagaaatcccggctctggaagtgtataaacacggttatttttagccttcagagggctgtgggcgcagcagcgtgacctgaatctggctcagccccctccttctgccccacccgggagagaaggcctcctttgccccgccctctgctccatcagcctcagggctgggccagtgaattccaggatccagggagagaaagaaatgggtgtgtgtgggggtctcagcaaggctgcccagggccaggagctgaggggggacaggatgtggttttcaaagaggcagcatttcaagttgcaacagaaatattggagccacccaatttcatgacttttccatgggttcttactccctaatcctggtcccttccctggtctggctggaggcgagtcccaggcgccacctgggaagcagtgctggcctagcaccaggcggccttgctgctgctttgctgccgtaggctaccaggcccacatagcacctctccgcggctcagtgccctcatctgagaagtgggatcattcccaacctggctggcagggagttgagggggtgatggtgagctgacagaatcgtagctgttcactcacttgttcattcaaccaacacttattaaatgttagttttatgccagccagtgatctaaacattggatagaaagcaggaaaccagcttgaggaggtgctgaccctcctggggctaacatcattgagcagggctggggaacacagaaggacagtaatcagctcgtagtacgtgcagtacagtagtaatgtcgagcgatgtgttacggagcggctggggtgggggaggcggcatgtattttagatgagggcagtctgggaggaccccttgagaaactgtaaaacagccagccactgtaggtggaggaggtggtgagcgggaacagcaggtgcaaaggcccaggggtaggaatatgcttggtgcccgagaactgaggacatggggaaaccgtgagggggagcgagcagagccagctgcacggggctcgagggccgtggggatgcctggggtggggggctgtaaacaggaaaagctttacagctgtaaggaagagcaggaaggaagtgagagtgggaggccaaggaggggctgttgcccccacccaggcaaaggagctggcgaggagtgggcagatccgcacgcggggagggtgaacggtggaaatggcagatggcttggttgagggggagcgtcagaaaccaggatggttccttgacttttggatttgatgcctgggtgggtgggggtggagagggcatttgatccaaaaggagggcggagggagaacaggatctaggggagggagggcaaggggtgatgccaacctggacacaggttttcggtgtctgttgacatcggagtggagaggggagccctgggggagcagctgcatggggcacaccaggccccaggctggcaagccctcctccctggggctctttgccagcccggagccaggctgtgtgggcgagtgcttccctgggggcctggcctggggttttgtcccattgcatcatggatgaggaccttccggtcccctggcttggaggcagacgtaggtggaggtgcagagtggtccacggctctgcccaaaaggctggacaagttggaaggtggtctgtcattcaagcaccatttgccattggctggatgcgagccctggtgtcactaccaaccttgttcccagctgggctgacttcttactatgaactagcaactatgaactagtcctgccactcctgtgcctggactgggatgggaaggacagcaggagtagcaacatgctctggaatttttcacagcagacctggttcactttcatctggtcaccagacaatgtagtgacccctcccctctctgggcctcagaatcccacctgagaccccaggatggagtagaaggtcttcagggtctccgtgtgaaacacagcctttcgatgacggagatttggtattgagagggtcatggcgtgagtaaaggcctggaggctggtctagggagtcaccttgcaggatcttggggagcggatgagtatagagtccgcgtgcatagaagccatgtgcagggtggtcactggaggtgaggtgggaacaccaggctgcctggttgggtcagagggaccagattaccatataagccattgtgctctcaggataatctcctggcttgttaaagcctcagttttgtcatctgcaaaatgggtacaatagacgtcactgagcttgcaggggtgaatacccaccaaggtacagagatgggccaactcagtgcctggtcgtaggatgtctttgatttccagaggttgccttctttccctgtctttctccagtttgtagccagaatccaaatttcaggggagggctcttttgctgttggggcttcctgtgagagccacagccctgggcctgggagtcctgccaaacccaactctggaggccgtgaacctcaccgtagccttggggactggcccgctggccacggcactctgagcatcagccttaggtactgctagtaggaggtgcactggggttttaaccagaggcagtaatgagctttctgaaatcatgccagcttcatgttttgtttctcaaagaaacgatgggccttgatttcctatcagcattgatgtggttgctgttgttgttgggttgttgttgtggggtgtgtgtgtgtgtgtgtgtgtgtgtgtgtgtgtgtgtgtgtgtcttaactgccatgggttttaaagccatggtggaaagtgaggaaaatagcagatgctagatccaattgccaccaaactgtcttgaaatgctataaatattttctaaaaagactagcttcccgagcccaatgtgttagttgtctcctccctgagaaactgattcccgaaaatttagacaaataacctcttaaatcacagctgttaacctcgggtgtaaaaactgctaccacaccagccgcaggtcacagcgactctgctctgcctaagtgcctccgtgtggcatagagaaggtggtggcagagaagagagatcttgtgcttaggcaagagaccagggtcggaagccgggcttggccactgactgctgtgtgacctggggccattggcccacctctctgagcctcttctgtgtaacagacctgttacaggctgcctcgatcctgagagtgccactgaactgagcttctttctgctcctcaaaggtaaacaaaagtgaccgttggcattcaggagttcatgttaatcaggactgagaaaacccctccgcccctagtcccctttagccctctgactgtgtcaaggacagctgccagtgactggatacttgctggtgtctcttttcaacagagagcacctgcaggacccggagcctccagcaggcaggcagcaaaacagtgccattgtttgttctccttgtatttgtttttgtgtttaacttctatccttggtgagtaaggctaattttgtatttaaggtagtaatataaagttcttttaaaaataaaagtatttatgcaaaagttgtgaattgattattaagctaatggcagtttcgatggcagaaggaaatgacaaacatcaggaagatgggaggaaatgtgacggactctgcacactgtccaggttgcccttcccctaagtgctcaccaacttctgtgcccttgtagaaggaatgagtggggaggggttgctggagggacgttctggtaaattgtcttccaattgcacaatacccagaggtgaccaccacactccctaagacggtggggctacagaaagccccattctggcatccgggccaaggaaaccactctcgtggagagtcttggccaagaagctgggattctgtagcaaaaccaaatccccccacccccaggccctctgtgcctctccattgaagttcccaaactgagggtctaagcttgacaccatctggctgctctctcctaggccagagaccaagaccaggccctagctctcccagatgtggctgaacccagcagaatgtagtagttgctccactaacagggacatcaagtgctgtaggttttgtcttatgctctgcctgagagtgacagcctggagtgctatacagaatagcaattctgaggctacaaggagctctgtaagagagcatggggaccaattggtaatgcctgccatgggtgtgggaaggaagcctgggggtacacaggcctttatttgtgactcatatgctcccccaagcctgtggctagatcctgcccccattgcatcgccagcacccagcttggcgatcagtgggtgattgagcccagaagctcctataagaacttagcagatgctccttggccggtctttgcccgttgtgcaaggggacatcccccaaccacattgcaggccctggagggtcaacactcagcccttgagtttaggaagctcttgttcattccatacccactccctgctagggctggatatggggtaggtacccaggaagtgtgttgatgagacccaagaatgatcgacaaatgggactggagaggtggttcggcctggcttggcggcagtccatgtaacactacctcactacaggcatcgtgcaggtggccgagtgccccagattttctaggacagccctggtttcagatccttcatctattgttcttgagtgcccctgcctgaacaggcatttgggctccgctttggaagtcctggctgctgtggatatagccctcatgatcatgctttttgatcattttcagagcactcactcttccattgcctttgcatctggccaggggatggagcagccccatttgctcacttttttcaggtgaggaaattgaaggccagagtgagcaagtgactggcttgcggccacacagccagttaatgcagacatctggcctgaacctgtgatacccatcttctggccacttcactgtccacttacaaagcccagaactttctgcatcctgctatttaagcctcattcattcagtcagcttttgtagcctagcgggttagacctcaggagtcaaacagcatgctttgcatttgaactacttctggccgtgtgacttttggtgagttcctttctctctctgtgcctcagtttcttcattgataaaaggggtgtagacaccacacggggctcttgtgagtattactgggttaacagtgtctgtctcagggtgagggttctgtggggcccgccagtggtgttcacagaggtggattgatcagagttgctcacagtctggtgaatgtgaggtgggaggcagatgtgttcaccacgaaagagcgttcaagtggatgggtgaggtcagaggtgcactgggcaccaccgggcggtgggaggagggaccgtctccattgctcccacactactcggaggcattcagaaaggctcctccgttgatggacgctacttggagcagggcttgcagggggcagggagggcactggcctgatcctggcagatagcaacctccaaaacttctctggacagaggatggcactcatgcctaccgcctcactacctccagcagctggagcttctgggctctgctgtagggtggaggtggggttgagaagaggtgaaaagacccagttgctttgtcccaggggcaggcacagagtcctgcctgagggccctggcatggggtaattgtctattgttcatcgtctggtaagccagctccccaccttctttctgcctgcctgcctttctgtccttcctctcagcatctgtctatgcaatataaagagcccctcccaacacagtcaccagtgatctgcttccaggctagtgttgacatcccagcccacccggagacccatttattctgccactggggcacagggcccagttttaatcatcctcgctccactgtgagatacagatggttgtattattaatagtcataattaatcagcatccacagaggagcttttccctaggcagcagatcctcaggacgagcagccctgggaggtcccattccagtccccctttacagacaggggaagtgaggctgggagaaggggtggtgggactcatccgaggtggagctaggtatggaccccagctcagatctcagatctgataaccacctgcagtgttactgtctgggaatggactgttcaccccacccacccatacctaggtcctagggtgccaattgctgggagaagctttcagcactggggatgggagggtggtgctcaggctgatggtgcactttgagatctcaggctgagagtgaaggaagaaaggtgggatggggaagaaaggcctgagggaggccggacatattgggctagcaggacagggggcctgattggggtaagggtggggaggtggccttgggtagaaggaaagccaaataccaaccatcaccccctaatacacacagatcgtgggtcagggcctgaggttggctgcttctctgttctaagctctgcatcccagggacagtgatataaatgcttacagcaggcagcatcctgatttatggggctgttttggacgggcctaactacatcagcacagaggcagtgaggggcttcttgcacaattctgcaagcccaccttctcccctgcctggctcctggggctgaccaccaccgaggcccctgtgcatgcatgtgcacatgcatgcacccagacccacgcctgagtgggcacacccaggcccacgtgctctgtgtgcacctgaggctgtccacatccctgcccacagcccataaactgtgttagcccagcacgcaggtgtgtgctgctttgggcctgtgcgcagatgaacacaggtgtgcccaggtgcacacatgtgtgtgtctgcctgcactctgcaggcatccatgtgcctatgtcctctgggctgcctctctctgtgttgatctgttcgtggctctgggaggtggatgtctgttcgctgtcctgtgtgtgtcccagtgtggatgtgcattggtgaggggtgtacatgcctctgtgcaagtgcgcctgtgtgcatgggtctgtgtgcacacatgtgtgggcatgcaactgccgcctcatcctgtctttttcattatgggtgttgtccacactcacatccttgcgtgcaacacacacccggtgcccagcgtggctgggctgcccccgcctgatcattaggctcatggataagactctctgtcatcgtaaatgagtatagagtgccccagtccaggagtcctgaaggaactggggaggtagcctcatctgtcctcagcatctccaccccacctccatatggatggtgctggagaggggaggctgggagggagggatgtggtgcccactcccaggcccccacactgggttcctgatccaccctttgtttctccccaccatgcctatgcactcgcccatattctgtgccagaccttgaggacagccccgggtcgtgggagaagcccagtcaagagtcaggcagccaggtgcacaaacccaggctctgttgccagcatgtggccctagacagcccctctgcctctcccatcatcactgttttcccacctgcaaaatggtcttagcaatggccacctcatggggttattgtgaggacaaaaggggtgcagaaactgctagagaagtcaagttccttcccccagcagacctcagtctccccatctgtaagatggcaataatgaccctcaccagtggtctcatggagtgttttgaaggtcagatgagaaaaaggttcagtgaaggctgcagggtggtacccataggacttgttccagctgtgagcaaaggagatgaggggtgctaggcacttgggggtggcatgcatggcctgggccagatgcctgcatccaaacccccatgctgccaccctctggccttgggatgtgggaaggttacttcatcctcatctgcatctctattatccttagattcctcatctttccagcaggcatgttcgtagtagtatccatctcctggcatgttgggagaattcaggagaaatgagtgtggagcttagcacagagcttgacacaaagcagctgctcaaatcagcggtatttgttattcttgtttttggccttattgcgataccggtggccactcggtctggaaggacaggtgaatgcatggcggatggtgcattaataccacactaggatacctattaatgaggtttaatctgtgtttccagacttgatgtccatccgtcccaccgaagaagagttcaagcttttcttccagggaactgagagggccatgctgaaactggaagcctcagcctgcaagaggtgccctggggaaggaggtagttggtactgatgttggccgactacaaaggagctggctcctgggactctgaatgctgtgccctctgcagccacccagccccacaatgggaagccagtggttacatttacccctgtctcttctgaaccatatggtggctgcaccacagctggctcagaggctctgaaagaaggcccacaggggaacatgatgtcttgcctgagccaggtgaggactgaggcccccactgccaagcactgcagtctggggcttccattttcaccatagttcctctaagctgcctggaggaagggcttgaactcatgaacttcatgaccaatggacctgaagtctggaagcacagatgatacctcattaacaggtatcccagtgtgatatcaatacatcatctgtcatgcactcacctgtgcttccagatggggtggccactggcaccgagggactccttgcacagttatgcagatggctgccaatctacttgctccccttgcccagctcctgggctgaccaccaccggggcccctgtgcatagagcccatgagcagtccccatcacctgtgggcttcccagtctgtgcccaacttaatgatagctgttagggtccagtagaggatgcaatgtccccatcctagcaggggctttactgaagaaacgaggccctggcacccaggccagggcagggaggagacagttggtagacacagccgggtctgcaggggctcggaggtcatggggcccaggtgggcaggcaagggaggaggcaggccaggctggagccagtccttgaaggacaaagaggatttagctcactggaagggatggcattccagaaggacagaagtgtgtgggcaaaagtttggaatcattcccggggaaaggtgtaccctctcccataagaagtttggcctgccctggaccaaagagcagagtctttcctctcgatggctagtggctgtggggtgaagcagatggccagggggtgtgggtgacgggggaggcgcaccctcaggcctgagccaagggaaaccaagtgggcccacacaggccagagcctgagaccttggcaccagctactcggagatcttgactcaagagttaatgattcatttgtggccaattttctgctggctttgcctggaaattcccaagcttgccccttccctcaccttagggagctccaagaatacagtctcacttacacttggctgagaacgtctcacccactatccagggaatggtttttaaaattacagcaggtgtgatgtaggttagccattaggaaaagctgatcgggggctataggctgggagctggggtggtttgtttgagtgtttggaacaaatgtgaatagaattcagtctagtgtaaagtgttgtgacagttacaaattgggagctacagcttgacccagagtaggacttggttgggctaaaaaagtaatggcataggcaaaggccctggggcatgaacatccagggaacgctgagtgattgtggtgtggctggagtgtagagggtgtgagagacttctagaagtgtggacacaactcccaagtgaaggactctcaggacttgaagatttggcagtgggacgtgctggcagtggggagtcagggctggtacctgagtaggggacaggtgtgtttgatttgggttgtagggtcgcttgcccatccctgtcttgattctgctggtcagcagaccttccttgacagcctgctctgtgccaggtcggacccacgctctgcacgggtcctgcacctgtgtggaggctgaactaaagggagggggttacatgtagcaattcaggtgggagcatgggtgtgtgcaggagcaggggaatggctgatgacttcagacccactcggctccatcaccgaaagtccttgggtgagcgtagcagaggtgttggggtaggcttcaggaaccccatgttcctggcaggctctgtggacacgccgcctggaaaccacttctgccctgtaatatcagcatggctgaaggggcctggaatgtgtatctgtccttgtacagaggaggggagcagacgaggcccagagaggggaaggttgatggcagagcccaggcagaactcagggcccagtctcccaatcctggctgattgcacatatatcccaccacccacccgttcctgcagatctaaggacatttccccgaaaccaggcaaaatagagcagcctgattgtccatgtcaaaatgtctgggcatttggggagggagggttcctttatatctttcacaacttagcaaatttaatttcttctgattatttcttgacggtcccaggcgttggtggtaaacaaccacactccccagaatgtttccctgtgacagcagctttctctggcgagggtgctatcaacacttggcagggcctcctcctggctcctggctcccagctcctgagatcgtgagctcctgagctcctgggctcttgagcaaggcagcaagtgagggcttctcaacagctttcagcatgcagagcttgccctgtgtaccagggcaaggacaggcctagcctctttgttccccgcagcagcctggcctgccttcggagcctcaggtggcctctggttgtggatggtccccatgcagcgaggctgggtggtatcagatgtctgctggctcccacagctctggtgccgaggtccttggcatggctcagtggcaggagggagcctgtcttctgagcagctctgccaggactgtctgtggccgagagaccggcagcatcctgggcctgcagcctccatggtctgcgtcatactggcttaggtgtcctgagtcagagccaggaaatggatctgccatgcgggggtggaggtgctgctgcccgggcagctagggtgaaccccaacctcctgcccgtccacacctggagggtcctggccttgtgcttccttcccctggcctggcctgaatgtgactggtgcctggaggagaggctgaagttccagcctgctccacactccactttatgtgcccaggcccccaccccacaggctgttgttggcagggtgggtgctgagacacaggcaccacgctatgctgtgcttttgcctgagttattctattccctttttctagaatgccctttccaactcgttgtctgtgtgattttctgctccccctccaagaatttacacaagaatgacttttttggtgaaggcttccctggcacccctactctggccaaggctgcccccctttcctctgagccccctctccattgatggctcctatcacagtgtagtatattcacgtttggagcccgttcacctgtgtaggtgccttgaggcttttttctttgtgggtcctacaggcctgatgtgtagtatcagctcaataaaagcaggctggatttaattaagggggttcctgaaggcggtgctggagtctccctttgttaatggtgtggtgaagaggaggcgggagtttgcaaatggagagaggctgacttgcctgccggactcctacccccgatcccctctgagggcagtgctgcccctctgactgctggggactggggtggccccctccatttctatccagcggcagacttccctgcccggcaggagctggctccccaggttgccggagtgatcactctccagaaaacaccccagtggaaactgcatgaatgattgataagagctgagagctgtttaattttttccccctgtttaatggctatcaataatttaatacgctctctgtatgtttttaagaaatagcacccatttcgccgtctccggtttagcgggctaaatgatttaagtgttggaaatgtgctctgaggatggaggttgagtgagtcggagaaatctggaggctgggagtgggggaaggcgggttcagagccagccacagcatcttggcctgggtgtgtatgtgtgtgtgtgtctgtgtgtgtgtgtgtgcgtgtgtgtgtgcgtgtgtgtgtgtgtgtgtgtgtgtgtgtgtgtgtgaaggtgggagggagaagggagggagggaaggggcgggtaaaagccagctcctctctgctaagagcaagataattgcttttccggggcctcactgagcagcagctgaacagctgtcagcacccccctccacaaatgctaagctttttttctggatggctctggggggcccaggggggctaggaaggagctgccaccagtatcaccacgggctgagaatctcccctccccctgacatctttgccccctcttaaagcttctaaatcacttttattttaacgacgcagtaaggctgctgcccgggtggtgtcttccaggtggggtgtgggtggtggagtggagtgagggactcagagggacctggagggtcatctgccagtgctcccccaaactttccagatgcagagcatcacctgggaggacttgctaaaaatttaaatttctgggctgtgttccagacccatagacttccactcccaggggaaaggcctgggaagttgtgggtttaacaatcagcccaggtgattcttagcagaggagtttgggaactatagagtccagctctgttctggtgcttacagcacccacagcaccacgtggcagctcccttctgcttgcatgcctctgggaatgaggtactcaccacctcccaaggtagcagacccacttgtggaaggcatactctagtctagagttgcttctgatgttaggctgtgacctacccagctgcccttgtgggcttggagttctctctgctacaggacagaccgtgtttcctgggatctgatgtctttccctctcccagccttgccactttttggcttgtttgggcctctctgctgggtaaggagcttcctctcttagcaaagggtcctggaggtagaaggcaggaaggtgacaggtgctgtggcctgtctgtagtgtgtgaggtggctgcatcatcctattgctggtaagcatcatcgctggtacagtggagaccctgaggaaggcagaaagatggtgggcctcagcactgccttggcctgtcagggattccattcctcccacgagagagaaaactggctcatcagagatcgttgtgtcagccatagctcttagatgacactggggggaactgagggctgaggggtttccccagagaccacatatctatttaggacagagctggagctgcaaatgtgggggcgagaggcccttagaggggtggccaggccaaggccctggctttagggatcagctgaggccccagccagtcactcacctgaggttggatgggggagggcttccgccttctcagtcactcagggctgatggacaattcatggagtcaatacatggaaggattttggtggagccgatgcccactctgtctggcattacaactcttccttctgtctgcctagcagtttccattgttttgccagagggtgtagcattatactacggccatgggtcttgcaattttgttttaatagataattaagagggaaggagtggtgcacatttactgggcatcatggcttactgtgaaatggggagtataatccccccgtaagccctgcactctgtagccccttactgcacccccggattcagccccaccctccatctctgtgggagaagcctgggtccccaggagagaattgccctgttgggtgctggcagctgacctatcttgagatcccagttccccatcctaccctgaagcctgctctggccatcacagtatggctgggggtgtctcgaccctgggggaagaggagtaggggtgtcacccaaccctgatagagcttctgcttggagaactccgagagctgcagaggcagaagagagacttacacactctggggaagacccagccccagagagagaactgtgtgaatatggacacccaggcaaggcctggggaggtcagggagggcctccaggagaaggtgccacctgactgcaggcttgagcatggtaggaaggggaagggcatcctgcggtggaggtgtgatgcagcctgtgggggtgcacagaagagtgaggtagagcctgcagggctggggatgggctacagaggccggctggccagggcggggctgacctgattcagttgggtggaaagccacggaaagatttgtctttagttccattgaagtgttacacccatgcagaaaagtgtgtatctcctacatttgtagcttgacaaattatcctgaagggcacatgcttctgtagctgccaggcagatcaagaaacagaaccttgcagacccactagagccccctgtgccctctactcactgccccctcaaggataccgactgtcctgacttccagcctgctgtgagttatctcctgctgcccagcaaaccacctgaaaacttggtggcttaaagcagccaccatttatgaaacctcacaattctgtggtttggctggacttctcctcctgattcgcttgggctcatgtgactccagtcacgtttgagtgtctgctggactggaaggtccagatggcctcagtcacacgggcagtgggtgctggctgttgccaggggagttccccaccctccactaagacagacacctccctccatggcctgcagcctcacaagagaggcaaggccagaaatggcaggacctcttgaggaggcctagtctctataactcacaaaatgtcactcacaccgaatcctattgatctaaacaactctcaaggccagctctcagcaggtggagaacagactccgcctcttgataggaggaactccagaggacccctgccgtatttcatctattacaggcgtagagtctttttgcccttcttgacctttatataaatggatctcataagtgtattctctgtcgtgcctggctttttgagtcaacattgtgtttgcaagatttacccgtagtgttgttggatgaagttgcagatcactcattcccaagcctgtgcagcagtttgttgtgtggaaacaccagttgacccattctatggttggtggccatctgggaagttttcattttctggctgttacgaattgccttgctacgagcattctaacacatgtcttctggtgaacatatgcacatttttctgtggacatggagttcctgggtcatgggagaggtcacagggtaagagacccttccaaactattcttccaagtggtgggtctagtgtctagtgtgtgccccaccagcagaagggggactttacaaagacccagctgaagatgggctggaggtgcatcttgtggacactggaaggggcttcctgtgatgtcccctctgcccgccctgagcctcaggcccccaggtcaggggaagtagagccatgaggctgatccctcttttctgagcatgagctttcctgctacactttttccaccccagaggcctcctattgccttctccttttcccagcagctgcctttcatggttgacctgaccctcaacagtcagggaggccaggggtctgcagatgcaggaactggggggagacagccacacagcctccatccctgaggagatttggacttcactccagccttgcctttcaccatgggaggaaccctttccctctcagggcctcagtttcctcatttgtaaaatgacaaggaaaagtatcaacctcaccaagtccctttcttctcatcaatctgaccccatattctagaatcgaatagaggaagggatggggggaggcctcctgacttcagtcagcccatgtttttctgtttgttcactgcacactttcacggcaccattcatccatcaaggaatctctgtggtccttgttaaccagttcagaggacagagagaaactagacttcactcccaatgtccaggagctgggcctggagcgggagagtgtcctgtgggaagcgggaggaggcaaggttggccaggcgcacagcccactggagatgaacaagcaaggaggggctggtgagagagggctccacggaagcacttgagcagagtctcaaaggccaggggcccttgaaagacagagaagtggggagaagagctctgagcggggcacccagcgtgtgccaaggccggagccaggggctctgggaggccgggctgactggagcctagtggtgggcaggcaggtttggctgctgctgtggtctggctttcagggctgcggggctgctcggccggtgctggggcttcgaatgtgacgttcaggagctgcgacctttatttggcagtggcaggacggtatccagtgtctcgagtagctccacgttggtgggccagttccatcttccaggagatggcagccaggacctagaggtccatgacgtgggtgaggggctgcccgcagggtcagagcttggagctcactgccccctttcttgtctcccataggactcacggcagctgtgttctgatttcgtactactgctggggctgccacctcctcctccagacgctctcagcagacttgagtcctggtccttctgcagaggcctgagcaggtaagtgggatgggctggccctctggtgctgtgcacctgctgacgtggggcagacagggagtgcgggctgcccagagtgcatggtgctgtttcaggggcccagagggctggggaggggaaggggcttctttctcagtctttatttgttccttggccttttcctctcaaagaaagccacacagtggagggtggtgaatgtcctgacttgggacctggacatgggattttattctgctgccaactcccagtatcgccttgggtagccctttccttctagagggcctcagctttctactctagtccatggaaataacagtaatgatatcctctaacccgacaagcacttaactgtattctgggtactgtgcaaagtactatagagttattacttctttcagcatcacagcagccttatgagagcattgctgtaatcaccagcattgtacatgtgagaaaactgaacgtcactcactcaggaagtaacttgccccaggcggcacacctggctgagcctagggttcaagtccaggtctgtgtggctccagtgcgccagccactgcccgctggcctactctgcctctggccttgctcctagcttctttttgggggtggggatcagggcaattatgggtgtcttcagaagtgccagatcctgtcccaacttaagaaaaagggagaggggcttttaccaggtgacaggctcctggtgggtctggggtcatgacccatttgtgatgtgatgtggcagggaccaggcctggcctctgggtgcctctgaggtggcagccagggccccctctagaggaggggtgtgtaggctggataaggctttctttccctccgcccctcaagttcgttttcctaagcttgtattaaacacttactgtgtgccaactcctggattaggtaccaactgcggtgcaagggaaaggggcctgtcccactctctgctccgtggagaaacagaaagatcccagtgatgtggcaagccccataacagtggcgtggagagggttcagaggctggggggagaattctggggaggtgaccacaagtgagttacagtgtggggagacagaagcatagatggagcagaacctggcaggatgtgcatgcacacacagacatgagtggtggtgagtgcatagataatacagatgtgcaaatgtgcgcttcctcacaaacgtgtacacagacgtcgcttctgcatgccacatgaatgcacacagataacacttgcgtgcacttgcatgctcacatacacatgcacaaactcgtgttggaactacacacatacacgggcacaaactctcacaagcacacagcattctgacacacggggctgcatatccatgcacacacaacgcagggtgcattccaacaagaagaggcagttcagaggtcgatggctctgcatcggcaaaagcttccagcagctcctgggaggctctggacagcctgggccgaggctgagctggagctctgtttgtgtgtatgttggggagggtgttggggcttgagggccagccatgtgactgaccatggacaagcccttgcccgctctaggactcattccccatctggaaacaggaatcgtccctgtccgcctcctatacggtggccgcaaggatgagaggctgctgtgtagattgccgagagcaattttgggcactctgcagggcttcaacaaattgaagctagtagtctcatgagaataaaacaggttacaggtaaagtggggatgtgggggctgttcctctccaggcttctcatcccctggggcctgggtactctctgaatcatgggcatgacagtccaccctgcctgcctccaccaaggtggtggggtctgtgtcatccctgctcccgctctcccacctgcacttccctgttgactcgtgaggagttgggggcctgcagtgcccagctttggtacaacaaccacatttgactccctgccaggagactggcacattgcctccatgagtgctctaaatccccttgagaagcctgagaaggccttaccaagcaatttccagatgaggaaactgaggcacaataaatgcaggtgaggttctcagggacacctgctcataagtgttggagctgggcttcggatccacgtcatcagatgtgaacatttatgctcttttctcccatgatctcctctcagggataggtcatttattacccactttgcagataaggaaactgaggctcagagagggcaggccactcagccaggaagtagcacagccagaattgggtgcttattaaccacactgcacccacctcaattcaacacttccttttcctttccctccctccttcccagagagcccctccaggttagagggggttcccgaggaggcttctgggattatctgggctttagttctgacctagtattcccaggcatacctgccattttcttgcaaatagaaagataggctattctctggggtctgctttctagcatgacctagtaacttcctctccacaactcctttgtaaagtatccttaggattgtcctttggaaacttggccagcagaaagctctggggtacccaagaggcttggaggagtcctaggcctttggagaggtagccactgcttgcatatccactgggaggctctgtgacctgctaaaggatcagggtgtgggaccacagcacagggagccaaggttctgcttggcatgggtggtaggtaccactatggaaggaaattgggaaggatccccgggaggtgatatttacgctgggccttggaaagaggagaaatttgctaggttgatgtcaaaggccaaggaagacccagcagaaggctcagctccaccaaagtcccagaaaagtgagagtttattcatggcccttcgcacctgcatctgtacccaacaatacccatcagagtctcctagaattagggccagctaaataatttagctgtggtccaatgctaaatgaaaatgcagagccctttgttcatgaattacaaaggatttcaagatgatgacagcagagtagggtccttctaagcttgtggccctgtgtgacggccagtgaagccaaccctgcttgagtaagtgtagcaattgtgggatttagcgccaagaactgagttcacgtgcaggcgccaccagttacttaccaggcccacgaccttgggcaagtcctcctcatctccataagcctcatctgccaatgagcgatggtaccctcctgcctgcagaggagggtcagtggtgccagcatctagcttatcccaagcagtccaggacagaagctttggccggggtggagtggcaactctttccgtcacgtagtgatgttcaaggctctcctgacccaccccatttaccttccagcgctgcccctgtctaccttggtggcctggttttttgtgcttttccaaatccacctggctgggcagtggagggtatggggagtctactctgttttatttgcagagcctcctgtctggactgctccttgcccacactcccatctctccttggcagactcactcctgcaggttagatgtcatgcagatttctttgaccccccagctcctcccttccaacctttactctgtgataccttcagtagctgcaatgacctcttgcactatagagttctctacagtgtgcgaagtcctttcacacccatcacaccctggagagctcttgaaaggccctattcccatttgctagataggaaaacagaggctcagaggtacaaccatcctaagttcctgggctgaggtcagacccacatcgggtaggggtgtagacagtggcagcagagaatggtacctaggctccaccctcggccgcctcatcttgcagcatttgggaaaactggcttttcccttctggtagaaagctccagcccctggcccaggagaggtatgtgggttgctgaagagggcctggtagagcgcagaggtccagccagctagagcagactagcgcccagccctgcttttccccacaagtgatgtggcccagttcacgtggctcggcggactagagccaggtatacatggctctgaagtctggggcagaggtgagaaggccctagctggcctgggctgcaaccgcaggcaaaggctggccacagatgagaggggtatcgtgtcaggggcatgacaaactgttccatatggctggcacttcacaaaagacactcaaaacactcttggtggatgagtgtggaggatgctggcagattgcggctgtggaccgggctgaggcatggaggttttccagctctgttacccctttctttgtggcttctgatgagcgacttcatctctctgtgccccatttcctcatctgtaaaatggggagaatatccctctagttgggagggattcaacgaagtaagccatgggcactctcacagccatgcctggagcatggttagtgctttctggcactttctagcatgaagagtggaggtggcagtagcgggagtgagtagggggtggactccagggctgtggccacacaggagggtttcctccactgagcagcatggttgtgcggtcttttaagagaaggtggagagggagatcagggattggggttgggctggatttggatttcatatgaggcaatcccaaacagctgttgctcagagctctgtgggcagccacctggggtgagggctgcactctcctcgccagcccctccagcccctggtgtgtggctttaggctgccggcatgcacaccctaagttgtcagtcagcagacttccagggttacataggcggtttggggctggccatgaagaccttgaatgccaagcccagctcacagcaggcctggccagggcccagcccgtggccacacggagctgggattccagggtccgcatatggcatgcctgtcaatcttcagcgccagctgagaatgcacacctctcctcccactgcgtgaaatctgtggcctgcagcccaggccctccaccccagcctctgcagcctgctatgactccacaacccccacccaagcctggatctgggaatcgtttgcagctcactgcttattcctgcccaaggtaggatgcccctctaggtcaggagggtgggactgctgtcctggtgggccctctgagcaggacttgtgttcaagcctcagtcccattaagaactgctgtgtgaccttggacaagttgctgcccctctctgagcagctgtttattggtctgtaaaatcagaggattggggtaggtcagggattacaaactgcagtcttcaagggtgtcaacaacccattgaagttgggactatcctgttgtacaaatgagaaaactcaaagcacagagaggttaagaaacttagccaaggtcacacaggttatagtggagctaggactcagcccagttttatctgacaccataatatgtgttttccctaccacaacaaactgcctgtcacagatacttgcttgtttgctgggtgatccattttgtccatcagccagcttggtgttgaacacttccttgtgctcctgcaccgtgctaggccctggtatccaatagtgaatcttcagttgagctgggagagcacagctccaggtccggagttctgagtagaggtcacagtctccagtgcagggttgctaggtaggtgcagctctttcctcatgctgtaggaggcagccagagaagacttcctggtggaggggtaaggggagtggggttcctatacagagtggaagagtagggtcttcctggggtctctgcacaactgggtggcatgggtcagggcagtccggctggggaggaagattcattcagccacagctgaggcagcccctgagggccttgaatgctaggccacagagtttggccatgaacctgcagggagtggggagctaaaagagactgcagggcagtggcacctcctttgtgagagctaggagggctggcctcagcttgcaagctagggcaagggtgaggtgtggtccagtctaagacttagttcacccaggaactgtggcagcaggaagagcaaggttggaggcttgtccactggccggaccttcatgctccaccacggcctcttcagcaacccaggcacctctgctggaccaggcgctggggctttctaccaaaagggaaagccagtcttctcaaatgctgcaagataaagcgaccgacgatggagccaggtgccacaatctgcacacctcccccaaccccatctgccatgggcctgacctcagctcagagcttggggcaggcgttgctcagtgacacagtgggatcagagaggctcagagaccagcccgggggcacacagcattcctcatggtgggtacagaggctagagcaggtaggcagcatctttcccaagagaggtaggtctgggtctccctctggccgtcccagggtcctggacatgcttcatggatggtgtgtgctcactctggtaggagtgtaaggttgtaaagagtttcctgggtgttacttactgagggcgcttctccctcccactgatgtttgccccactggctctttttgagctctggagtttgtctctttctggttcatgagccacacacccaggccacacattggggcagaggacagccttggccgtgcctgtgttcctaggtctgaagcctcagcgaccttgcagcaagtaatagacactgggtggggccacaagcgtgacatctttattggaataaaaacaaaaccacagcctctctctcgtgttgggaggagtggtctttagaaatcattttacccaccccactcatggcacagatgaggaaactgaggcccagagataggagggcatgccccaaggtagccaacatggcgcttcaggctatcagctgagtgcagggccacactaaactgtgtaggctacatgggggtgcagaggctggcaggggcagggaccagcagcagcgataggagccttctatctgcagaaaggcaggactgaccctgaagggccaaggaagctctggggacctgtggagagccacccagaactgggactgagagctgcacgggaacccgcagacctggctccgtggagccgcatttgtgttctgcctcctgctgtgagaggttcgccaccacaagcaagggcttatcctgtcatccatttacccagagagccccagtgaggccgggatttgtaggcccaatggtcagggctaggggcaacgcctcagagtcagggcctagtgtgaggcttataaggggcaagggagtgaagaaataaagtggactcaggaaaccaggggctgcccttcccctcatcagccccctctgccaaggcttagcagagtgtccagcaggctcaaccatctgggaggctgctgaccacaggcagcatggcattacctagggccagggtctaggggctctgaaggcctcaggggtcagggagagcttcctggaggaggtgagtgccagctgagccccaaagaatgaccagactgtgaaccaaactgaaagcattccacgcaaagggaacagctgggccaagaccctgtggcagccacactggggcagataatgggggctttgtggaggctaggactgctcagggaaagaaatgaggctggaggtgcccccggggggttggagacggcagaaggaaagaaggttatattttgcttttaacttgctaaatgcccctgagtagatcactgccccacttttgtgcctcagtttcccttttatctcctctgagcttcaggcacctggggagccacagcagggaagtgcctcagtggaagagtccgcttctggaggctttgagctgatgctggggatatgagctgagggaagtatgggcttccccagcacctcgggggcagttggcccagaaggctgctgctggacccaaggcttctccccagtggaggagagctgacctaagatttctggggtttgccaggctggaccaacctgagaggatgagggattaggtccctggggcagcccccactacagactaaggacctgggtcccaggataaaatgagagatgcgcctcccttctctttgctgtgaccaactccttctttcctccttctgcctccttccctcctgctggggacagggaggggacaatatttattccttcccaaggctgcagctgactgataccctgatgcagaggaaatgccatgccagtgccaggcatgctgccggcgctctgggtgcctggtgccctctccaggtgtggctcctccccatagccctgggctcggccggtctgtgtttgcagagcctccactgacctgcagcggcctctctctcatgcctctcctatcagcagagcgccagccatgggctccttggactacaagtccccgggattgcgcaaattcccccagcagtttgcacagcagccagctcaggccccgtcagatggcccaggttcctgctcgggaagcccattcttttctggaataataaagcagccaccccacagcagggggtggcaagcttctcttatcctcacaacccctgactcatgtcaccctcataatatcaagtgggctggggcggggtggggaggtgggtggcgttttccagagggggaactggagtcagagaagagaaggcatgagacttgaccagggtcacacggcccagccaggactccaaccaggcccctgctcagcctttttagaccgagccagtgtttcctgttcagggccatgcaggaggtgagtcaggagcaggccctttgcaggagctgctgggggccagcaggagaggccaccagtctctgtcttccctctttggctccagctgctttaattggctggggctgccagtggcgctgacatttacctggtgggaaggagggcctcctccctcttgaattgagatgctaaaaataacagggcccagcttcccagggccactgctcagccagcgcctgcctgccccctcagctacctttttcctgggtgctggaagctaattgctttgcaagcatgcagttccttgcgctgagaacttcctagggattgggacaggaggcattgcatgctcagcttctgagtctaaagaggggtctctgcaagacctccctcccctccaggcagcagggtgatggtcttctgcctcaggtctccctcccccttttctccctgggtgcagtacctgtccaggttgactactccacccctaggtgcttgggtgccttctttgagctgccagagtttcccctgctctaagagagggggctctgccctccttggagttttctagtactcacctctccctgcaccatactcgacccagacatatgcggtgtggccctctgccctcatgctgttcattttgtcataccagcaaccaagaggagcccaggcttcggagctggacaagtttaaatccagctgtgtgaccatagcacatttccaagcctctcttttctcatctcagaaatgggcatgaatctgacctttgcagtgttgttgcagaatgaatcgcagtgggcaaaacatgcctgatcaagagtggagcccctggggccaggaggaggcgtgtgtacatcatggggcgttcctttctcttgctgtgtaaatagaccctggaactcaataaattagattgattggaccagaaggggaaggtcttgaagacccaggctaaggattagggactcagtctccctgaaaacagggtatgcttgccaatccccagggcacctccagagtggcctgtgtgtttgtccagttcttgccctgggtcagtgtgaccataatcattttgacattggccagcatctcccgggctttgggatcattccagtggaaaaagtagttttcagtgctctatgcttggcaggtgtgagagcctgggcgtgcttaacccatccacacctcaatttcctcatctgaaaatggggatgataatacttccttccccgttaagtattgtaaggattagattagcaacatatgcacagtacttagaaagtctggtgcagggtaacacttggtatgtgttagctggtactcatagtagtaagaatagtctagcagttgggagtaataacagcagccacctgccgtttgtttaatggtttttatcagatgctgtgccggatgctaagcactttaagtacattatttaatgtcactctcccccacctcccagcaaccatacacaaggtactgttataagctctgagttccagatgaggaaactgagacacagagagtagttgaactgaaaaccagagttcagcatcagccccactagggtggccgtccagattgcctgggaccgtcctggttttagcatggaaaattctgtgtcccagaaacctgtcacttgtgggcaaaccaggatggttgaccacccaaggcctgcctgagtccactggccccactctgaagcccacaggatcctcttcttggcgcaggggcttgctggtgcagtcgctcggccccttcccacacctcataggcccctcccccagccagattgtgcctgcccatcccccagggcctggctccagtctcctctctggcttcctctcttccctcccctctgccagcaggaggggcatgactcatgcctggtgggctctttgctcaaggctgtgactgcagttgtctggtggactctgagctgcccctcaccaggcctcagtctccctatttgcactgagggctttagtggctttgctcccagctttctggagacgttcaggaaacctcttccttgaaagagggagggcagagcgagcccctgcccccagccctggcctgagcagttgggagggatcgcactggcccttccggtgcattgatggagtgcactgctgacaaaggagaaaggtcagcagggggacagagcggagttggtggtggcctgctggcctgcagtgccctcccacaagatagggcttcctgggggaggggagcagtgctccctgggctctgggtcaattcatattgatgcaggcagctgctggttcagcaaagctgggcatccaagcccccagagggctgcggggagatgcctaggtcatccttgacacctcactttccctgacccccacatccaacagttgattaggcccccttaaccatctctggatctgtgaccctctcagcatctcacccctgctggggaccatcttcctgcttctgaatccctgagccctttccagccctccctggcttcccccatcaccttgcataaagtcagaattttgaggctgacattaaggcccttactgagctcagaaaggctgcccagagctgcccaggccttccctaatatcagccttcttgtgccctccaccctccaaccccaaggtcatgtgaaaggtctggggacaccctgagtgccaggcccagcgctgtccagtcaacactccaaccctacccagtatacagggctgagcctgcagcagagctgcagccaggtgccaaatggatgcagtgcccctgccgtgcccttctcagactcccccttgagctgctgccatgcggttgcccagtggatctcatgccccagctcccagagggcaggagttatctgtctccccagcacacatgcagaccaagatgatggcaggaaagcgccatggttggtgcataggcgctggggtcataatatgagggtctgattccggctccatcactgactaaccgtgtgaccttgggcagtcacttaacctctcggtgcttcaatgacatcatttctgaaatgtgggtaataatattctgtccttcacaggatagtgggattcaataaagtgacacttatgaagtgtttgcagggtcccagaacattttaaggatcagtaaagtgagctcccatcagtcatcatcaggcaggtatctatgaaatgagcaccgtcttccaaatggggccctcccagttctttgaagggtccttgcatttttgcccggattgttccctctttgtcttcctcctgctctagcatcccgctgcacccccgcctgacatctcctgagactccaggaagccagcctgccctagccttgcattcttgcctaatccaccccattgccatggaatgccttcaggctatggccaggagttcttcccatgtcccccacagctctgcacaggttcatggaccacagtggatgcctaataagaatttgttgggttgaaccgatattcaccaagcaaagtcacctccaagaacaatgcagcaatgaccagccaggcctctgggcccatccacagcccattgaggacatttctgagaccagtcctgagctactctgtgcaggagaacagcacgtgcccactctggcctcttcggtggcgggggattggggataggtgggggtggcactggggctcagcagccacactggaaggtttttcagggggtttatctccctcttctctgagctgtcgtgcctgttttgtttgcctcggtcccttccccacccccacagttctctgttaaattgtgttattatatttaaacaaatcaattccattgcagagtttttcctgtcctaatgatgagtttgcagcacaaatgccattgatttctcacagccctgaaaaccagttgatgaatagcaccaggcttgtctttggagaggcacttagagcagctctgcatggccccctctgcttctcccctgtgctgtccccctcattcaggaccccacctccaccccacactctgctgccccctgagttggggctgaagtcatgtgataaagggagaccctctgtgctggccagggctggaatgtcatcgcaagggcccggcccctgttctggtggaacaatcatagtggagatttgtattgattttggccaaaggcacaacttacagagcagagaagtggtgcggtgtgatctttgtcttcccttacaagttcagagcgcgttcctgagagtgatggcagatagcagctcagacaccatttctagaccttgccagggctgctgaaagacctttgagcactgctgttttaaagggaggctccagaggtttgagagctgtctgcactggggagtgtaaaacttccctttgtgaaatccttcagaacctgcagtgttcaaagtcacggttaaaccactaccctgggctttgactttcagatcactgccacgtgcacgagcttctctgagctttctaatgaccccggggcttgggtgggcaggtaatattgttcccctttagaggccggcagactgagtcagggtagtcactggagagagggaagggctgcttgtccactccaagtcctgagtgcagcagtggctcccatgtctcctcctacaagggtaatacatggcaggggagctactctgatcaccagccttttcggccgggctttctgtctgtctgagcccaggtcctcgtgcaggtgtctccactcagctgctgcctgcagcataccacacaagcctgtgtattgggctggagtgaggcagcagggagcagcgaggactgtggcattctggagagtgcctgccccacctaaattcctaaaagtttggacaacccatgcccgtaaaagtatactacatgggatgagactgggggccaaatttgctgcctctcccctattctaattcaagcctttgttttggagactagaatgtgtggcccagaattggaaatggctcttcaaggtcacagcacaaagcagtggtgagctggggtttgggtctgggagaaggcgatgaggccccacagccagtgttctctcccctccctcaggcttggcgaggcagtggggtgggggcagggccagggactgtgttctagggaagatgggcccctcacccctgagttcaggggtagctcagcaggccccacttcccttttttctcccttcctccttccctcccatgcagacagacctcctgtccctgtaatcaggttagcctcctgctccgatgagctggaccagctgcctcttaatgacctgtcgacctggccccctcgcaggctctggggtgggggaggggaagctaagaaaagaacggtcggtggaaagaggctgtccactcccttgattcagacctttccacagcttctaggatcaagtccaaacccttagaatagcatccaagaccctgcttgcttctccagcacccaccccctagtacactcttttcctgcagtcacatgatgctgtttcctacctccctgccttttcacatgcaggtcctttggctacttcccaccttctcagaaaactcctgtgcatccttcaaaacccaatttgtgcctcttcctcaggactgcttcctctgggttcctgcctctgtactctcacagcattgggtgctctgctggtctggaacttattcccactgtgttggcctccattattcctggatctggtttctccggagttccgggaggaaaggaagaatattcccttccctctgcacctcaggggtacagcacagagaagtgctcagtgaaagtatagggccagcaaagaagagagaagtagggaccagggaagagaaagagacagacaagagtataaaaacagctgctcccagcccctcatactgccctagcctgcttcctgccagggaggccattcctagcgacgcatgcctggcctgaaatagacacatggggaccttggtagtgcattttcatagctcaacactaagcacccccctcccccttattccttgggcactgaagctccctctcctcccagggccttgcctctgcagccaagacccctcctccagcagtgcccagacctcacccctctgtttctgttaactttgttttataaataaatcatataaataggctcctctgattcctcggagcatgcagtgtttaaggactggggcattgccgcaggcataattgtactaccgaatccatcagctgcctaattaccattcattttgcatttatttctgctaattaaaaagagagaaactcctaacaacttttacataaatactatatttgttctatgtaaagatggatgctaatttgctggtgattagctgattatcggattttatagctgtcacacaggatggccctctctcccatttgtaccccggacaccacttgaggcccctgatcagatatgggaggaaggggtcaagggaggcccacctggggggttcgagggcctgtctgaagcccggggtcaccaggagcaccagatgccactggggctcagggcggggtagggggaaggtgctgcagtctgattggtggagctgggaggaacctgtggctcactcaccgcttctgtatagatggagaaactgaggcccagagaggcctagcacttcccagcaaaacagtgaccagggacagagtcagactgctattctagactggactccagtgcccatcccactgttgtatgctgttgtcaggaggaatttgcagggaggtggctttatctgctgctggagaactatgaggaccagactccaactcatgcagaggaaaggagcacttagcccatggcccaaactgaaccctctgtgtacccttctgaaaacctccacctccttctacttccctgggcagccctgggctttgccccacggcaccctgactgcacttagctaggctttctcccaacctggattgagacttccccaggactggccttgcaccctgtgggctatccggacacatgtgagggtgtcaaattttaacactatgtatgtatgttcatgtaactaaggaaaaaaatataattaatacatcaaacccatgatttcacagatcatagtgcttttgatgaggctaagtaaaaaaaaaagtaattggtttaaagtgatataaataattaaatagtttttttttttgagatggagtttcgctcttgttgcccaggctggtgctatcttggctcactgcaacctctgcctcccgggttcaagtgattctcctgtctcagcctcccgagtagctgggattacaggcatgcgccaccacacccagctaattttgtatttttaatagagaagtggtttcaccaggttggtcaggctggtctcgaactcctgacctcaggtgatctgcccgcctccgcctccaaagtgctaggattacaggcatgatccactgcacctggttgatacatttttaagtacataaagaattaagatggaatatggacacggcttacagtacctaataaggtgggttatttgataacttgaggagggtctgagaagaccaggtcaggaggccaggcagttgaggtcagggtcagcagtgacctggggcaaggtgggccaggtctgcagccaccactgccccatcccatgactgggcagatggtgccctcagattgtgcccttctctccccagccctgcagttggtcagaattagcccacaagagagcagtcatttgtcctcctaaaggtagtttcactgggactctgttgggggaggccaggaggttggacattaccccatttcccaccaagccaccagttgcgagtgtgtcacttcacatggacatgcggtgcacctgtttcccctggcattgataggtgagacactgactggcccctgttctctttcttcctggccaatctgaaaatgcccagttctcgagttaaagggataacagctttgacaaggccaggtgttgtctgggtggccagagagctaagggtcagggtcagcgtggcccattggcccattggagatccccaaggctttggggtccaagggccagggttccaggcctggctgctgcttcccaaagcgtcagtctcctcctctataagatggggacagttgtgctgaaagggttctgagggtcatgtgcaaagtgtccctcaaaggaagactcagtacagccggcagtgagcccagttccaggggccctctcggccacccacccacccgccgccgctgtgtctgtgccgccagagatctccctctcatcagcccctttatcgccctgtacacaatcaggggaagctgggaaggccgctggggctgagggcagatggaaaacaaagagagaaaacaaaggcactgctcctagggggccaaaaggcacctgcctcctcccccaggcctggccttggccaccccagtcctccaggatctgccccacccctccagaaggatagtctcagaactcatgtaggtcaccactctcaggggaccctcaggaagtcactcgtctccaggccaccttttcttatctgtaaaatgagagaattggacaacaggccatgtgacttttggcaaaccttccccctctccccaccctccagggtctccttggggcaggcccagctcgtctctaggaccccccagcctgtcccaggaagtcaagatggtgcccacttctgtctgtggcaaggaccccagccctgccttgggcagggtgaggtaaacaggaggcccctgtttcctgccgagatcttggggtgtgctgggtgctcagtgcatctgtgtggaatgaatgaattatttcatcagaagggggcctactcagagtcagccctaggttgctgctgctgttgaagcctctcagggaaggagacccttctggtcacttgagggaggtggagagaagtggtgaagggctggcaatggcatccctgccaggctgtctgggttcacatcttggttgtgtgaccttggactggtttcttaaccttctgtttcctcatctttaaaaattggttatagtactgacctcataggttgtggtaagattaagtggattaatttacataaagtgcttagaacagtacagctaaaggttaaatatcactatccatttcatcactcttattatgattagagggaggcttacagggaagcacatgaagattaggcatcctggcctctcctgggcacagccctggtgaaggctgggaattgctgggagctatagagtgttctaggtgggaggggcagcagtttgcaaacaggaacatttctatgtaagtatttctggtaaactgttaaacaggggcctcatgagaaaggggcatggattcctaagaatataggaatttgttgtgatttcttttctgattctaaatatatatttgtaatgttaaataatttttaaaacagggcctccaaaattgtataagcctcaggccctgcaacctgagctgttcctgattgtttctgttattgtgattgtatttctgtggcccagccctgtgctgcccactttggtggtcctgacaggatggcccagccttggggtcccagggacctgtcttctcaccctatggacagcggtgttatgtgcaggctggcctctgagctgtagtctacacttcacaccccagatggagggagctctgagggagcagacaaaggaaaatgggtacctcagggaaggtctctgaaggagtcttctctgcatatgcaggacacagagccctgtgcccagaggcttagtggccagccctgctgctcctactcacccggactaggtgtggcaggccaggcccctctcccttcccactccccctcggtatgtgccctggtggacaggcaggggcgggtggggccgtgggaagcaggctgctgagttggaacagtcacccctacagtggtcgttgagtggctggctgtgcaccaagcttcaggttcctgccgggtgcagacccagaatggtccttgccctctgggagctctcccggtaactgggaccacaagatttgcacctggaagggctaggggtgagcaggggaaggctgtactagacccatctctctccgagaggaggcaggagagcccagaggtcgtgagggctggaccctgggggaggacctctgagaggacgggccctcggctggggggggggtgctcctagggtgggcgctgtgggccctggcgcctctgccagcagcagggcctctcggcccgggctctgacagggacatttataactcacagctgtgcggtcctgggcccaactgactgtggtaaaccgatctggcttcaggaagtcccgtcccgaggccactccccatcccgacccccacactctccttcacctcctgacacccacatcctgttctcagcgggaggggcaggcggcgggcactgggccaggggcccagccagggtctccaacctgtgggcagagtgggaaaggacagagagcagcagtgaggccccagtgctgcggggtgcccaccattgccagcctcctctcaaagcacacacagggaggcagaggcccagaggcagtgcaaggcccccaggagcccacagggtcagagcgccaagagcataggttgtagggctcaggggaatgttctgcgcctccagatctacctagaaaggggattcgccttctggcctctgtggacccactccagccaaaaggagcctgaccggaggggcagagtgaaccagaggcctcagagaatgctgggaaagacgccattttgggccctgggccttgggctggccctcctttgggacaccccgtccccaagatgcttcgtgcccatcccacctagatcctcccagcctagttcaagtgtggggccaaaaatggtcttgcccagtgctagaaagagagacagtactaaaggctgcagcacaccatggctctgaccccttacatcccttggcctgatacaatgaccagttcttgggccccatcagccagcccgcccctcctccatgcctctccctcttcttctgcacaacgtttgccaaagcttggcccaggtaaatctggtagtctacagcaagattctagaattagatagtacccaacaggacatacatttttgttttactagttacaatttattaaagagtatcagaaatatataactagcctatcaaatcaattatttcaagggcatgattgctttggacaaggccagatttattggagcttaaaaaaaaagtgagtggaaggtgaacattaaattaagtcatcacacaggtagatctcagctcagaccaagaatcctaaagagcgtggaggaagagctgaagtttggggagcacaatctaactcatcaccaggactcttttctgctttaaactctgcatctgggcctcctctcccagttataagcaaaacagccagccctgaaccttgtaggaggggcaagggagtgagctggttttcccgaggtgcgtacacacataaaatggctccgagtgttggtcagggatctggtgagcaattcataatgaggaaagaattcaggcaggggtcacagagtggctttggaagtggctgccggccggccgtgtgagataattccccgaagccaggcacggcgcagagaggaggccacggcaagggctttgtacacccggctaaaaatacccccgacagcttctccctgtcaccctgcctgggggccgtacaggaaagtgatgctgttctgcttttcctactaagaagagaaagacaacacaaagtccccagtcctggaagaaacaaaacttatatttatatatttttcaaaatcccactaggaggaattggcttgctggttggagtgtggctgggcggggaagacacagccagctctgataaatcaggcatcccggggtgtgcttaagtgacccaagaggccgctgagattagcttggcggcagggacagaggtgggaggggagtggacggcacaccggcctgctctcacacacgtctcatctctcccctgtgtacccaggaggaagaggaggaggcccgttggcgtcggaccaatgctgcaaggggtgtgaggagaggagccgctgtttttcactgagctgccataccccgaaaggtaacaccagcccccgatgcccaggccataccatcacctttgcctaagcctgggcaggggcaagccctagcagcccagaagtgctgtggctggaccagagctgagggttttcagctgcttctcacagcctttcctgggcctggctgcagggcctctctataactccttgtgtggtgctcatactgccagaaaaggcttctgggtgtcagtttgtctgtctccaaaatggggcactgggctcaggtcctgtacttacctcagttctcaaggattctgtgagtcagttgtgtctgatttggttgagccatcttagcagcctggctcagttggaactctagggctgtagccaggggtcccagcctttgtggatgctggattctaaggctacgaggtccacagtgccatgtggggcttgagaagggaggattttccaaagcagacctggctggagatgtgcttcactggggatgtggctgtggtctcctttgtggcagcattcaaaattccaaagttctccctgtcagctctgggcaagaattattatctgcattttcagaccacgagaacaaggcacagggaagttaatggtgcctgccagggatcacacagctagctctggccacgccacagcagcttggcttcatcctatttgccataccagcttctatgcttttacttcgaccgtactgcactcatcctctcaagagaagttctgcttttgaggccaagcaaccactagtctgtattgtgtgcctgtgagacccatccctccatccatccatcatccatccacttacctgtccatctctccatccatccctctttcttttagtccttccacactcatccacccattcatccctccaccacctatccgtccttccatccaactacttacccacccattccccccatccacccatctatttactctttaattcactcatcaaatattcatggactctcacaccaggccaggcccgcattaagggctggggtttttgtttttgtttttgtttttttgaggcagggtctcattctgtcacccaggttggagtgcagtgacacgaacatgattcactgcagcctcgacctcccaggctgaagcgattctcccacctcagcctcccgtgtagctgggactacaggcatgcaccgccacgcccagctgatttttaaatttttgtggagacggggtctcacttcgttgtccgggggtgggttttgaagacagagccaatttagccctgccctgagagggtgtggtgtgcaatggagtacgactcagatcccagagccagactgagttccataaggcagtgctcaaagcctgtgtggtgaccatgacgacacaggggacgagggagaggggacgtggctgattctgcaggcagacattcggggaggaggaggcggcattgctcatgcattcattccccaggtgttgaccgagaaagtctgtcaggaactctttaagttcagagatatagcagggaataaagcagacaaaactccctgcccttacggcgcttgtactctcgtgaggaggcatggatgataaatacctaaaaagtgaataggtcaggtgacgctaagttttaagaagacaaatttagccaggtaggagcacagagtctacagtgtaaagtactctttcactagccaaggaaagcttttttttttgagacagggtctcactctgtcactgtaacctcgacctccccagctgaagtgattctcccacctcagccccctgagtagctgggactacaggcacacaccatcatgcctggctaattagtgtacttttagtagagatggggttttcccatgttgcccaggctggtctcgaactcctggacttaagtgatccacctgcctcagcctcccaaagttctgggattacaggtgtgagccactctgcctgacccaagaaaggcttctgttaagttggccatttaagatagctgaatgcagccagggagtctgcagggatgtacttgacctgttcaaagaaatgcaaataatccagtgtggctgggaggatgtcaggatagggggcgaagtcagagagatcatggaggacccactcctgtaggcggacaagtgtggagcagagagatagctgggaagctgttgcccacatccaggtagaggtgatgggaacagggacgaaggggtagtggaggaagaggtgggaagccatcaaaggctgaatatatttcagagacccagcaggcaggctcgctagtgaattagaggtggaggatttaaaaagacggagacagtcagggaaggcccttgggtttgggacaggagccagtggtagaagggaggtggttatttgctcagccagggacaatggccggggagggctgcgtgaagctgaggagttctgtttcagacacattgagtttgagatgcctttgagacgttcaagtggaaagattgagggggcagctggaaatatgagtcgggaaggcagagagaggtcccagactagagatataaatttgggagttgtcgtggattgatggtgttgcaagtcgtgaggcagatgagatcactcgagagtgtgtggcgcttgagagggtcaggagcctgaatgtgagtcacggggcacccagccgtttaggggagtgagtggataaggggtctgcagaggagctggagaaggtgcagccagggaggggaacagaaagcaggctctgagtggacaagcaagactctgctgggcagtgcatggaaaggactctgtatgctgcagtgggaacagcctacacaaaggctcagaggcctcaataaaccagccatatttggagaggactaatggagagacaggagagaccacaccgccttcctgcccacacttggccacacaggggctaggggctgtgggcaagcgcatgcctgggccctccccgtcaccctggccggcactccctgaccctggccaagcatcttgccctgatgtctgtccactttcccactttcttcagctagcactatggacctccctcctgctttctggggctcctcccccttgtccaaaaacgcagggctccaggtggcaggtcacatgctgcccatggggaagaggcaccgagcagctccctattgagcacctgagcatggtgtggatcctttatcctaaaagatgtgaaccttcccaggccgcgagtgagtgtcagagcacctgctcccagttaggggagctctctgcctttggtgggcaatcatatacgtgcgtgtcagtgttgtgtcacttcattctttctccatctctgtctctctctttctcagcctctactgcaaacatcagcagtgccccctccaggccaggccccgggctgggtaggatcccgaggaacaagtgtgctcctgaccttccaggagctccccaccgctccatctctcccttggctcctgagtgtacctttttggtgctcaggagcctgagcctgacttagaattccagctttgccacccaccagtagtatgtcttggggtgctgcagctgccctgtactgcagttcacaggagagggctccccgagactctggaaacagacccaggagcttctgagctatccctctgctctggctgaggtttgaccccgggcccactcacccctctctccacagcagagttgtgggtcttgtcagatgctcttccccttcagcgtgcagctctagtcccaccttctccagaaagcctcccttgaccactctgaggtcaaccagtgtttcctaagcacctgtgttgtgccaaatgcagggctcgagtcagggtgtgcagagatgacagtggagggtttctgcgctgagaactggcagtccagatggggtggtggggggacaggtaaagaacccacaccttccagcataacagtgagcactgcaggtgcccagcagagagaacggccttgacttggtcaggaacggctgcacacagtatagctgccctgaacaaggccagaggccgggcaggtgtgcaaggtgtgataggggctggggggtgggggtggagagaagagtgtgtccaggcgaaggagactcgggagcacagtccagcccgtctgcagagtgagtgcggtctgacatggccaggacgtgagaggaggctcaggagacttttccaggctgagaattgaatggagccaggcagggacttgtggacctcctctccctcgggaaagtcagggggagatgcccctccaactctgcatcggggactagggcagcagcagcagctgctctgatgatgcatggctccgtggcagagcggtggcaggaggcttcgggtaatctcattagtgtgcccggcggaggggacgagtaatcccgtgcctttagactcacttttctttaagcctgtccctatccattctctccctaaatccttgtactgctttggtgacatcaggcgggactggactggacttacctccattgaactgatgggtaaaacagggttagagaggaaaattcttgcatgatgccatagctcacaaggggcaggaactgcatccgtctgactccagaacccatgctcttataatcctctactatctcccagactgtcttagactatccaggcttatagactgcctccccactggccccattttgcaggtgaggaaaccgaggcccagagaaggtaagacacttgcctagggccacgcagcaagtcaaggacagcactggcaccagaagctcacctggcctgtttgtgtccccaccccaccccacaagcaggcacagggatccccctggtccctgcccatttctgcctggagcacccactgtgcttggtcttcctgcagtctttggcaccggctccggtggaaggcaccaagttcctcatcagaaggctccattgtgcctattgtttaaatatagattactaatgaaatgccttttcattgccttcccagtgaatagtttccgtgtaaagttaatttgcagtgttatgtaaattctgtttaacttcaatcaagtttctaattatgtttttaccgcagtaattcccatttgatttgtcatctcctgttaggtattcaatgttcggtgggcgggcttgctttccgtctgcctctcagttttccaaggccctgacctcctctctgctgtgtgtctgtctccgtggctcctggcttcttcatccacttcggcttcttggtggctcatttcccacctcctcgccatccctccatctatctcctgccctccaccttccttctttcttcctcttgcccagctgcaccttcttccccttctgttttcttcttctctgtctcccctcctccctccttcctgccctctttccccctccccctctgtctgtgtcttccttctctgtatcttctttctgtatcttcctttcttctctctattccgctcatggccttgcctctcactcttcctccctttctgtgtctttctccactgacaagactctctcctgcctcctctgctcacatttccatcccagtgctcctcctctcctgaggtcttctctccctcctcctccacagtagagcctttcccgaagctgcattccggagtgcctgcgaggtgtgctgggctgggggctggggccaccagaggagccctgtgcagccctgagttgttggggtgggggattggtgaagaacacagagtctagggttggggtctccgggttcaaatcccaccccaccccttgttaactgtgtgaccttccggttagttcacattgatttctgtgctgcatccataaaatggggtgataattttacctgcctccacagtaaagcccttcccgaggcttcattctgcagccctgagacagtggggtgggggattggtgaagaacacagagtcatggagttattgtgagaagtcagtgagataacctatgtgaagggctttagcggagggaggggcttggccagaattagcctttttactttcttaagagacaaggtcttgctttgtcacccagggtggagtgcagtggctcactgcagccttgacctcccaggctcaactgaccctcccacctcagccttctgaatacctgggactatagatgcattccagcatgcctggctaatttttaaaatttttattagagacaaggtctcactatgttgcccaggctggtctcaaactcctgggctcaagcagtcctcccatcccagcctctcaatgtgctgggattatagatgtgagctgccacacccagcccaggaattagcttttatttgggaactcttggccatgcctttcattttttgcggccttcctgagatgcatctgcagtgagtttctggagtcctgggggtcaggcctgaggccagggaagggtgggagctggctgcagacccccatagagctggcatttcccgctccccactctccacccctcagccttcctcccctagagcagggtctccgctctgcctgtcaagagatgtggcgtccttctgtcttagtgggcccatctcaggctgtgaggacaagcctgccaccctggggtagtagcggagacacagatccccaatgctggaaaagtgctcaagactctggcccgcagacctttcccaagcaacagaccaaaggcagagccgctcctgctgagttggactagacacccccttcttctaccctccctcaccccctagatgccccaaaggctataatataccatggactccagctacaaaaccactggtccaggtgcagcatgttggcagctctgccatttatcacagggacttctctctgagccttggctcccctcctgtgtggccccaacgttgggctttgggattctccctgagtttggggattgtccctgtagtcagggaacggctgggtggccacagtttcccagcagacatctgccctctgggtggggagggcggaaggaaaacaccagacacaggcagggctggggctgggcgggtgctctgccccctccctctgctcccgcttccgccccgactctgctgggcttcccacccagcaaacccctggcacatccaggaagcagaaaacaagtgcttggggagggcattcttctgggtgaagaagggcagccggtcacttgtccttcagagacacagaagcctgggccacatgactacctgacccacaagtggctgtgcgtgtgtgtagtgtacgtgtgtgtgtgtgtgtgtgtgtgtgtgtatatccctgtccctggccaaggaaaccttagccatcacgtggctggtttctctcgctatttgtccaagtaagcagttcaggccagctgcagccaggaggccgtgacacagagccagggagaagggccacattggtgtgggtggtggcagcgaggatcgccatgggcatcagggagccccgagctgggtcctagagctcttgggcctcagaatctggtatggggaggcctgggctggggaatggccttgttctgatcctctgccctccctggacgactgacctccctgccccaacccatctgtcaagaaaaggcacagagcttgataacagagaactctctcagccctaaatagagagggtgggcaccttctgaccagggggagccgagaaagacagagtcctcaccagagaaagggacacacatgggcacaaccaccatgtgtatggcccctggagtgtgctttagagccctggcctccgtggcaggagtgtggaagccaggcctcccgtgtgcatccatcaggccactgaattattagcacctactgtgtgccaggacctgggctaggcagggataggggttgtcagaacacagaccttctggaaacttcgtcaaaccctcgcctctgtgacatattttcttcccattggatgggcagcatcacctttcattgcaaaacccctgtgatcttgtcatgagctggccatttcccaccccactgccattccaggaggatgcaacccctacattgttgcagggctcaggaagagcagtgagaggcaccgccgagcctctcatggaccaagcaggtgtttctagccagggagagtgtccccttcctctagggaggtgtgagccagaccctgggcttccaaagcaaatgtgtgcatgtgggcagaacacagaggccctgggctcggacacctgggggccttctcctagcccacatggggagcagagcaccaggggaagtggcagctgcagagtggggcctccccaggccttcatcgaggtttgtcagcctgcatactgtgtcttgcatagatgacaccatctctgggggcctggaggaggagggctgtggtggctttttggggccatgcttctgagagcccacctgcattcatgtgtctgtttgtccacctcctccctgcttcttccctctttccttcctttgacaaacatttcctggcagccaagtctgtatggggcccacgctccacaaaagatacatccctcaccctgcatgatcacggccgaactggaatccagcaacattccagggtgggcccagggccaggcccaggtaaggcctaggagagagctggctcttggctaggaggcagggcatggctgaccccacaggctcccctgggttctgaggaagcttaggcgtacttccccaggataggccaacggcagagcccaccaggtgcctgagacaagggggtgtagagagccagcatcaaggccacacagagcatcatcagaccttgtctctgttgtgatgaggtctagggtattcaatctggaagagtcccacaggctcgtgtgctcaggctgttctaggaaacgcctgtccggaaaaggggtggagctgggtggccagggctgagggtgacgcagatccgccatcatgccacctacaactgaatgtggattctgggccggggtttttaataaagctgctgggtcagcatcccagaatgctgcctaggcctgtatgtccccagcctcagcttgcatatctctggggtcacgaggcttactactgccgtcttgtagttcctcctgggacatggggtcctggcctcccaccaggctgacgctgacttctgtcttccaccctgcttgtcttagggccacagactttaggcccttggcagtttccaattgagtccctcccgggctttcctccctgcaggcagagcatcaagctgggtctgtacgtggccccgccagggcctgtttgattggggtaatctggacaagtcatcagtggcctgcgctggcagccagggtgtggctaaagtcagttcctgcctaagctgggctgacccaccttctcaccactcaggagctcccggagccaggagggactgctgtgagtttgccttcatgaggaggcccttgggctgcctttggtacaggcaggagacctggatccctgctctgtccctatctctgtccctgtccctggggtaatctcgagcaaggctgggccccaggcaggcccacaccccctcccatctgtgttcatccccagcactaagccaagaggcttttgtccctggtgggctgtcggccagctggaagagtcctccttgctctctggcctatttgctttctgagtccctctgccctgggagagcatgaatgggcaggagaggggactggagagggctgagggcctctgttcagatctctgccctcactgggtcgggctgccaacctctgcactcccaccatacccccaacctgtggacaggtgagcctccagttcctgaggccacagggaatgggctggattcacctggaggccatgggtagccttgcagcccctgggccaagctcccctcccacccagactcctccagacacttcaggggttcaggcatgccaagtcagggtggggtgaaggggtctttctctaggcgctgtgcctgtggttgacatcacgttgtcctcatgtggggctgcgtggccccgtggggtggcacgccttctgcaagagctcgccctccaggaagttctgcattcgaagcctgaacttggccttggttcactcttcctctcatcctggtctcttgggcatgacttctcccaggggacactgctgtctgctgacttggaaaggcagggattcaatcaggggcccccgctcagctgtgtctgaagtgtgccctcctgggaagaaaacccagcagcacttttgtcgaggcctcacactggaaaatgaacggtgggaggcctagaggtaagaggccaaaggccactaagcaggccagcgtggcctgcccactccagcccccagaaagcattggtgcttctgaggaggcttgctcggccctccctctcccctgggctgggtggggccagtgggacaggaagccagggcggggctggaggatggggctcagggtggcctgggcctgagccagggatgaggcgaaacccaaccctggcctggccccgggccgcagccgtgcaggtcactaggcctcggcgagtggccacccgcccacccaacaggaagccctgcccagacaccacctttgccccaccccgtattctctacggctggcacttctcctatttcccatgagagctgctgccaggaatcctgccctcttgagaaaggaagcccgacctcgggccgccctgcctctggcctgcgctgaccccctccctgggcctccccgtggtggcagctctgggcccacgcccgtcctgcaccccccacacatgctaatgacttatctcctctcagacaaagcctgtgacccttggggacctagcaggagaaacctcacagtgggactaggcctgggagccaggaggctggggctcttggtctgggatcctccaccaacctgctggtgcacctgggcaagtcactcagccactctgggtctcatctgtagaaaaacagggagaggcagacgctctgcccagcaatgagcatcccatgggataaagggtttggggtgggttgaatgtgtgccctgtgaagacagccaggcttggggggtgataacacaaaacctccccatccacccctgtctgcctggaaaggagccccttctctcatctcccagaagccgggcgacggagcatgcctccgtctctcagctctgctcagggagctgggccagaagcagggatggggctgtgctgaggggcaggctgtcccaccaccctcccaaccccatcctcttcctccctcctggtgggtgctctctgacccatgacccacctccccaagtaagcccaagcccacctcagtatcagcaggggtagcagcttagggaatcaactgtgtcttaaagggggccaagcagaggggtcagggcaccacggggaaagaccagagtcgttgtgacattggatgggttaagacagatccgggggccaccttgagctcctgggcgagctgaaagcttgtcagcagcagggaagaccaggcacctgagcagccaagcccctgccatggggtggccacagctcagactctggtggccttggacacattgctgctctgagcctcagtgtctgcatctggcaagtggacctttcagagccagtgtcttagggtgctgtgagaagtccttaagatttggggacacagtgctgggccccctgcggcccttccctttgaatcagccttttccctgtgagggaaacattacaggtcaggattaggactagatttcgtaggcagtggggagccactgaaagttcttagaggagtagtgagttcatggggagaggaaccggcagcagagaagcctggcacactcatccggtgttggagccctgattcaagaggggtcatggggcaaagaaagttagcccaagtgggtgtcagcaccagctgggcttgggaggcctcagttttcctcctgtagctgggtgcctgtccgcaaggctggagaggcgctgctcagagccagcactgagggtggcaccaccacccctccttcttcctctggtgcccctgagtcccaccggcgtggggttgtctgggtttgccactcaggcccgggtgggccccactgcctctccctccctccatggctttctagctctgaatgggagtggactctggaggctgcagtgggctgcgggatgtgagccagggtgggggcattggcggtgggtggagtcacgggctgggtggccatgagtcaggaattgctgggcctgtgtgtcatctggctgcgtgctgtgctggctcctcccgcctgtctgcctcatctcgcccgccgccatctgggccccctgggctgctccaccaggtgatggtgctctgctctgtttataagagttcaaaacgtaggatggagtagtcaggggaccgggctctagggcccaggctcccccaacaccagaggtgaccttgggcaggtccccttcctcttctctgagccaatttcccccattgaagagtggatattaggctggccaagggatttcagccatggccccagatgagatccgaggcagctttgaaagatagcccagcccagtacagtggctcacacctgtaatcccagcactttgggaggctgaggcaagaggagcacttgagctcaggagtttgagaccagcctgggcaacatggcaaaaccctgtctctacaaaaaatataaaaaattagctgggtgtggtggtgggcgcttgcagtcccagctacttggagggttgaggtgggaggatcgcttgagcccaggaggtcgaagctacagtgatcagagattacaccactgcactccagcctgagttacaaagtgagactctgtctcaaaaaaagaaaagaaagaaaaaagataacccaccccaaacaagttaaatcagatctccggggcggggcctgcggccaggcttgaaagctctagtctggatggcctcagacgggctgctttctccgccctgcccggatccccaggcagcactgtgggctggtgcatgggttctggagcccagaggctgtgctgagtacagctctaccactttctaatactgggcaagtgaattcatgcctctgagcctctgtttcctcatctgtgagatggggctaacaccacccaccttatagaatctgtaccagtgtcagccaccatgttctttgatctaagccagttatgcaccactgctgccttcactgcccattcattcttccagaaaatattcggggattcctggacctgccagcctggtactgggtgctgtggcaacaggaagaggaaacccaccatgggggtccagccttttaggcctttccagggccccagaggatgggttctgtctgttgatgggcaggtgaagggtgactcccctgagaatctcaccgtgtcgctggactgagggaacccctctttctgaaagaacgaatgagaccccagattcaagggagaagaaggggcatcctaggacttccctgacagcctcagctgggaagcccctggggaggctctgaatgccttctggggtgggccctgggccatgctctgggcagatgctggctcaaacagggctggcagtagacagaacagaataaggaccctcctccttgtagtccatcactgggctggactatgtcctccatcccgtggtcctcctggcagcccagggcattggcaggcatcgttcctcctgcttggcagatagagagacagagatgtcaagggatgggaggcacttgcctaggtcaagggctggatttgaacctcacttctgtataaacaaaatcccagtggggaaagtcgagcttccctgggaatctgccctggtgggactaaaacgtgatcggcaaacctgtcatcccctttcttccctggccttccagcaggtcccctgcagaccaccactggctgtccttgcgggagagacctgatgttcctgtaaatagcaagtgctcctgttgcctgggctctgaaagccagaggttgaaccatgcacttgtcacccactaaaccttctccctcctcatgacccattggagaaactgaggcagagagaggtgcagggacttggctaaggccatgtggcttgtgagccggccaggatttcatccaggcctgggtgaggttagagcctgtgcccagacccgccaccacccgctagcaagaacaggactttcctttgtccggcatttttaactctgggtcttggccatcacttcagactggcctggcccacgtgtggccagaatcccaaagggatgcctgtttgggaagcgtgaccgccagggggctggcacctggcccaggaagggggtcatcgagaacactcagtgctcagtggtttgtgtgtgccaccgacagtgcctgtgcccttcagtgccacgaccttcctgtgccaatcatgggtatgatgtcagttcatctaatccttgagctgcagttagccccagatgaggaaacagactggagggataagtgactttcttgtgggccaatattggaccccctgggtcctcagttggacctccaacaccagaatggacctgggttccattctggtccacaaaccccctttgggtttgtgtccccttctctgtagggtggcaggcttgcactcagagcttcccaaggacctccaaggactctgctgagagcctctgccaggcccatttaatgctgcagggcatttaggattgggggcctcccagaggtgggatggggtgccctctagggcagccctcagaagcatagggccaggtggttggcaccaagcagagtgggcagaggcaagaggcaaaacttctaagagaggccaccagcaggaaattccacttagaaccctggcattgcaagtggcaagggcccaggtgggtgccgggggacctggtctggccacccccagctaggcgcccctttaagcaagacctcggtccctggaaaagggatggctgtgcccaccctatggggcctgatgagtggtgggtgtggaagggagtacctggcacggattttgcacctggaggatgcttgacaccttaggctgcttctgtggaagaggaggtgaggaccctgtcctgggagcaggtggttctacgaagcccagctgtgggggtctatgaagcctctcctgagttggtctcggactcatcttcccagagccatgggtctttctctatctctgtgatacggggttcagtgcccccatcccagcaggaccccaagtctacactgggcagcaaccctgagccagtgataataatgacttatggcccctgtttacggagcatttcctgtgcacgtgcatatgggcctaatcttgttatgtccttcaacaactctgtgagagtagtgactcttagtatcccccattttacagatgaggaaactgacccaagttcctagcccagtatcacgcagctaagtaagtgtcagagctgaggcctctctgatgcatcggaacctagatgcattggaacccagagaggccaccattctatgctgtgccctcatcccttgattaaagcagaaattgttcatttggtgacttggggagaagggagccccatccctcttcctcaggtttgagcgggccacctgtcagagttcaaggcctctttgattgcttggaggtgttggctggggcagtcgggacagctttccccctccctttcccagttccaggtctgatgcaaactcaaaggaaagggaagccagtccctgactgggcctgagtcatttgtttctgaatcctagtttgaatcctagttcccgtttttatcatggtgtgatcttggctgggcccttccctctctctggtctcagtttgtctctgttcaagtccagcaccaagggactaggttggcaggggccggaggccagacaagccacgcatgtgcaccaccagccagggcacggctgaggcaggacgggcagaagtcattcctggggcctgggcgatgctgcatgagctcttcctccaagaggaagtgtccctccagcttggccctgagagcacagtagatcaggactggacagggagcaaggccttggagaggcccccagggatgtgtgcatgtgcctctgccccacgaatgcagctgcgccctgctcactgatgccctctgcagctctctcttcagcccaaagctcttctccctaaaagcctctgggcctttgcccagggagaggtaccctcctgcctgaaagactgcccgagggacggtggctctgccccccattttgcttccaggccgagctgggctggcccgccagcactctgtgcacatgcccctagttatctgaggattacccatctcctgtgtcttccccactggtgtcacacagtgtgtgagcaccctggggaagcacaaaggctgggcaagtgctgacctttggccccgtccccacccctcccacccctactctttacctcttctccttcttttccttctctgccagatagcaggcattgtcatcagttgtttttaaataaagaaatgaatgaatgaaatgaacaacttctagaagtcactttatagccccatttttgaaatgaggaaaccaagtcgcagggatgttaggtgggtggggagggtagttcagagacccccccgctgctcttccccagttctcactctttgggtccccacggtgccaggttggggaccctaggtttgcgtggcatgtcctctggccacaggaacttcccacacatggaggcgtcctgagggcccagcagcaggtaccagccacgacttcccacgatctcagcttgccaggcctgcacttttctcacctggtgttcctgccttcccagcaggtcagcccagagctgcctgtccgcccttccctggccactttcgagccttccccatgggagagagaaaggtgagggagccgaggggcatgtggcaaggagcggaaagcaggcccagcaggcaggctgggcttccagggctgggcttcggaagacagtgcctactgtctgctggagggcatcctggagcctcctcacaggaggtaaagatcgacaggatgattgaaccaagcgtacctcgggactcttgggcagccccgcccaggacttcccgcagaccccaaactaccagcttcctaggtcctcattcatttctgttccttgaggccaactgtagttactgctcttcggtgaaaagattgagaggatatgcagttctcccagagcaccaagtccctgggttcagctctgctgtgcctggaatgaggactaccaggtccctgtccttatgggcctcgaggctgaagagataaacaggcacctaattttaattatgcaagcgaaaagaaacaccagcatgtctggaagttcagggagggtaccttggaggtggctctcagagaaggcagcatggaggaggtggctctttgagcattgaaggatggatagggttccaaaggacagtgacgagacgtagagctgcacaaggcgccatgtaggggactgcggctcctgttctgccactgtgtgatgtgtggcctttgctctctgctgagcgatttcttcctctgtaaagtgggaccttacagctccctggtgacaggattgtgctgaggatggagtgatggagtggggcagtgagagctaccagggttattgaggaaggagcctggcaggtgggagaatctaccacgtttgagcaggttgaatggttctctctgcaggcataaggggtgtgtgtgtgtgtgtgtgtgtgtgtgtgtgtgtggtcagttggcagcaagtgtgaacagctgaggcctaatgacaggagctctgaggtggcattggtgccacagaaccctggggcagtgtgaccctctccccttgttgtccatggggaggtccttgctccggccaatgtccagctcaatgtccagagcaccctggagcctcctctggtgggtgcatggctggaggggtgatttagggctgcttcatccttctggcccgtgggccttggcctgcaccctggcccaggctgggtctggctcttccctgtgtctggatccccacccccagcttggtgaggtcagggaacaggtatttcaggaatgcaggaggcggggcagccagccccatttggataaccatggggtaaatatttgccttgctcctggagccagcactggcccgccaggggaggacaggggcctgtccctggggtcatgtaaggggatgtgtgtggcggtggggttctccaagttggggaatcccctgtcaccccaagagtctgcctgttgcctgaccagcagctgtttggcacatctgtaaaatgacagtagaacagctcaggcgcctgaggatcagtgtagcgggagctggttccgccagcttggccaggggagcggcgggttggaccagatgtgggtggacacccttgtgaccaccgttctgatccccacttggccacttataaccttgagcaattaccctgatttggatgggcaccatgggctgagcttttaactccttggtgtctgcatctgcacaccccgtatcttgttaaggcctcacagctatcagggccaaggcacgtgtgtggtcagcagcaagcatgaagagctgaggcctggtgatggaagccctgaactccaggttgagggtgccctggtgtaacccctgcccagcacagcacccagggccatctgccccctcccccagtgcaacctggagccttctctggtgagagccaatggagggcggtcggcccctgcttagagaggagctgggggcttagagaagcctagtgacttgctcaaggtcacccagcaagtgttcaaacccaattctacccactcttgccctaacccttgaggccagggccagggcttcagccccaagtgtggactcccaagccttagcagctgtagagagcaactggctacttagccgcagccctggagccacccctggtcctaaatttcgggcaccactgccctccaggcatcctggattgactgatcctgcatctctctgggtcagactcagccccgggtcaacatgaccgagtgcctccaccccagcccacacccaggtcctcccagggatccctggaggtggggctgggaaggtagatatgatggggggaacccctcttagtcccaggacagtccctacccccaagtgacatctgccttgtctgagactcagccttgtcactttccagctggacacctctggcagccccatccttctcagtgtcatgttctgcaaagcaggagtgagtcctggcctcccctcccccgggagcttcagatgcactgtgagagtgaggggtgtttcaggctgctgtcggcacgctgccctttctggcctcgcagtgagaagctgccgtgtggtcagggtctcacacaccccagaagtgagagtgctgtgctgagggtgcctgggagagctatctgagcattggggtccctgcctcatggggagattgggtgggcttccactggccttgaggctcaggctgcactcactccgtggcaccaaggcctttccacaaaagagcgctcccctccagcccctcgtggtttatccttgcggtctgaccaggctgggagcaaacggggctacacctcgtctcctgccctctcttctccctgaactccccaggaggccaagcccacacaggctgtgggcctcggctaaggcaccagcagagctgtggtgggtgtgcacagcatggcacaggctcctggttcctgagcccccctttcgcagcatgaggggtgcccggcgccgtctggccctgagcagggctgctgagcagctcccagggctgggcagggttcaggctctccggctggttgccgcatagcgggcagactgtgagtggggatgggctgcttactcacatcccggctgtgttcctgtgggctgcttattagctgtgcgacctcaggaggttatagaacctcttggcctcgtgtggaaatcagggatgtcagtgtccacctcacagcgtttcactgagtgctaaaggaaatatccagggcacaatccacaatatggactcaatacagagtgccctcctactccttctctctttcctagcagggtggtccaatgcaggctcactgtcccccaaccagagcctgagttcaaattctagcacccccacttatggctgggtgaccctagctgggtcccttcccctctctgatctcagtttgcccctttgcacaagcccaacaccaaggggctggggtggctggggcagtgaggtacgtgtgtgcaccataagccgagcacccctgagacgctgatggcccgacgccgtttctccgggcctggccgatgctcactggggagcgagggcttttcggctctggcttccgtctcagctgccaagataattattttctctctgtcagcggctctgctggccagcttgcctttgggaaaggcctagctgtgggcggtggggaggcaggaggccgactccagttctgccccagtcactgactcactgcatgaccccagatgagggcaaacgctgcctgtctctgggcctcagtttcctcctcagtgaaagggaagtattggggtcagtgaaccccaaaactgtttgtatttccaaggtaagcagaatttgggggctgccagagccagaaggttaggatgtagagccacttcctctccccatggctggggtggggacactgggcctggtcccaggatcttggggtgtagggttccagcactcatggagcccagcaccagcccccacggggtcatccatgcatcagctgacgtgtgtggagagccactggtgtctggccctcgcatgcagtgcattacacagtctgcacagctctttgagggaggccttctctttatttctatatcccctacaacagttgaggaaactgaggcagagggaggcttaagaaacgtgtccaagtcacacacttggtacgagggcgaagccaagatttgaagcagatccttgtgattactgagcctgcctctcaatcaccaggcctctttgcctcttatcgaggccctgggcaccatttctccctgggagcccctgcctgtgcacagtgaggtggagcccaggctgaggcccttaccgagccccttggcgtgtatggaggcctatgcttcacgtgatgtgggcaccacctctcccgctgtgagccacgatctttgttctgagaggagctcagccctgcagtcaggtttcctggtttttagaggtgggcactccggtgcagagaggcacagtgactgttcacggccttgcatcggggcaccttcacagccatagcttgaattcagggttctgcacatcccagcctccagctgagaccccagagaagcccaccagccaggcctctgggtgtcatcctccctcctgccctcagggctctgtgggcagtagggggcgtgttggtgggccgttgaggagatgggccagctgagccccacccaacaaggatggttgtgtgcccacactcccagtgcacccgcaggccctgcacttctgcctgctgccatctctgccccgagcaccactgtctctggtctggaccctggagcagcgtccccactgctcttctgcctcctcctattcctccaagcccttctcccttcacagccatgggggcttcctaaactagaactagggtcacatccctcagctgcccagatgctgctgtggctcctgcccaccctctttcttactgtccctggcccctggtctccactcacggcacccctcccttgctcagtgcatctgctacaccacagaccccaagtcctccactgggccaggcacttttctctatcttggagtcttcacatatgctgttccctctgcctggaatgctgtttgctgcatcttggtctgcctctccctggcttgttgctcaacttcacttctccagagaggccacctgggaccttgagtctctgctgtgtggctcctggactcattgtttgtttctggcaagcactgcttttacttttgtatcatttgattctttgctctcgtctgagtctccgcaagggtagggatcactatcacatcagcatgcttgctgaatgtttgttgaatgaatgagtgaatgcgaagtgcctttgtcattgcatctccctggattctcccggtgaccttgagacatactttgaccccactttgacacgtgaggaaattgaaccccagagagtctgagagcatatctgtaatcacataaccagtaactggcaggtgtggggagtcaggggcctgtttatgccagggcaccccatcatgtcccttcagagtccccctctgtcagatggggatgatatggtggcagtgggcagtggcctcatggtcagtgccgggcctctactgtgggtagacccgctgacctcccactttcattgcagcaggatggagctggagtgaggtggaggggccgcaagctgctgaccggcgtgtggaacactggtggtttgcagatcactgaggtaggtgtgccacggggctggcgggaggtggctgggtcggacgcaggtgagtcctcatgagggcaggtgctagccctagcacgctggacctttgactcgggcctcagccctgaggggcaggagcgggcacaagccacctttgctgggacctcatcatgcccccaatgggctgtccctctacctggcacccagggacctcttggcctggcctttctctagagcagctgctaggggtgggggctgcaggtctgcccggggagaggggcaggtctggccacctggtcttggcacagcagccctgtctgcaccactctaaaccctgtggagtatgggcagccccaccaaaggaggcctgggtgagcaggagcatgtcggctgaaatgggtgcagggctacccaccccttctgcccactctcacaaacatgccgagatggatacactgggctctggggtcagaccacctggattcaaatcctgactggcatgcatggttactctgtgcctctgtttacccatctatcaaatgggaatgagatggcggtgcctgctccactctcgcagtgaggagactacacacctggcacacagcaaggactagggacatgtcagtccttttcctcaagggtgctaggacccacctttctccccacacacctcagtttccaccaccctgctccccctgaggacccaccagtgccaggatggacacgaactggaccccccgcctgataaggggggcagggcaccttgaggagcaactgagagcagctggggccagcaggtcctaaggtcggggccagcaggtcctgaggtcaagcccagctctgtcccgtgccccagcatttctcatcatggggtggcatttcagggttgatctcacttggccctgtgcccgagggtgacctgtgtaatccctgtttacttggcaactctcaacctagagatgagagacttcacaaaaatccttacttggcccagagccctttgtcccaaggcgtcgtggtgctggggcagcccgggaggggggagtcttcgccctggtgtggagctgtctcctaacatcccctgctgccctcagcgtccctcctggagcttagcgcttccaggggcctaggggcagggccaggcgagcctcagtcaagctccgacattggagagccaggctccatctccgttcctgctgcaggaaatcccagctgtctgctgattggctgcatgaccttgggccagtcccttcccttgtgtgagagccagctttctcatctgaaaatgaggctgattatactgacattgctgacagagctgctgtgaggatgcttagaagccatgaatatttttaaatgtcacagtctcgtgagcatctgctgtgtgtgtgtcaggcactatgctcctttaatacctttttacccccacaagaatcccacggggaggtttgtctaattcattctccagaggctcggcgtggttaggaaacccacagagccatcagtgctggaatggggatttgaaccgaggtccatcaggattaaccagtgcataaggccttagaggccaggggcggggccccaggacaagcatgggagctgcttggggaaagccactccatttctgccctgcagcctttgcccagcccgccaagtccgctgctctctggagccagagggtggccctcaggctggtggcctgcctctcccgatggggcctgcctgcaactcgataaggctaggggaaccccctgctaattgtctggtaacctttgaaattctccttcacggtgggttctcttttcggatgtttttcaaggtaattcattccttttccataaattgccagtggcggagcattaggcagctggtaattaatcataggagcagcttcgagttgattctttgaaaaagaaaaaaaaaatgaggaagagaaagccttggtggaaaaagaaaagaaaaccactctaaggcgagggtggtaatcaataccttggtgtcctagacacggctgggggtggggacggtgaacatgcggccttctctccttcttcccagggctggcccactgtcagcaccaacagcggcagcgtggggctccgctcttgaccattggctccctgtatggctttgagaagttgctgcctttccctggactcagctttgccacctgtaaaatgggtgaagggcagctgttaaactgaaaagaacattgaatgaaccattgttcactaccacgtcttagtccctggcacagagcagtggccccattgatattctgttaattgagtgagtgagtgagtgagtgagtgagtgagtgattctcatgcgtctctaggtagctgtcttgagtgaaggaggtggtactggctataggatattgtgactgtagctctgttataatttggagtgacagtcagggtgatgggccagttctgtcactttccaagctaatgatgaaaggacagtcttgcttggtgaactccggccaggagacctcaggccccttagtggcaaccatgctatctcttcagcatcttccaattcaactttccaagagtctgagctatctggagattttatgttaaaaagctgcctcctgcagaggtggtgagttcctcatcactaaactgtgtgcaagctggggttgcggctgtatgggccacttggacagtggattttggggcttggagcatccctgagtctgggagagagcatgaggctctccaggatggttactggggaggctgcactgatcgggaggaagcctgttccctccagagccccttcccaaaggtcccaggggaggactggacgaggatacaggcgctgaggcaccagtgcctgctccccgctgactggccccattgcatggacataggggcactgagcagggttgagggaaagagccacactccttatatcagagggtgtctaacaggttgtgggttgggtaggggggtggggaggtacagaaagcccttgtctgggaggtgggggcctcagacctaggtctgatatgctggtctgtctggtgtaacctcagcagctccctttccctttctgggatttgggccacgatccttcaggagagggcagcagatggggagtgtgttctccaagccttcctcccctgcctgggtgagctcagtttgggagccagagctgggcctgacaaagccggtttcctcttagcagcttctctcattctggccctaatgtgggaccagggttccttgcccagagacccaggatgacagtgcaccctagcctgagtagtggctctgggagactcagagcttccagagggagggagggaggagggtgtgtggctgtgtgcttgtgtgtaagtgtgtgcgtagtagcgtgtgcctgtgtatgggtgtgattgttcagcaggacgtgaggctgtgtgaatattcatgagtattcaaggaaaggggagacccctccctcccgtgtgtgtcaggacctccaggtgcacactggctccacattcagactggcctggggggccctgaccacagtggagctgactgaggggcagtgtggggcccaagcattcaggccggagagttcggacctgccctcccacagctggaggtcttgacagctccccgtggtcacgggagggcatggatttggcggccatgcctcctgccacagacttacaccctgagcctctggcctgaagtctctgggtgggcccaaccagctccccctaggcgggcctggtctgctaggggggtcctctgtgagcagccaagcctgacttggcactagtcatttctttacttcttctggccttggcctccaagccccagctcagctgtgtgtgtgtgtgtgtgtgtgtgtgtgtgtgtgtgtgtgtgtgtgtgtgtgtgggctctccctgcagggtggggcagtgggtccatctctgcgtgtctctgtcccatctccccgtggctgtctgtcctcatctctccctgcagctctctcctgcccagttttcctgtcttcttacatcccagaggctgcctccgccgccacacgcctccctgtccctgcagcgtatcccagggtccctgcacctcctcacctctgctctccttctcagggccactccttaccaggcctcccagcagcacggctgcaccatgccactgtgtcactgcttcttgtcatcctcagggctctgcacaacagaggcctccctaccttctgcctttgcctaaatctggctccagccaacatgccactccctcccaccctgctctttggcgggtctgagacaaccccacattcccagctgctggaggctgcactccgtgtgtggccaggtggtgggggaaggtgccatcccctcccatggccctgccgtgccggccacctcctggctcaggagtgcaggctgctagcccaccctgcagctgccctgtaccgtcctgggcatgtgggttgctggccaccagctggagcaggagaacgagaggcggcctgtgcccactaacaaggggtggttggaaacctggcatctccctccagcattaatgaaattcctgctataattagaagtgaggtgtacaggagctggctgcctggtgggagtgtttgtatgctcatgaataagtaaattgtcctctcctgaagggagaggaagctggaaggtgtaggcccagagggtctcagtggcctgtgaggggcagaggccccaccactcacctggacgccctcgggaagctccctcggtccccggccttggtcagccagtcttcctggaagtgcctgctgcgtgcccagccaactcagcctggcattcaaagtcaccgccatctggccccagcctcctttcacagccacatcacatgctagccttctgccagcgccctgggctgcggctccaccgtgctgccccccacccctcttcttcatcacaccttcccactctgtgctctggcctgagtttctatgggctgcctcatggctccatcctcggaagccttcctcaggccacacctgtgcctcctggaggccccagtagccttccctggacaggcctcctaaatccagagccttccttcgacactcttcttgccgtttaaagtgtgcatcagactgcccaccaggctgtttttcatttttcattgattacatattgggatggtaatgtattggattcacagggcagatattttacattcttcatcatactaagtctttgaaatccagtcattgcagtctccactgttagctgtattgcacggcgcatgcttggagagtcctgtttcatcttgcaggtgaagaaactgaggcctgagggaggaaatcctgcaggtgagtttgcagagcacaggctgtctctgtaggcaaggccactgctgtcctgcaggacaaaataaggaaccgaggcacagggcacttgtcctaaagatatatcgaggcaggcaggaccatggctagaacccaggcaactgaacctgaaatgaatagaggaaaggcgatgtgagcaatttcattccccccacaccgcccacagtagatttcagtgcttgaggctgccctgtacttcatgccgaaacagccccagaccaagcagctgtcacaggctgggccacgtattggccagtcctgcccttcatccctcccagcttcctgacagtgcgcatacaccctagacggagctaggagggtgagagcctttgttcctcccaggaaaggtcacccctgccctccagcccctcccacatcagccagcagagtctgaatctcagaggtgcccaaaggttgtgtcctcctaaccagcccaggtctccagcgagtggaggatgcctgtggcagggatggctccaaggctaggagggagaagaggggatttactccccagagcctggccctgcccctgctggcctagagagttctcccaaagtggggtgtttcttaggagtcaggctggcggcagaacagcccctccagagccctctaccctctggagccaattttcctctttgttacctgcaagcccccttcagctgcacttggctgtatgctccatttatgatctacctcttgtttgcctctgctcaggcagtgtggcagggagtcatggaaggttcaggtgctcgtctccgtccactgcagacagggctggtgccactacccaaagcggagctcccccgggggcctacctcctcccaccagcaagggctgcggagtttgagtgtactgagccaacagcccccctttctttccccagcccattccctccttcatctgcacacaggcaccccatggcctttttttgtctctgttcctccaagccagccatctgctctttccccactagactgtatactccttgaaagctcagggcaggctatgaaccatgtccccagcacagtccctggccagttctgtgttgaagggcagctgaaagccacagacaggcacccagcttgtgcaccctcagcttcctctgggcatagcaacaaggtgatgtctagcatcccagttgttaatgtgcttgtgggccgtattaagaaggattcggaggctgtgtgcggactccacgagaaataatgctgtgcatcgtgtggcgcatggtcacgctctcagccctgctccctgggtatcaggtctgcttgactgatgtctcagctctgggctgtggccagtgcaggaggagagaagaggcagggacctcagtgtgacccccacaggtgtccgtccaccctggctgctgggtgagctgggccccagaaaactttctagagcccccagggagctgactggttaacggagagcaggaaatttatggttgctgagcctttggaagctttttgctcacatctgcctcccccattaagtgcttctcacccttcttcagctccagtttgggaaacagcaagcacatcttgcctcacggctgttctgggaccgtctaccgctcccctgaggcatctttagggacctctgttggagcctaggggaacatctctgcttcataacctctgtgaattgctcccgtggtgccacctccatctggcccaccctcaggttggtgggacaggctggcatgagacggccctcgcccttgccaatagcccctgccagttttctctggtccctggcctcacccagacttcccgtcacaacccctgacccctgcccttgtcaccacctggggtgccagccccctgtgcttcgttgcctctgcccccagcaattccctctcaggtaggggttcccagttgcctcctgcccggcagctccagcgtggtcaaggattgagccaggaggactttgatgcactagaacctataaataatctggagcatttttatctgtgtatggaagaaatgcaacagacttccttgcatcctgtagccagcttagcctgtccacagccacagctccagaagggctgataaagatcgtctcatccctggtattgactcctccagctgctgcccagacacctccattgctggagaagtcactacacagttttgctcatgtaaattcagtgtgatagaggataaagtgtggcgtgtggtcaaagtgtgtgggtttcagggacagacagtcctgggttcaaatctctattcttccacctatcagccaggtgagtctggacaagtttctttcatcttcaactcacctgtttcctcatctgtaaaggggtgcagtgcacccacctggcaggataaaatgcagcaatagctacacagcaccagtcctctctgttagcagcagactgatgcccttggggagatacctcccacccctcaaacaggagcatctgcttgaggtgggcatttgttagctctggacccagacacttccctctccagagacaatggacccccaggtcttctcttgagctttcaagtgggaacttctaggaggatactttgagatggagacacagtgcttcccaggcatgctagcacacccaggccacctgggacacctgtttaaatgcagatcaccaggcccctctcctggagtctgattctgtagatctggagttgggcctaggcctccaatttttaaacagatgcccccagaaaatacctgtgatctggccaatctgggacacactggtgcctgcaaaggggagctggcctagagacttaagccagttcctctctgtggctcagttttcacactgataaaccaggggtttagatgacctggcagggatctttctgcccttaaaacctcatgacaatcagacagacattccctgatgtcccctctaccaggggcagatctgtgggtttccgccccattccttttagccacagagcatttggctcagcagccttctgccagcctcagagccctagggatagatagagaagctgttccctgggtgtcacatgccatttattggccattcccttgccttccaggaggccctaactctgcaggcattagcggagtccactcagatctgagatcttttctgtaagctgagctggatcactaactggtacctactgggaggtagggcggaggccagagtgggtgggggcagtcctgcagctcctctgaggcatctgggagccttaatagttaatacacatgaaagcctgcagcattggaactgcagaatgaccccgcagagccctccctgtcttgttacagatgaggagactgaggcccaaagtggaacgtgctggctaggaggatgtgagctctgggagctccacgtggctcacaatctggtctctgggccaacccatgcggcccaccatgcctctcgttgtgtggtccatctaggatgggcagccccgccaggcttaagccctcaacttaagctgctgagcccctaggaaaagagagtgccatctcaggacaggtccgaggggctgcctgctcctgaacactggtcccttcttggacccgcactgtcagcctaaatcaagaaccccctcccagcccatgggtcctcccaccccagccagggcagcccccatggaagctttccagaaatatccacgcacagtgcggtgagctccagaaatgaaaaggctctcacactccctgctccctcccgttttccactcactgctgctcaggggagttaataagcagaggtgaaaaagctggccctgtcctgatgagatctcgtttgaggcagctgggtctgggctaatgccagagaaggaattcttcactgccgggccttcactccaccggggatgaggccagggcctagaacttagggactggcctgggctgtcgctcagaggatgccgggggccagagctttgtctccttcctgggctgggagtcccactgggtccttagttcacatgtggtgcctggtacagcacccaccttcaggcctctgcgcaagtcagcccctctccactgctctctctatctgtactcagtaaggcagcagtatttagtaagcacctactatttgtgtgggtctgtgctcggctcttcaggagacaaagaaacagacctgtgccagccacaggggagctcacagtctaggccactgtaggtcacatgcaggaagaaaatttgtgatgcaccgtgtccacggggcaagggatgtgttgagatcaaaagaggaggagtccttggggagtgagggcctatggaaggcttcctggaggaggatgactgtaatggattgacactcagagcatttcaagaatttcaggtggggctagggctggggcaggtgatagtgcttgtaccagagcatcactgggcacacacctggccctgtcctgcgacaggaaggcccagcaaggacggagccatgctattgaggcagccacaggctcagacctggtacatcgtaggccatatccctatgaagtgaatgaccagcacagagcactgctttttaaatgtagtaggcactcaataaatgctgaccaaatgaagggtacatcacatacactcaagtatccacagagcaaccgagagctcaggtcaggaagcagcagggatgaggagatagggtgcgaggcctctggggcaggggcagggctcacagcagctcagcctcattcactggaacccagagtagtgggtgcctgctgggggcatccttcagagccacacgtcaccctcctaagggcacactgtgacacctgaccaagcaggaacatggcgggtgaggacgcctagggcccagctgggagcctccctggggcacatttgtacccagtgtttggtgtatgccctagacagacccaccctccctagagcttctaggacaggaggaaaatgagcacctgtggcatgtctgtcactgaagagcagaggacaggccagctacaaagcccttagatggtcatggttatgataatagtaataatgacaacagtgtcagcagccagggcatcatttatttgatcccagtgacaccctataaggtagggaccagtatcatctccattttatggatgaggaaactgagacagagggaagttaggaaaatagacaaagtctccaggtgcagaactggataggaacttgggtcctttgaccctaaattccagactggcctttggttggcctctcactcaacctaaggagcatcccatccaaccttcactcctgtcatatggagcatgagggccaccgttgcatcttttgacacaaaagaggaggaggacacgaactctccaaaaaatcattttaagttttccattatcaaactttacacaggtccttctcataccttcccagctccatgggaaagatgaacaaccagtgtctggataatgggcccttcccctgaattggtcctttgtaacggaagtaaattttctgccagcctttggtgcccagcagtttgataatacaggtgtttaaatggtagtgactgtggggccagccaggagaggaggcagtgagtcagatgggggattcacaggaattaaaggcacttaatctcagtacaatatgatttttccaaatctgctggctctgcaccaagaatgagctgaccctggacaccctggggcctgggctgctcagggcctgcttggctgtatcagggagggctctgggctgaggaactcctgggaggtggcactggcctagggcaagcttgtccaacccgtgacccatgggccacacgtggctcaggacgactttgaatgtggcccaacataaattcgtaaactttcttaaaacatgatgagatttttttgcgaacttttttcttttttttagctcatcagctgttgtgagtgtattttatgtgtgacccaagacaattcttccaatgtggcccagggaagccaaaagattggatgtccctggcctagaggctctgagagcagattaggaccaaagggtccaagggcagcctagtgtccctgttgctaggaagccccttaggccacagaggacagtggacagtggggcggggagcagggggcggggtggcttctccaggagtgtaatgaggaagaattttgagaatataccttgatcaacagacagagagcaagggacctgcctaagactacccagccaggatttaagaccaaatctttgctgttaatcactatgttatcctgtagagtgtgtgttatgtgttgggggaatcttaatggtagctgtgttaattagcacttaccccagtcattttatatgtattatctaatttaatcttcatagaaatctgtttcaagtatgagtaaactgaagaacagagacgctaggtaatatgctcgtgatcacacagccactgggaggtaggattagaatttgaacgcggctccatctaactttcaagcctgaaccctcagccagaccctggcacagagcatccaccccaagggaccgagacccctgccaaccagaaagatcagggaagcttcttggagggcatgtcagaatttgtttccgatggagctggtctgtaaacttcaggttccctgacctcccaagggctcttgctcatcctcagattgcttcatggggcccacttgctgggtgcttggagggtgaggtgcatcgtgggtgcattcctcagatcccactgggattgctgaagcggccagcacaggttgcacccaccagctttggggcaggcctgcccatattagattgcagcttggagcccttctcagcatcacccaggacagttctctcagccagggtggggtcagcgtcggggacaccggggacacacagctcccactgggaggggcagggaagggccgtgaccaactggacagaagagagttagtgaagacaaaggcacgccaatccctggactcccagttgtcggctccaaagggatgagtaggagaagtggcaggtggtgaggccctgccagtagattgcacctccatttgatgggcagtggggagccggtgagggttttgatctgtagaatgactgtgtgccatttctcactgagttttcatagaaacctagcatgtcagaggacagagaccaaacactgtcaggagagtggctctgctcccctgggtgctggcagggaagggatgctcatgttgggaatcccctttgtagctgagatgtccttttgcaagtctggtctttaaaatccaagcccagttggtgtggggcatagaagagctcaaagtgttaattcagaaatgtggctgagtttgggggaggagtgcacagaaaacacgtgacacacacaagatgcaggctcagtgtaaaactctggatgccagaggctgggggatccgagggtccaacagtcccaccccctttggatgggagaaactgaggacataaggggctttgcccgaagaagcccaggccattgcagaggagggcgcagcatccccaggtgacacctgccctccatgggggctttcctccttccattgtgtgtctttgaccttcctcccaggcctctctctgagcgtgagctgaggctgagggttggagccagctaggaaagagaagagccaatgtgtaccttccaggtcacctcaccaggcttcacaggtacagagcaagggggtcctcgcaaggagccagtggggactcagtggcctgtcttagacattggtatcatagcacccagatagggagggagaccactggtggcagcaagccttacgctaattcatgacccaaaagaaaccccgagcagtctgcccagggtggggcagctgccccgaggtgtcctctgcccacctgtttctgtcccactgccctcacgcttcttagcagccacagctgcccgtctgcctctggctctggctctgcctccttctgtgtgtgggcctcctctcgtgatcatgcctgtatttcccagtgctccttgctcacccatttttgtctgtctggcatcgtgtctctcacttgggtttgtcctgccccgatcagctgggttgtaccaccccagagggcacccttcctgcaggaggcctcctctctatcgctgggttgggctgggctccaccttggtgcttgcttgcctctgaggacttctctaatctgtgcactctgcgtgtgtgtgtgtgtgtgtgtgtgtgtgtgtgtgtgtgtgtgtgtgtggaggtttttacagacccgcatgtatgtgtccctccccctggccaccacacccttcacaccactcatctctgcccatccttgggctgggctcaggttcctccccactccccatgggccagccagcaggaaggcaacctgcagccacagtgtggagcccactccttgcaggcagccccggcattcctggctgcagcaaaccctccgggcttagcccacaggactcctgggagccggtgtgagcctggccatcatccagcctggagagtggctcctgtttgaaagcaggaatgtcctggatgggaaaaggcagagaggggagagtttgtgaataaaacaaacaaacaagggattattttccctgaaaatgtgccctttgtctaatgctggagctcagggagtcccagaaagtgagaaaccagggcacagggagggcactgtgcatcctgggctggggctggaggacacaatggagggaggggatggggcagccacacagaccgcacgtgttccggaggcccaacgggccaggatgacattccagggccatttcaactgcctctcgaaatgtcattaatatatggctagcggggagagctcccaggcttctccaaacccaccgtgtgagtggagccccctccagccaccaccacttagtcatttagcagatgtttacttagtacctatgatggaccagcgctcttctgagtatttgggatgcctctgagcaagagactgggtgtctgcgtcatggagctgacagtctggcaggggaggagagaggcatagatcttagagctccgaggtcttcctgacagtccaacccagtcaccctcccaatcatactgctggaatcctgaggctcagggaggtagggagtcagccctccatcctcctggtgccaaggcacagcccattggcataacattcggtgcacactggctgaatgaacacccctcttgcaagcattgctcagtttaccgagaatttcccagaagcacctggggataggaggggctggcaaggacctgcttgatagcaaggcttttggaggttgcaggatctagactgggagaggtgtgcagtggaggtgagctgccatcactgtcatcgtccccctttgcccatcaaccccgttgggaatttgccagtctgggttgaggtcagtctttcttcactaataatctgatggcattgggaagtctcttttctctgtgggcctcagtttccccatctacccagtaagaaggtaggactggctgatgtgagctccaggaggccagggattggagtttgtggcaatgtgtctccagtgcatctgctgctgacaaaaccgtgtaaactgtgccatgcactgggaatgaggcccctcagggatcccacaagaggccccctgggtcctgggaccccacccggcctgtctcggttcccagctgcagcagggcctgggcttgctctccccagacagccgggccagtgaagcgtgggcctgctcacagcgcctggcagggacctgtaaattgaaaacatgatgtttcctgttggggctggactcagtgtggccttggaaagctggcctcgctctcaggaagccctgctccccacagcaccgccacaaaaacagtggaaaagtgaagccttttcaagtctgtgtttccactgtaaacaggggatgaaagctggcctcgcctcctggagctgttcaggccaggctcctcggccctgtctttggaggcacctcagctgcccctctgccccagacagcacccctctaactggagaagccgccctgtgcccccagttgacaaaggcttacaggtttagttcaagcacacccagacccgttagtcctcgtatccaccctgcgaggtgagaagggccgggggagatcagcagagcacagagaggcataggacttgccgaaacacacaccaccaagggaaggcagacccggaccctgcctcctgccccgggatgtcctcacagggcctgcagtccctgaggaggctcttgtgtgtggccctgggtgcctaagcacagatgctgcctaacccaacatgagcttgactttggcctgtaaatggagaatctcacacatttagtggaagtgacttattttaaactttaataatgtcctttttttccttattgtaaagtatatgcatgcttgctgcagaaagtctggaagtcagaaaagtgaaggaagaaaaataaaactgccctgtagtcctcccacccagaggtcatcctggtcatcattctagtatgtttctttctggtcaccttataattttcttttcttctcttttggactaagtcacgaggaggcttcagagtcattcagtgctcctattagacatgatccttaatggccacatggtggggtcttaggaggggccagggcagtatcctcatcacaagcagcttgctgctggcttgggctgggtgtgatggggtgctgctggggactctggggagatgccccccaccctgcagcataattcatggtgagggcagcttggccgggaccctcatgctagaaagtcttccagtggctctgattaactgtgtgactctggcccacctgtcctgtctccccatctgtgaactgggcaaatgggccccattcgagtgctcatggccgcccttcagcctgctaccaaggcactgcttactgacaacctgcaggtgtggccacgcagtcccttactcagttggtcgtgaacagagtgcctactgtgtgttggtgagtgacgcctaccagaggcgccattctctccaccatcacccctcctatgttcctgccccttttaacctgcaagcccatccagctctcctcctccctgacccctcaccagttggagctggagcccagctgggcgggggtgaaggaggtcccaggaggagccatcttcagccccttctgccctggtgacatccttggtggccctgagacagctttatggaagacagattaaggctatctcctcctggtgggttcatgtcttcacttttcaagccctgctctgagttctccacagcggcatccctgccccacccctcccccacccccgcatgcttccttccctcctgctctaatctgtcagcccagccggagagagggccactggtctccaaggtgattgaattattgtgggggagacaggccagggttttctgcgtgagtgcttttggcttcctgcccttggagaggggctgggggaggtgtgtggtggcaaccatgggccgtggatctcccagacagccctgctctcccaagccagggccgcatgaagccctgcccccgcctggctcagcgctgctctgctctggcccaggttccacctccagaggagtgggcccatctcagtccagaccctggaggaaggagaggagtcgggcagctgtgactgctgactcacacatgaacatttcttaaacatctgctatctctgtgctgcaggccaggaacccaggatggagaagaagagggatgctagcacataaaacacttactgtatgtgccagccctccaagggtaactccaagagttaatgttactggtagcaacaggtaaaagttactggcctcagttttatagctgagaagggtgcctgatatgaattccttctcccactcacctgtggactcctagagaacaggggctctgtctgggttctgtctggatccctagggactgcagaaggccagccactcagatgggacctagttagtgcctggtgaactcagttctactagagtaagagaggtgaggtaactagtatgaggtcacacagccagaaacagaaccccattttgcctggctctgcacccgcactcagtctctggggcaccacgcctcttccaggctgagtgttggcaaagaggcctgccatctagctggcactgcccagccacatgcccactgtggtgagctgagagagagctgagtggctgcaggtctcagcctcttcccactggtgtgcttcagtctgctggtcaggccccacgcaccgtctccctgcagtctgcttcttccctgggaaggaggggccaagaggggaaagcccctctctctgccctgctccacactctagctcatggaaatgaaaaacacattggcttcattatccctggattgaatgagcagggttgccatggcaacagccatctcaggcccacaagggggcagaggaggggctggcaaggccgaggcaggtggggaccaggcagtgggtgagcaggcactccaggcaggcaggccacagggacaaccgccacgcatgccaccaccctctctcagaggccagtgtcagatcagcatcctggggccaacggggcaggctgggcctgtcttccactgacctgcccctcatccactcgttctgtctcctatccacctgtccccttcctgcagggtgccgagggtggagacgggcccccacagcaccatgaagatgaaggagacaggtggagagaacaagggaagaggggatggaagggagccaggagggggcatggcctgctcctgatcagggacagccctcagggggcctctcgagaggcatgaagtgaggaaatgccccgaggtgccaggctgtgcacacccaagcacacccgtgaccagggccatgctagtggccctgtcccccagcatcaccctccttaaagaggctgggtcccccagtgtctactaggacactatgagtgatgttggctgtgggggtgaccacagagggtcctggcccagtagcctgggccatcccatgaccctgacccctgtcagagctagcttccctgataccaaaatgaaccctcctttttccagggcctaagtgccacctgcctcctctgtcccatgggctgtcaccccagggcttgcatctgagggcgacatcccccagtaggccctgccgcccctttgcacagtctggcccaaaggaagtgggctgcaccccttcctcctccgagtcccccagaggcgtgggagcctgagctgcccctctggagtggccccaagcaaacaccaccaccttcctctgagcaggcagcctcagccagtctctccatgtgacccagacaatggggcagcccacaggggcctctgctcaggggggataaagtgcccacaagagactttcctttcagacagggccatgcagagaagcccagtgctgaccgcaactccatttgcaactttgactccagtcccagctcaagcccggtcttcggggccagcacacctgcacacgtttccagctgctctcccacccccagcttctgctccagctagaatgccctcccgccatggcctgtgcctccccaaatccagcctcctcccactgcttttttctgatggggaaacagaggctgagtgaagggaagtgactcatccaaggccacgagggagtcaggacagtgtggccgtgtgtgggatgttcctttcccaggaggcagagctgtgggttcccactgagacggaccaagagtcagtgtggccctgcgtcctgagtctccctgctagagcaggcttgggcaggagcagggagcacccgggtttcagcctcctgatggcccttcccagtgggaaggggcctgggaggaggctcaggggctgactcaggtcaccattctcttctccaagccttagtaaatggggacagtcctgtggccctgcctacaaacgggctgcctgcttctgaggaggctggaggtgagcggctgggcagatgcagttgtggtgtcactggtgccgtttgtagccttgtcctcctgccaagtggcggtggattctgagggggagacagcagaggcaggagcaaccccagcacctccttggggcggaggcatcccaggggcttgagcagccacctgcccaccggctgcaaccagaccccagaggcactttctcaaggttcctaggccctcccagggagccggggtgaagcccaggcatcattgtgcttatagctccccaaaccccaaaccgtgggcagtgctcaccttgctgtcctctaggccctggctgtccaggtcacacccctttgtgaccccctctgggcctcatcctgcctcaggccagcctcaggccagccctgggaccttgagcccatccctccctgctcttctctctcatccttcctctacccacaacccacagtccccatggcatttgtccccgtcattgacctcccctgacttggcggctgcatgtcccggcccgcctcccagccaccaccaccacagccaccgcccggctccccaccggcagctgagggcggctgctggacaaggctgtcattttccctgctggggattacaggtttggggctgcaggagtctgaactggaggaggaggaggagccaggactcacccagtgccaagctggagagagacaagagacacctcacaggaaggatgggctggtccctggttctgtttgggctgggatggggaattcagtcacctgacattaccagaactgtgtgtgtgtatgtgcacatgcgtgtgtgcatgcatggacgcacctctcccgaggggcaagggctatgtcctgctcatgcaatttaatccgcccaagctcatttttcagatgaaaaagacaaaactcagaaagggcaggggactggcctaggtcacacagcagtttagaggacagccaagtctgggctgcctggctgcctccagctgctgcctgatgcacccacctccttcttgcccacctccaggagaaggtgggggccaggagtatcgactgggtgactgcagacccccgagagggcctgcttctcgagagagctctgtgggtgaggtatgggctgggtttggggggagagtgtcagctggactcagagtgcagcagcattggttctgggtgtgcaggagctaggaatgtctcccaggggtccacaactatgaatactgggatgggattaaataccagcaaggtgaccccagtggatccaaacccctctgggggaaagtgggtaagcgtatgtatgccagggacagggcctgagagccctaagaggcttgaggatttgaagaggcccagggttgaagaaaacacagcggagtggttccgagcacagcctctagaatcagactgcctgccttccgaggccgagcccagtcacttgacttctctgggccttgtctccagggtctccatggcgattaaatgaaataaatcttgaacacttagtgctgtccgtggtgtgtgcatggtacgtatccattagatgtacactgttttcctcctcctcgggtctgtaggtgtttcaaggccctgcccttcaccatctgagcagtgagggctggagtagggcagttagtatggtgagtcagccaggagggtcctggaactgtacttgatgaggctctccctggactgggtcactaaggagccagcatttctgataagcagtaccaagtcaacctaggttggcacccaatcccaggagtggactggccagactgctggcagccagagggacctgtcagagctaacccttggcccctttcaggccccatggtgcagggagcacaagggagccaaggctggtggggaggcctgcctgttcttgggaattcacgacgtgtctgcctgtcgcaagtacctcgataaggaagatttgtgggtgagatttgcaattctgttttcttggagggttataaatcagctgcatgcacacccgggacgcagcacaggcctgaggctcgtgcacgcgcacacacacacacacacacacacacgcacacacccatgtgtgcagagacacagtccaggtcctgcttgatattccccagttctctaggttgatgagctctatgaagggaaaaacttgggcccctaaactgctgcctgccctaacagggtcccagaaccatccagaatgaaggatgcaaggctgggagacggtatccccatggttggagaaagagtgtgttacatgggttacgagcgtgagctctgaagtctgcctggttgggttcaaacattggcactgtgagttactagcaatgcccttggctgtgttgctttcaatgctgtgtctcagttttcccatctgtgcaaaggagctaattatatcgtgtactatgtgggatggttgaaagaataaaacaaatcaatatttgcagagtgcttcaagcagggcagaggacatagtgagttcaggaaggcacggctgttatcctatcatcatcatcatcaccagttaagggctgggttttggggtcagaccagggctggaatcccagctgtgccccttattagctctgtgaacttggacatactcatgacactctcttagcctccagtgccttctcaataaaagggactattcctgtctacttcatagggttgtttaaaggagatgaagggtgcaatatcagaccctcaggaaacgtcggccagcgttgcctcggtgccttgaggtgggatactggacagggcctctggttcagagcctccaggtggctctgctccgtggcctgtcttcctgtgggaggacagtgtgcagaatgtttagaagaaaaggggaggttctggggaggtgagcagaggggaggattccaggaacctctgtcttccttccaccatcagggacagaaagcgctggccagagtggctctccctgcccctgcctctccttccacccctctcccgatgtgcacacacagcattgtgagctgtgagcgtgagaataggccttggagactggcaggtgtgactcatggctctgccatgcacttactgcgtggccttgggcaggtcacttaacccctcaattccctctattgagggataattgtgcctgccccacctggcagctggagaactaattaaatgagataatgtgtgtggagcacttagcacagctcccagaggcgcccggataagtgccctgcaaatgcaatcacccgccccctctctgcctcctctcctccctctgatcctcactcacctctctctgccttcccacacctgatccatggactgtgtctttccaggccagacctttcaatctttctctctgggaagatgggctctatgtctaggagatgccaatggagccgtgtgagcgagtgtgaatggagggagagatgagtttagaaatcccagcctgctcttctgatccagttcccctgtgccagccgcacaagggccaaagtgtgctctgcatgaagcctggcctttgctgatccattgctgcccgtccccgagtctttactgcctcctcagggtcctcagctgctgtcagatgaaggcttgcttccaagcagttcctggatttttacctgctcagccataaagccctgcaaagtgatgaatctagggatgagtagctgcttgcacaagtgcaggcaggagagacggggaccagagcccatatttttgcagagccaacatttttgcacctctcctacccacctcactgcccaggcgagcaggacggtgaagccttggctgtggataattgtcgggagcatcccaggccaagccttggtctcccatcagaactttggaggctggacttctctgttgccagggaaaccggtgtgttcccaggaaaggaaaccacagcactttagctgttaagacgcccccctccccccgaaatgagttccctccaaaacggattcgccccaaaattgttgagtcggcagcatcctgccttctccctgagcctgctgaaacgatagaaaatgcaatctgcccctgaccttgtgcttttcacctctttttaaaacattccactgtagcacaaggacatgttttgttttttcttatttatcctcctcccatgccagctggggctccaagtccttctctccaattgttgactggagccagaagggaaaggacttctacatctttttttttttccttgttcagctgtcagcagaaataaaacaagcaggtttatatttggaaagcagagggtctcagccaccagatcgctatgtccggggtaggtcacagcctttgtatcttctcctccctcaacagtggcttgaaatttgatccacagatttgcagagttgagagtgaagggagggtttttggagcaggcctgtctttactcactttgacttttaaatgccattggaggattgtggatgaatcttcagttgctgacaacactggaccttggaagagatggttttagaaaagaatccccctggaataaccctggagcagtcaaggtttgggcagcatctggagtgtctgtgtccattcctgtccatcatctgctccctgtacagggaggctggaactctcacctggttcaggaggtttcgaggctgtctaaggagtagcgaggagtcccagccaggcccgatgaccccaagagttactgttaggagacaaaaccaaacaggaaagaaggaagagagaaatgtggccagtgttcactttcaggtccctggatgtttttgagggcactgtagaggagggaaagggtgtgaagagacttgggtccaaataccagacacacacccaccacccacgccctttgggcctgggtcttcccatctgaacaactgcctggccctggatcctgtccaagccctcccctggtctgtcccatggtctgtgctctcagggtcactttgggtgatctaagcagttaattttttacctcgaagtgactctctgttccgtaagtaattttaaacaaattctcttcctgtccttgcacttccacaggagaaaaacatgacccaccggggtttttcaccggcccccacagactggcgtgtcccaggctgtgtgcctgctagaagccctgggcaggaaggggcttggtggggcctccagtgttttttagccccatttgggatttccagcgggtctttcttgttgattcccgaaatcctgtcagatcttgctattagcatgaggctctcagagtataaactaatgaattacagcatgattacacagcacataattaactttgtaattaatatgcaactgccacttaagctaaaacactgcttatagagacgtacagcaatagtaaatcacaggtcagaagtagcactttggaattttcaaaagaatgagcgtgagcagggaatcacttaaggcagcagagtgagttaattaaaaagcagatgaatggtgagagtcctgcttcatttcaataccttctcccttaagaaggaccccgtgccacccgccaggctgactggtcaaaggggcactgagcatgtggttttatttccaaaataagacgggctttccctgcccactctcttaaccatctgcccagccacactgcccctgctggaggccatgcccccttggcccttggcacctggctccacctctcctcctccaggaagcctgtggggtgatccccagcctggcctctgcagtctagccctctggtaggcactcccagcaggtaggttggtactgtttgtctgccttcacctggattttaggcttctggaaatcagtgatgtcatcttactctttttgtttaatcctttcttccccagcctcctgcaagagtgttaaagctagaagatgccttaggaatcatctcaccccgtccccacttcatcaaggccatggagtccagggtctgagcgctgtagtcacaccacaatatggcctgggccaagcagaaattccctctcccatgcctggctctagcccggcggacactgccagtatagctgcgtgattaggctggaacctttgaaatgagctaaagccaagttccggtcccagcaacctcactgcccagctgtgtgaccttgggcgagttgtgtaacctctctgggcctcaggttcctcttctgtgaagtctgagctgtggtgcccactttgctgggctggagtgagaattcgatgggatgatgtatgcaaaggggcctggtgcagcgagtgggctcccggaaagctcagcaccccagccatcctcagaggtttggggtacagggagaaatgagtgacatcttgatcagccccttccttctggggctgaggaaatgggcacagagaggtgagccatgtgtccacagtgcagtatgcatgctggcatgcttgggacccccaggccaggatcctcctgaggacacaccttgtgtcctgtgtccctcccaggctgagcacaggcggtgcagagctgacccagggcagcgcctggagaatgaatgaacccaagggcctccctctgggcagccggaacccgcgcagtctgccactcagcttccctgttccccagccccagaatagtgtggagatagcttggttttgtgtatagttactgggctttgaagtctgatagatctgggtttggatctcagctttgccatcttctgatcttgggcaagttccttagttattttcagccttagttttcccatctgtagatggtgccactcattcattctaccttcggctatattgttataaagataattcacataaaataccaaatatgctgcctgacgtagtacataatgaaggacacgcctattgttcttgttactattcagaattatgaatggagatgtcagtgtgactgcaggagggccacccacctctagggcctcaggtagagaatcctgcctgctgcctgggccacctgggcctgcacacaccctggcttctgtgcctctggctgcagtcattgcttggatgggacaggggagggtcatctccgcctcaggcagctcatgtgaccttcctactctggcctttgcccttccaggaagtgttctgggccgctcttcccgcccccgagccagtcttgctgggggagggagcccagggcgccttcaggcaggctcgtggctggttgggtatatccaaggtggccatggctttcatgaagctggacatgatactggattcagaatccaggattccgatctttctgtggcttctcttcgcacagacgtctttgtttctggtcacgcctttgtggccagagcccagcttggagctaggaatcttcctcctgtcccccacccccctagtatcccctcccccagtcttttacccagccagctggccctccttgcctcttctgtgtctctcctccagcctctccacccttgggccactccctttaggtcggcatttctcaaagcaagtcctggggaaaactagttctgtgggattttaaaatgtgtttagtgaaaaaagcatttttgccatccagtaacactgagaaaagccagattttgtaaggcccttcccatgcaagcgtgctttcatgatctcccagaggaggacagaagatgcagctttccccaactcatctaaccgggaatgcttcgctcaggagcacctcctgggacctggtttccaagaaacagatctgggcagagccatctggggtgtcccagtcaccagagcacagtgtggcttttctctgatctcctgtctttattagagatggtgcccaggcagacttcatctgggcatcgaggccactgctggaggagctcacttgtccgaaagctccttccctaatccatccttccctctggaacatttgtgactgtcctttgccactaaaacagagtccctccagctcctcaacctggcattctggccaatggcatgggacccctgcctccctctcagctgcaaccacccaggacttctgaggcgccctgttgagctcatggtatggttcccagagggcctgtagagtggtggtgtttaactctgtcacgcaggcacccaagtctctggctccagcttccttctgcctctgatggagccgataagacccaccagggcactctagagagtgaatgttcacctgctcagggcgaggctaagtttcctagtcactaacccagtgaatcagcacagcagcctatgaagttgtacaattatggttactgttgttattatttatagatgagggacctgaggcatactgaggctagcattgtgccccagggcacagaagccagcaagtgtcagagccaggatgcaagcccaggcagcctggtgcccttaaccactaagctatactgcccatctaagatggggtgaaacatgggtcaactcgtgaggttataacaccaaagtgctttgtaaactgtagagtgctgtgcacattagactttcaagtcaccaggcagctttggagcacctagcgtgatttttgtctctgttggttttcagcaggcagccaggaagcgtgttttcggattgcctgtggggtgtccagcgtgtgcttggagggtttcaggaatgagggccctctgctcttgggccgaggtggctcagtcccctgagtagcctcacacccagagactccactaaatgaagatcgggctagacccagctgacgcacgcccctcccatgccatgggctttctggagagtagagcttgatgaatcactgtgccagcctcagcccagctcccacccccggatctagggatgctagaaatctccatagggagctgtgggggctgcccagggcctctgcagggagaagcatagctgcttcctagtaagagccaagcccctgttcccatcacacttggcatgggcaccctgtcctaccccaccccaacccccaaggcggcttggagctccccagggcaggcccgtttgagctgtctgtgggctgaccacaggcctggcctgggcaggcatcagcaggggtggactggatgtggttggggcagttggggctcctgaggcctgggtgtgggccctgaccctgcctcggatccacagtggggccttcaaggctctgctctacgctccctgcctcaggcctccgtttcctcatctgtaaatgttaggataggcctgcgcagatcccagatcacttccagatctaagccatgaggacttttcattgtttttccatctaccacttttagctcaagtaaatgtctgccttctgattcctctgtttccccaattttttggttttttagaaattaaaaaatatatatatactaacagtgaagagcagctaactaaaggagtacactcatgggctcaggaggagcagccactgccctgggtcattcacaccccctgtgtggctaggtagaaatcacctacccactcagagcctcaactttctcatccacaaactgaaataatacttgtttgcaggctactgtgagactgtgatataaggttgcttgaaataggcccacccatccatagaggctcttagcttgaaaagaacctggctgtgactctcagtttagggtaaagagcacaaagtcaggaaacgggaagtttgcatgtggatctgcttggtggcctcaagctaagccctcccctctctggcctctgttcactgccttttcaaaaatagaccacctagaagacttcatctcatgtgttggtaccaggtggttaacaatggctgtgcagaagtgtatgtggaggattggctgggagagtgcagtgattgattagccatgcctgctatgggtgtgggaggtggagggttgtatggatgccacctccacctcttgcataccagagcattaccatccctatgccagctggtccttaagggctgatctagttctgtctaactcttcctgggggatgccattaatcctgcccctatttggagctcctgcagaatgccaggtgggatttggagccttggggagctgggggtagggaggggacaatggagaatacctccattcctggagccagggtgtaggaacatctgctaggtatttacagccttctagagggcaccagctggtggtcggggggggtcctgcctctgtctacagtcacatccttccctatatcctccaagggccctcgggtaactgttctcacccctctcttccccacttcatggcatctgagcctttggagtcacagacaagagccttgaggcagagccaggacagggacactgcatgagcactgctatcctgggagaggcttgtggcctgggcccagcactggacgggcctgtgactccctatcttcaccatcctcagcactccacagcagtgctagtcaccttcctctcactcagggaagttggggctggggaaggcagtgtctagttgagggaggtctgccatattcccatggaaaacatgatacagaaaaacatgggctttgtaatcagacctagattcaaatcctggcagttgtcagtagtgtgaccctaagcaaatcattgcacctctcagaggctcagtttcttcatctgtagtagcctctgtttcttcacctgtagtactgtaataataattggaccagcatatagagttttgaggcttaactgatgtgacatagagaacctagtgtttagcacatataggtttgatagttgttcagtacctctttccactctgaggaaacaaagtgtaggggtgtggcctccttgggaatgagagaaagcccaaggggccttctccagagctgaatccaaccctcctttgcctctggggaagagaagctgtcagagaaagttcactgtgaggtcagggatttggagtatggccagaggatggcaggggggtttggcctcaagggcatggcctcctctaaagtgccatgtgcccagaaagacaaggcacaccaaatgcagctaggatcccagccctgtgtgggttgggtcagtgggctggcccctttgtcagggccacatcactgagtgtttccccaggaaactgtcacttctgaattaacttctgtgtcccagggcaggttgctaggcatagctgtgtggggctgactgtcatgaagcccccactctgaaatgccaaggttacattatgttatcccactagccagcattgacaatgggtgttcccgtgaacaaggatgggtgttgggagattggatcatgaagagaagtgggtccacccttccggaagctttgagtgccaagccaaagcatctgaactctggtggggcagtgtggagccgtgtcaagtcttggcacaggagcactgccctggttgaggaaggagggactgaattctgaagagttgtggtccgaatgcagaatttcactttttaaaacactgtcccctaagtattcatttgctcagctcctcaacacagtggggcagggaggagatggactttcctgcttgacagatgaggatgcaggctcaggaaggtgaaataccctcccacaacctcatagccaggaggtctggctctcaggaccactgcctacccaggggccccaccctgtgcaatgactcacgctggcccgagggcctgctccagttgtcctgctaagagctggaagcagctggccctgtgcagctgcccggagctgcctcttccatccctctccccatctcgtctcctgtctctctgcccttctttctgacttccctgaggtagggcacaaagtcactctcctactgtccttgcttcaccaccaccctcttcctctgcatccagcccgtgtgcctggtgcaggctaccgaggtttgggaatgcgcgagccacctgcgacgtgaccacaggcagcttccacacctctctgagcttctactcattacctttaaggtgaggaagtcatcagtctacatcagtgcttgcctaaccttggtcactttcattccgttcatactatgtttaaaacaattctttaattcacttaggtctgctattgctacctaatttaactgcatgctaaataataacattcatgaactcatcagtccaaaaacttcactatgagaatgtaaaaggtttgtccatggaccttctaaagtcatcgttatcccaccagaagtacatgtatctctctttgggaaccctcaacggggtaaccagtgtctctctgagtcctaggatcttctgattatggctgggtgatgggtttttcagctctcaccaccctggttctcatgtacacccagcaatgggcgtgcgtccacctgcctgttcacccatctaatgagtacctgctgagtacggagccctgggctagactaagggatctgtaactggaagacattccagctgatggagagacagttgcaaggagtcagccctcatctagtgctgctacgatgggggtgtgtgacagcgacatggaggggatagggatggaaaccaagaaagagcacgaaagagtgacagttgagccataccctgatggatgggaggtgtccaggcattgcgggcagagggacagtcagaggcaaagacatggaggtgcgatcttcagagcacagtccgggaggcagggagcagccccacgttggggacaagggatgtgactgagagtagtgagggctaggggccaggccgaaaaggatcccaactgatgctgacatgtgcaggttggcaggtcattgctgagcccagggctcatgaagtttgtccctttgggagtctaaggctgatgaaggggctgtctgggatgtcctctggacccctaggctttcccttctggctgtgtcttggaacgcagcctctgctcgcgggctgtaggcagagctgcccactcctgccactggcaccgcttgccccaggggacctaagctgcagatgtgcatggtgattgaatcatttctgcacaccactgctcacacagctccccggggacccccacttgcctgtgcaagctgtcatgagatgtgtgtgctcaagtgcatctgtgttggcatccagcatgtgcacatacctgctgtgaagtatgcaaggggtcacatgtgtatgtgcctatgcacacgtgtgctgtgcagacgcctctctctgggtgcgtgtgcattatgtggactgatgaactagtgaggcctcaaaggtgggaaataaaacacttgtgttgggacagctgactgttcggttggctgccacccttgggagctagctgcctgtggagctccacatttctgtggggcagctagaagcacctcatccctgtgtccagtgaggagccccctgagggctgtttgcctcccccagccgttgagaccgttgagatgcttctctccttgctgacttggcagcccagagatatccagggctctatttggacctgtcagaggggctccagcccagctctgctcacgatgccctccgtgtcctcttcctctccccacctccgcttcccaccctgctgcatgagggcatgaggcaggtgttcccaggccttttcagctctcaacgttctatcctccaagcagccctctatacataatagccgctaacttttcttgaactagtcttctgcaccaggcgccgctaagcatagacaccctcgctctgctgggtggtgagaagtgtaaatggaagcttggtcccgaaagacgtcccacgggagttgggaagaccgagctgaccccatgttaccatccaaaaacttccatttgcccaactaagcccagccaagcgtaaggtgcaagaagaagcacagagctgtgaaaggggcagcgtcttggccttgggctgccctggaagaacagctcccggggctgccgggccttcagcctccccatggacctgccttgggacaggctttgcagcttcaaaagcaggcattctcctcttgtggggatggtgttttctgaacagccggagctcctcacagggaatcctaagaggctggtatttgacaggctgccaaaggctggccagcccgatcctgtgctttgcagacagcgaaatggaggtccagctctctgccctattcactcagcaaagcagggtcctgatcccccatgctgattagctttgcatggctcctggctgctctgaccaggagacatggcgggggtcctgagccgggatgggggtagcctgcttggtctcaccccccattcaggggcagtaggaagggctgaggccacgggtgcacctggggccaggccgacagtgatctgttgggcgggagcccggcctctccggctatagagctgcagccacggaggatttgtagcgacttgtaaaggcttaaaggagtccaggagcccggaggcggaggcagcggcccagctgagtggcgctcttgtggcgaagggcgacctctgctggccaccaggtgcgtgtcacctcccaaaggtggccggtgtgcagggagcccagtgatgtaagtgactggatttgggcaggttgggtggaacaagaaggtcatctcctggggcccagtcacagccggaggtggggactaccaggaagctctgactgccagtcatggggagtgcaaagaacagcacattaacagctggaaaggtagagggtttgaatctcagcccagcagctttccggctgtgtcaccttgggcaatttgcttcacctctctgagccttttaaggatgaagaaaattagcactgcatagggcctggcctggtgcctgaacatagcaggtgtagaacaaatggaagatcccagcctgcccctcaacaagctgtctcttgcatgcctccctcagcgcacccttcctctctttatgcctgagaccctttgctctctaggcctttgacccttttactccagagactggagcctccatctcctccattcctggggttagtaaccgcagttctccatcattgacctcaacagtttaaaaatgtcacctcacctgtaggtgcctccataatccgctagccatttgttcttttattaagaaacacaggacacagcgctgtccctgtggtctgcgatgtccctcctgccatccatctacccacccttgggtctcacaggtgttgcaagcccagacactcacccctcggttcctgtgagctgcagccctgcctgggagcaaagcccccctgggacctggacccagcccagtgccccttggccttgaacaaaacactgatgggccccaggctcctcagagtaaaaccagttgaggcagagcgggtagataggggacctgaaagcaccttcggcccttaatattccaggaatctttctgtccagaagccagttcagtccagccgccggcctccagacaagactgcccgtgaccccacgtggggccagcccgaaggtggacagtcccatctcccagtttgctgttaacttcttaaagcaggacctgggcccccgctatgactaaacagaaaagaactgcctctgagccctgtggtcgccagctgggtggatctaagctcctgtgcctgcttggggcttccaggcaacaagcatttatcaaggcccaccgggctctgcccccggacacaatgtcaggagaaagttcctcttgagaggtagacccttatgggtcactgacttgcccctctgcagcatcctgttctgcagatggggaaaccaaggccaggaaaccagagaagcccactcgaagtccatcctggctggggacacctgggtgctcactggagtgagggagaggacggagggcctggaagcacacctggaacctccacagtgtgcaggtctggcccccaggtcacttaggtttgtcaacagcgccccctgctggctgcctgggccaccggtggccctttgtcctggtgggcagtggcctgccgacagcaggatgaaggcctgccgggcatgaggtttctttgtacttctcttctgtctcctccagctaggagctgagccaacccaggcctttgtgggatgggtctccctgtcctggctggctgtgaaagttgaattctctattggaaccctggctaccagtgttcacccatgcccccacgtgggacccaggccttcactgccgcatgggtatcacatggtgcctgggagaccaccagggtcctttggctctgatggggcctggcaccaggaactgagatggccttgctgaaggtggcactgtcttgctcctgctctgggctctctgtgtccttgtcttccacaccatggtttgtccctgaccccaggagcctttgtcatgtggatgctggctgagggtctgtgtgggtaaactcaggaggacaaatacagctcccgcttgggtgacctacagaagtagcaagcggagctgccctgattacgcccctgccaacccagaccatacacacacacacacatacacacacacacacacacacacacacacacacctgtaccctgtcccctccccaggacctgttcaagagtaaaaactgtaaagggaaagccaggattctagagctggctcctatccaacaagctgtaacctccaagccttagtttcttcatctgtaaaatggggatgtaactacattttcttatctgtgctgtgcctggaccagtacctgactcataggaggagctcagcacatggtcatctagtaggtaaatgtgggcttggaccaagagttccttgaacacaagaaaatgatttcattttaatctccgcacgcccaacccatctggcctaggaccccgcacagtgtcgttattaaaaagcattttggccaggtgtggtggctcacgcctgtaatcccagcacttttggaggctgagatgggtggatcacgagatcaagagatcgagaccatcctggctaacatggtgaaaccccatctctactaaaaatacaaaaaactagccggacgtggtggtgggcgcctgtagtcccagctactcgggaggctgaggcaggagaatggcgtgaacccgggaggcagagcttgcagtgagtggagatcacgccactgcactccagcctgggcgacagactctgtctcaaaaacaaacaaacaaacaaaaaagcatttcttggagagaagaagcatgtacagatgagcaagtggagactaaagatgtttgagtggatgagtagacaggtgaacaggcgggcatttgtttttattattgttacttatttatttttaaattttctttttggatgctccctcacccccctcctccttccccaggcaggtatttcgatagataaatgatgggtggagaaattgggcttcagggtgtgacatgtgtgataggtggtgggtgggatgaatggagggatggttggcagggtgagggtggaagaaataaatatgggtacaacccccactttccccttcttgctgtagagctccagaaagcacttatcaaaaatacaaattcccagatgacccagcaactccacttctgagcctatgttctctagactaattcacacacgtgtgatgtgccgatgtgaacggttattcctgcagcactgcaatgataaaaatttggagccgggcgcagtcgctcacgcctgtaatcccagcactttggggggccgaggtgggcagattgcctgaggtcgggagttcgagaccagcctggccagtatggtgaaaccccatctctattaaaaatataaaaattagccaggcgtggtggcaggcgcctgtaatcccagctacttgggaagctaaggcaggagaatcacttgaacctgggaggcggaggctgcagtgagccaagatcacgccattgcactccgcctgggcaacagagcgagactcagtctcaaaaaaaaaaaaattggaaaaagcttcagggtccctcgtttcaggctggagtgtgagcccccagagcagaggggccttgtctgagggctcaagccttagaacagcacctggcagggggcgatgggcagatgttagttggataatgcttcatcatacctaggaatactgtgcggccattaaaaaatgaaaaggtggccaggcgtggtggctcacacctgtaatctcagcactttgggaggccgaggcaggggaatcacgagatcaggagattgagaccatcctggctaacacagtgaaaccccgtctctgctaaaaatacaaaaaattagccaggcatagtggcagcacctgtggccccagctacttgggatgctgaggctggagaatcgcttgaacctgggaggcagaggttacagtgagccaagattgcgccactgcactccagcctgggcgacaaagtgaaactccatctcaaaaaaaaaaagttctttgtgtcttgatgtggaataaactttgagatgtatcatcaagaggggggaaaagaaagcaacatccaaataatgtgtatagaatgttattattttatgtttttaaaaatgtggcaagaaatagtgtgtgtagatatttgcttctagatgagactctccagaagggggactgatggcactggttctcctagaaagggcaccaggggactggggacggggtctggacccaggactcgatatctttgtggactttctgatttttgaaccatgcaaatgaattacctgttcagacacacatggagcaatgagaattgcaccaagagctacacatcctttaaagcaattggaggaggaacaggactttcttccaaaggctggggccaggcaatggtgttgggtccctcaacaagcgtgtgtagaaggcagacaggcagacaggcaggcagacacaacctacacttccaccagctgcgaggacttggcacatctggggcctcagtttcctcatctctaaaatggagatgatcctggccttagagagtgtgtgtgaaaaggaaaggagagaatgcaggtgtccagcacgtgaaaagtcctggctgacatggccagagatgaggggtctttagtggggagtgcgacagagtagcagggaaggcttagggccccaggtctcctgtccagcaccctgggtgtgatccaagtgtctgcagcctgaactgtccactgggggcaggagggcaaatcgaactggcagcgggcagtcttctgccttggcccaaggacctggacccctaacagtgggtggactagggctgtacagtccttcctctctctacctagatccccgcctttgctgtgtggcctccctggagcggcctggggactcccagggctttttcgagccgaaggagcttcctccacttagctctgtcatccagagggaagtcccattcatgctaatggccctgagcactcccttctcctgcacttcaggaagggtgagcctagtgccaagccatccctgcacccgcactgtcagccttgcacagtggaaaccgcgggctggcagtcaggaaccctggctcctggtgtgggctcagacaccacttgatgtgccaccctggcttttccctttctgtctctcagcctcagtttctttatctagaaaatgggtgtggtgctcattcttatcctccttttccaggagggcaaagtgaaaacaacagagttgtgagtggtttgtaaattatgaacaactcaaagcctgagggactgggggagggcagatgccacctgagatctccactcagagcacatgtgcatgtgcatgtgcactgagggtcgtcatatgggaaggtccccctgcatgcacatgtatgaacacacacacacatacacacgtacacacacacacgtgggccaagccctgaaccaggaatccaaggggaattgccaccccctccaccacccaaaacacacatgcgcatacagaaatgtgtgcacctggctgggcgtggtggctcacacctgtaatcccagcactttgggagcctgaggtgggcggatcacctgaggtcaggagttcgagaccagcctggccaacatggtgaaactccgtctccactaaaaatacaaaaattagccgggtgtggtggtagacacctgtattcccagctactcaggaggctgaggcaggagaatcgcttgaacctgggaggcagaggttgcaatgagccgagatcgcgccattgcactccagcctaggtgacaagagcaaaactccatctcaaaaaaaagaaaagagaagaaatgtgtgcacctgcatgtgcagttccttatcccctggtgggcatgcctgcccagtgctcacatgtgccacacatggaaagcacccagaagcatttcctgccctcagcccagtggggtaccccaggtgcagccccacagggcccagcaaaggactctggaacctgccagtgttgtggccagagggcagttgggaggctgctcaaggttggcaggcctggcgtgatccagtgacaacctctcctttctcttcgcaggctggacaacgttcatggctctcgggtagaacctagtgaaacggccagaatgaattctatggacaggcacatccagcagaccaatgaccgactgcagtgcatcaagcaggtgggtgtggggcaaggcacactccgagggcggggcagatggggcgggctgcagcagcagggcatctggtgggttctggctggagacgatggcagggcctcctgaccacctacctatcgaggccgttattggcatgctggcactgaccagcctaatgctggaatcacatgcctgggtttcagtgccaatgctgccctgtccctttccacacccttcccagctgtgtgacgttgggccagtgttgtggcctctctgggctctgtttatgtgcaaggatgtagtgatgcacctggcacttccatctctctcccaccacctccctccctagaactaagctccctgcccctttgctccagtcgttctcaaaaaaaaaaaaaaaaaaaaaaagtcacaggctgggtgtggcagcttacgcctgtaatcccagaactttgagaggccaaggtaggaagattgttcgagcccagcctgggtaacatagcaagaccctgtctcagaaaaaaaaaaaaaaaaaaaaaaaaagaaagaaagaaagaaggaaggaaggagggagaaagaaagaaaagaaattaaagctgagaaaatttaaaaatatttactaatttatttaaaaataagaacccattataggctggacccagtgattcacacctgtaatctcagcgctttgggaggctaagggaggaggatcacttgaagccaagaatttgaaaccagcctgggcaacatagtgagaccccatctgtattttttaaaaaaagaaaaaaaaagccacaagacaagaggtcctaggaaatcatatcattttacaggaaaggaaacaagtacagagaggggaagtgggtagcctgagtccactcagcccctctggtgctgggaagacctaattccagtgagtgccatggtccccaccctgctgaagctcataccaagcccaagaggcaagctgcccaggagttcccctatttggactgccgggaggtggggaacctttcacaggggcgcccccaagcggtggccaggagtgacgtgcccacctgctgggcccagctcccactgcccaggctggcagcttccctgcacagacccacgaatgttattcactccaggaaggaccaggtacagtgagaggggcatgggctttggtgtcagacgccttggacccaagtgctcattcctttatggacccatggtgagatctcaagctagtcctccatttctctgagcctcagcttccccatttgtcaaatggggcctacctcgtaggatgctgtgaggatgttgtgggtgatgcacgtagcccagccctggtgtgtggtgtccattgtcctcagtatgtcagtgacagggaagggagtgctggggctcaggcccctggcctaggccagcttagcaggaagctcaggcaaccagcatgggctgctggcccctgggcttccgccaggcagaactcacagccccctacccacccagccttccctccttgagggccaggacccagacggagcctccccaaggtgcctgcccagtggaactgaggctgttcctcgagaacgagggttgtgtgtcttcttattagcatcgagcagaggaatcttaaagtctatgcagggtatgtggagaggaaattgaagaaggcttgttacagattgaacccagcccaaatggctctcccaaacgccaattacacgcctctgttcaccgtggcagaatagaaaccagacgccaagactccctcctcccccacactccctcctcccactcagggttctgcagggctctttcctagctctacctttcactccgtttctcccacccttggctcagctggcaggggccccgccctccaatggaatgctcatgcctcctgtgcatgggaccctctgcatggcaggcacaccactcctgccgagacctgctctcagcctctttcctcttggcacctagctccgtatcaccaggggtcagggtgcacctgacttctttggccctccctgggtccatcttgggcagaggcccaccagaagcccctcacagcatggcacacagctcagtcaccattccgtcgcttacaaactatgcagccttaagttgccgcttcacttcccttcatctataaaatgggcatcataattaattcacattcaaccagcacatgccagagcccacaccaccctccctcacctgccccggcacacacatgcgtgcacacacacagagggctctgcttttgagccaggcagtggcgcatttgtgagtgtgcccagatgccccctgggccatccagagctccctacgtgctccatgcccctcctcccacatctccggtcagacacagctcagtgctgacatctgtctgctccacagctgccctagaagtcagcctcggctggctggggactgttgattctcaggcatcctgtaacctaatcagaagagaaaggcaagcatgtgtgcacgagctgagatgacgagctgtgcagacctcaggctggtaggggctcacctctccacacagccttcccttcctgccctcaccttggttgtagcctttgctggcgttcaccaacccccaccctctgcaccctgctgcccatgtcccctcacagcctctatctaagctgcctttgccccttctcagcctcttggtactgggagaaccagtgctccctctctgcaacatgcccttctcagagatcactgccacatcccagctctacatggagagccctgcaaatcagctcattcctgctcagcagctgccctgaaccccaggggcccttctgagcatctgtaccccatccctgagcttgaacacttcctgggcacccagctgtctcacctactctgctctgtctctctggagctatgggccctgtaggaatacatcaggtctcccaccaggttgagctccttgggggcaaaggacatgccatattcatctcaaaatcacagagtctagcatagcatccagctcagagtggggcccagctattttaggtgggctgaggagaggggtggactgatagatggatacataagagaatggatggatggacatatgggcagatagttagatgggtgggtgggtggacgtgtatagatgatgaatggataaatagatgaatgaacagataggtgggtgactggataaattaacttctggatgaatgggtagataggtagatgaatgaagggatggatgagtggtggataaagtggtgaatggatgaatgggtgggctggcaaggagacagatggatgaattgattcatttaggatggatggatggatggatggatggatacacgcatagatggatgaatggatgaatcacttgattcacagatggactggtggacagatggattgataagatgaattcatcatttcaaggcattggtgtgccctgttcctgccccagcagactcaatggcattggatatagcccaactcttctgaggaattatagagatgggcaggctttctgatgggggacagagtactagtgtccagtaacagccataattagggaggcctctgcctatgattcaaacatgtgctcccatccccagcccatcaacggctggccaagctcacccctgccctgccctggcccctccctccacctcccactggggctcattctgcagtggccatgttgctggcctacacagcaggctcaccatcctttggacagttaactgctccccaatcatttcccatggggttcagccttgtgccagcctttggggttccagaggtgaacaggaggctgtttctcccctcaggaggctcaaaagagaaacagagaaccgtggaggggccctggcatcaacagcagtagcagtctttccctgggctcctgctctgtaatgagttccttgtcgtttctcaactttgcggcagccctgaatgccatcactaccccgtttcacagatgagggtctgatgtgcagcaatgtctcctgggctgcatggctcagcagctgagacggggtttggaccatgtctgttctgcttatctcactagatcactttgtctctctgtgcacttcagtcacctcttggttgaaataggtgacaagggcacagagaggggagggggcttgaccaaggccaaagagctgcacagtagccatcattgtattcccagcactttgggagacggtggtaggaggactgcttgagctcaggagtttaagaccagcctgggcaacatagcaagacgtcgtctctgttaaaaattaacaacaacaacaaaaagtagccaggcatggtggtgcacaccagtaatccaagctacttgggaagctgaagtgggaggatcacttgagcccaggagattgaagctgcagtgagctatgatcgcaccactaccccccagcctgggtgacagaatgagaccctgtccaaaaaaaaaaaaaagccagcaaaggggacacttgatgttttcttcagcaatgaggtgtacccacagcctacaggccacacaagctgtctggggtgagctctgaacgctggtgagatactgaaggctgggcactcgggtgccagaaccagactgggcctctgagatggacctcagaggctacccctgcacccagagccccaaagtggggtgctgtgaccagctgggggcaggcagctctgaggcagcatgcagtggctcctgcccctgctaatttggtgtgacatcactgaaataaacagaacaactcggttagcaggggtggctggtgggcaggaatcagctgatttgcatggctttccacgtgcagcctagataccacctgtggcctctgaggggcatgctttagagaaagggcacaggaggcagaggtgaggacccgccgctgccctctcaaagggcttgtttctgtatgttgaaattactcctgtctcacacaattcaaatgcagggagcactgcctttgcagaaggagccagggctgagagcggccacatgcagctgtacttccaggagagcctttgggagacagagtcagggccaagggcagccccacatgggagcaccccacgcgccaggcactttgccaggggctgtataagcctcatcttgtttaagcctcactgcggccccgtgatggagggctttgttgctgcttgcctgccctctttctctcctacatctctttctctccctttacttccatggaaggaggacattctccttcatttcactttcctccacccatttttaaataccttgcctcgcatgaactacattgtagcaacagtcacggaaccttaagcgaaagaaataaaaccccaccaccaagtcatgttctgtcatatccccattttacagatgaggctactgaggctcagggagctgaggggaccatcctacgtcagtggttgaaagtgggtgaaggcagagtgtggattcccgtagctcccctgccaattctgggccctgcggctcctaggcccctccctgccctggcgctggggcaggctcatgctgcaggtcgaatggagggactgccctgggtggctcctgttctgttgtttctcccagtaccaaggcaatgggacctcaggaggtgccatcatctctgcagtggttcacactcctgtgctgtggacaccctccaggggtccttcaggaggacacagtcagttacagccaaattgggccagagccccatcccagaatctcacctttgcccctaatctgctccttgctcctagccacatcttttgtctcctggactcagtacccaactcagagggcctgaggagacggataagagtgaaggggggcatgggaaccacccctttgctttgcacctcacccaccccaccagccctgcagcctgggcctgaagcggaaccaggaggcccagcaccctggcaccagaattcagtctccatcgactcagactctgcctggcaggggcctgagctcaggctgacttccccaaccatgccagcagcctctgagcggacccaggcagggcccagtacgtcacacacagcagcccctagtgtgaggacagtacaggcacgtgtgcttccttcaccctcccagctggctgtggcctcccccaacccatcaccttatgtggctagggcagagcaggctccaaagccagagctggtgggagcccagtcctgggctttgatggcggtggctgggcagtcaggaaggaatctccagggccaacctgtcctggatcagggagggagaactcccggaaccctgcagggatcaccttccgccacccccaccagcatccagaaagcactctgctattagtcaccagccttctctagaccttggttttcctgtctttgcaatggggctactaatccactggggtggggatgggggtagaggtggaggtgagggtgggggtggaggtggtgggggtggagtggaggtggatcggggaggtggggtggaggtgggggtgggggggggtgggagcaggcatgccgagcacagggtgtgaaatcgagcatgaggaaacttactgatcccagctacccctttacccctttctgtgaacctcctccccagtgaggctgggttcttcccaccccagacccccacacgctgcctgtgctaccctcactcttggagcctcagccgcctccttttcctttcccacagcacttacagaatcctgccaacttccacaatgccgccacggagctgctggactggtgcggagacccacgggccttccagcggcccttcgagcagagcctgatgggctgtttgacggtgagtctgcaccctgtccgcctgcattcctgcccaggaaggtcagctgagtgctagcgtgcctgtccaggtttcagagaggttgtcagacattgggaggtgacaccagtgagagagctgggaagacactggtgctggggggatggccctatttggtgtgtcccccacgtgcacaccctcaggggacctggagttgatgaggaggcacagtccctagggattgtgtgggttcccacacttgatgagaaagacgcagtgttcactttgcaggtcactgttccatcataagcacagtagagaaactctcaaagggttttcagccattttttatccagtcattcattcattcattcacttagcaaacatgtatggagcttcttttgtcatcatccatccattcaggtaagcattgattgagcccctcttacatccatccgtctaaccaaatgagcattgatctctcattgatcatgtatgatccctctgctaagtccagggaaactgaagatgaataaggcttcaccgagcctggtttcctctgtagcggaggaggcagatgtgtaaagaagtgactgagaaaatcatgtccacagtgaaggcagcacagggaagggaatcctgaactggctgggtggcggggcagggtgcataaaactgaggaaaggagctaccctccatgggcaggagtctgcaaagcagcagaggggcaggagtgctcggggcacaagcagcagagggggcaggagtgctcggggcacaagcagcagagggggcaggagtgcttggggcacatggaacagcatctgcaaaaggccacacacccgatggaacccagagaacaggaagggtcgaggctgcaagctgggcagaggccaggtccagagtttgtggtatgatcggccaggctaaggagcttgccagccaacagggccccatggaagtcactcgaagcttgagaatgtccccagccatgtggcctgtgtccatatgtgtgatgaccagggagggcagctgctcagaaggccctgagtccactttgaaaggaatgtgggtaaacagatggcaggggagcccgcctatcctgaggctgggagaggatgtctggccaggcgggaacagcgggcatggcccacgggcaccaggcttcctgaaaagctggaaggagacaaaaggcccacatggccttggcctggagaggaagaaatagcggcaacacggctatcgtgacaaagcatctgttctgtgcctggcagggagccggcccacagaatacaccatcccaccaaatcccctcagtgagcttggcctgcaaccctcccccacattttacagaggaggaaactgagacttttaactgacttcccaagggcgcacagccttagaggtgggcctgggattacagccgaggcctgcctgtcttcagaggggatgcccttggccattagggatgccagacagggatgcagccaggaccctcctggggctgctcagcttgtcagaagccagcaccatctggctccctcaggccaccgggccaaatcgagcagccacctgcactgcccagtcttcctcatccttcagcccatgggatccccttctccctccgcccccccagccccctaatcctctttgtggggatctggttccaggctaagccatgtgggcagggacagatgttgccagaggctccctcacttctaccccagcagaggatggaggaggtgggaaccttgtgtgacgtgtgtccagccaggctgccacagtctccagcacattgccccgagcctgaccctgtctatctaggatgtggggacttgagactgaatcagagagtggccctcaccggcctggatggaccaggaactggctctgcctcggtcctcttgtccatgcgttcattcatgaacattcactgggctcttgttgggggacaggccctgtgctgggccccagagggaccattgtcaaggggctggcctgccagggggagcctgacattgaacccacaaaggagcaaacagggacatatgccagagctctgggagaaggggcaagggtacagggcaggaaatgtctcctgaggagttgacctccttgggaggatgagagagcagggtgctccaggcagagggaactgctaatgcaaaggccctgaggcttgctgtgttcatgaacagaaagaaggctcaggtggctggagcccagggaagggagaagcatgtgagatgaggcagaggaaggaggtgtaaagcagctaacacagggcccacaggccaagcgaaagtctgggcattatttggagggcaatggggagcccttgaagggttgtcagcaggagagtgatgggctatgatttgtatgggggcaggagctctgaagggagcatcttttgagggcaggatggagggatcatggagggcttcctggaggagggagcccagagagggcctcatgagatctggctggacagagaggaatccatggcaggagaggctgcatagacagtgcccactctcctgggcctctgttccctgcctccagtgtaaggcatgtacctagtggaatggcccccactcctgcagcctggccacagctgcagagacctgagtctagcttcccttagagctcagtagagccagcagcttgaaggggcttggtggcgggtagtggggattgtcataaacgacacttcagtgctcagggtattttccctagccactgtctctttggatccttgtaaagaccctttgaggtgggcagggagtcaccactcccattttacaaacaaggccactgggagcaggagcagcttaccctagtcccaggctggtcccacagactccctgggagcctctgggccctgttgccggtgcccctgttccccaggcatcctcagccccagccctgccccatggagaagaacggaatgtgggaggtaggtcccaagggacctaggtggggcaagacagctgtcccctccccacacaaacgcacacacaccctccctatccaggtgtcagcctgagccctccaggttgctgcaatccccggggtgacctctggaagcaaactccaaattcctctggatccggcttactttgaggatataaattaaaaatcacttagccccgagcagcaaatggacacatttctgtcatactcacttctaagcagctcaggcacaattaaagtgaccccagacctggccctgccatcccgtctgcttcacatcttgagacttaaggatgcggaagcacaggacccccaggccctgccccaggggccggcacaagccccgggccaccacttcctcatcagaagcaggcccttcctcctccagtagtcgggcagagcagcccctctgggcgccctctccctcccgtgggcttagggaacggcggaagacagaggagacagtgggagagcaggtccaggagggaaccgggtttcacatcagcaggcctctccttcatctccccaatgaggacgccctgcagcttcagaggaggtcagagtcagaaagacttttcgggtcccgccccctgccagtaatggagaccccttctccagcattccctagacagcctgtcctcctgttttgtgaccagcaggctggacgcttttcaagacaactcagttgctttgtgggactaatgtaattcaccacgtgaccttaagcaagtcacccgtcttcttctttttttttttaattttttttaaattttagagacagtgtcttgctctgtcgtccaggctggaatgcagtggcacgatcattgctcactgcagccttgacctcctgggcttaagcgatcctcctgcctcagcctcctgggtaactgggactacaggcacctgccaccatgccaggccaatttttaaatttttttttaatttttttcttaaaggtggggccttgctatgttgcccaggatggtctcaaactcctgggttcaaatgatcctcccacctcagcctcctaagtacctaggtaccactggcctacaccatcacaccagattaaaaaattttttgcacagatggggctgggcatggtggctcatgcctataatcccaagcacacctgaggtcaggagttaaagaccagcctagccaacatggtgaaaccctgtctctactaaaagtacaaaagaaaattagctggacgtggtggcacacgcctgtaatcccagctactcgggtagctgaggtaggagaattccttgaactcaggaggcggaggttgcactgagctgaaatcgtgccattgcactgcagcctgggcaacagagcgggactctgtctcaaaaaaaaaaaaaagaaaaaaaaaatttgtgtacagatgagatcttgctatgtttgccaggctggtcttgaactcttgggtgtaagctatcctgcctcagcctcccaaagtgctgggattacaggtgtgagccaccatacccagtcaagttctccgtcttgtgtctggactttagtttccctgtctgtggcgtgaggctgggttccctgacctgtgaggtcccctggctctaggggtctaggtgtctggcagccaggatgacagggcagcctcaggagtgcttccccctgccacccccaccccgccaccgtgggtcaagcagcagtacctggacagccaacagagggtcacagcgccccagccactcacactggcctttatggggagggggccttgcaccctataggaccttcacagagagcatcatgaccactggggtgagaatgggcctctctgaaaaacaagctgcacagctgagcccacgctcccaccactgtcagtcagaccttgcctcacagaactttctgggggtcctcaggctgggccagaggaacccaggggataggaatgcatgaggcactctagggttacaggatttgattcagctcactctgccatacctgtgctctgtggccttgagcacggtcctgccctctctgggccttgacttcctcatcagtgaaaggaggctattggagccagtgacccttctgaatgctggggcacaggggacttggtgacaagcagagactccctgctccagcacccacccggctggcccttagagccgccatacagcaccaagcccctctagctcaagttagctagtattttttcctttttaactagagcaacaggattagccagtattggccaaacatggggacttttgccttcctgccctgaacccagggcctgagggtcctcagtgcaggttggaagttatggcgttaaccctttgtggactgagaaagaagtcttagcacagaaagagcccagagttttcagctagactgcctggatcacatcctgtctctgtcactgaccagctttgaggtgttgttcaacctctttcctcatctgtaaatcagagataataataataatacctatctcgtggagctgctgaaagaatttgcactttgttgcatacaaagcacctatgtacgtgggagccagcattttcactgcagcacttgtaagcatcagtgtttcccattgacagcagcctcactactgcaccagtcgaaacaggccgctctgtgctcacaggcatccacctgaagttctacaaagagggagggcaccagagtccacgtatgagctgcagtggtccctccagcccagaatcttcctcctcactctctggaggagagtctgcctgcagacttgaaatattcaacaggccataaagagttagggaccttggtttttctatgtggacagtgagacttatggtgaggatgtcccagagactgggacatgtagaggggcaaacagagcccgtgggaaagaggcctaaggagtgtggaagacttctgtgccaggggcttctgtttgcagcagagacgttgagcaagcatcctaacctaacaacatcctttttcctcccaacctggctcaaacattagccctacacagaggggcgcagggagggccacagtcccattccaagagtcactggtgatcctgggaaggggaacccattggctcctccctgatttagcacgggacatttctctgagtctccagtgttgttttaaattggcctaggtaagtggtgttcccagcccttttagccccagagcccctttcacaaattcctgagatttaaggcaggcgtggggaacgattctgttggatctaggggccaggccaaaccccatggcagtctgaggcccctccaggcgcctctggagcaggtggttcctgggggcttggcagcagagtcccccctttttcagaagtaccagcctaccacatctgggtgctctccctactcagccatagccactccagctgctttctaaatgactccattttccaaggtccttcttaataaagaaagctaattttgctgctgttcatgaggaaggcgggtgtgagggagcagatctgggagtcatgggacacctgggaatgggtggggacagagtgaagccagagcggcaacagcttgcaaagccacccaagggtcccctggagcgccccgtcccacactgccccccaggggaccgatggccctcccagtctgccgcctctcaccctgccagtccctacttctgagattttaaggagatgggtgggaccttcaggctccaaacacaccattgctgttatggaagccccccatttgctggggcttaaggctagagacagaccccaggctgagcgtgggagtcctgcggtttctagctgaggttgagggggctgcagggtgcttggcacggagcagcattacaatgcctgccccatcccggaagccttagtcgattaagcagctctgacctgaagccctgtgggaagcagcttgttctaaatcaccgctttttttttttttttgagaaggagtcttgctgttctgcccaggctggagtgcagtggtgcgatctaggcccactgcaacttccccatcccaggtccaagcgattcttctgcctcagcctccagaattgctgggattacaggcgcctgccacacactcggctaatttttgtatttttaggagagacggggtttcaccatgttgcccaggctggtctcgaactcttgacctcaagtgatccacctgcctcagcctcccaaagtgctgggattataggtgtgagccaccacacctggcctaaatcactgctttagatgagatgcatgctgactcggaggggcagggctgggcctaagagtctgcatttgtaacaggcccccctgtggtgctgatagccctggagtaggaagggcagtgagccctccccagtagtgggtgcaggagctcagtgaggggtgggggagttcctgagggcccagggcatggaagggagatggaagagccacacagatggagcagagacccttagggcccaccctaaggatggtggtacaggatccccagccgacttctaaaatgtggtcgaatctgagcccttggaagcggcggggcctatggctttggtgttggacccatcgtcagcctgggaaacccctaaggacggggccaggatcccagggcctggcacggaagaggtgttcatcagtatttgctgagcaactgaagaaggcacagtggacttctggctctgcctaatgatggggcactgccttagcttgcccacctcacccacttcacctgcaaaatgggcatatccattggctctgggctccgtgactcacctgccctcctcccctcttgctttcaggtggtcagtcgggtggcagcccagcaaggctttgacctggacctcggctacagactgctggctgtgtgtgctgcaaaccgagacaagttcaccccgaagtctgccggtaggtgtccgtgggggactctgcgatgtcactgggaggtggggaggggaactgactataaaccatgcctgtttgctgcccctgccttctggtgcctccatttgtctaggtgtagtgcgaacccctgaggaagagcaactcatccaccaggctctgggacccacagttggggctgtcctcgtgcctctcccagggagtatacttgcctcaggggtactgcagggccagagaggctcccgaggcacaccaaacccagcagtaggcactgtgctacaggcaggaccagcatcagctcactccatcaccacggtgaccccttggcataagcactgtgagctccccattttacacatgaggaaactgaggctcacaaacacagaggagatttcccaaggccacacagctggaaggcagcagagcagggatttaagcctaggcctgtacttcagagtcagcattcttaacctttatactccactacgttcattcattccccaaaaattgtttaaaatgaaacacaaaagtcgaaacaaaatgaatcagtacactcagggttccgtattgcaactttgtcatcacctgcggtctcctgaccttgcagtaagcaggggccatggagagtgccaagcagcattctgtctgggagggctttgagcactttaaagatacagttttattttacatttcccaccatcctcataacctggcttaggccacaggcaccctgctagctttaagccggacagacctgtcacttgctaagtgtgtggtctctgagcctcagctgatctttctgggaaggcaggaatggtaaggagactcctgacttcaggggtcattgtaagtgctagaaatacataaagtgcaggccgggcgcggtggctcacgcctgtaatcccagcactttgggaggccgaggcgagcagatcacgaggtcaggagatcgagaccatcctggctaacacggtgaaaccccgtctctactaaaaatacaaaaaaaattagccgggtgtggtggcgggcgcctgtagtcccagctactcaggaggttgaggcaggagaatggcgtgaacccaggaggcggggcttgcagtgaaccgagatcgcgccactgcactccagcctgggtgacagagggagactccgtctcaaaaaaaaagaaagaaagaaatacataaagtacctagcaccgtgtctggatattgttaacattccttatggagtcaggacaagcagttgaaaaagaaaaaaagaaacagttatttcccttgtataacaataaaatggacgttttcactgaattcatcagtcagttctttggagtgtatatagacacagccttcatgaaaacgttgtaaggacatctcatgatgtgtttccataaatctgctcaatttataatctcttgcgtgtgagtttgcgcctctttccatgtatgtttccagtctgcacacatggatggcgctgcacacatagatgtgtggtggcctcattagccagtagctactctgagaccctggacatgcccgcctgcattgggatattgctatcgtattgaactgcttgctagaaaatggtcttggaatctcacaagggacatctattcctgatggagtgtgcagttttaataatgacttaagtcaatacaatgttgacagggtagaaatgacttatcaaagacacatacctcttaagtgcccgttctgtgcaggcacccagcaagggctgaatttgcaagggcaactaaacagaaagggtcctgccttaagaaacttatagtccagagcaggggccaccaagcttttttccatcaagggccagacaggggcttttgggggctctgtgaaagctgccatagatagtacatagaggagtggggttggctggttccacgaaaactttatttatgaaaacaagtgctgtgtgcagtggctcacacctgtaatcccagcactttgggaggctcaggcaggtggatcacttgagttcagtagttcgagaccagcctgggtaacatggcgaaaccccatatctacaaaaaaatacaaaaattagctgggtgcggtggtgcacgcctgtggtcccagctgcttgggaggctggggtgggaggatcacttgagcctgggaggtggaggttgcagtgagtcaagatcgagccactgcattccagcctgggtgatagagtaagaccctgtctcaaaacaacaacaacaaccaagaaacaacaacaaaaaaacctagtgattaactatacttcttgacccctagtctagagggagaggaaaacattgatcaaataattagaggggtgtgtgtgtgtgtgtgtgtgtctgtctgtctgtctgtgtaagctcaagctgtgataagtgccttgaaggaaaagtaaaagtgaaggatggcaagggggtgttgttgagggcagaccactctggggttgcagcagtctcccctgagacctgaaggttgagtaagtgaagaaaaagagaaagagcgtctttgcagttaaggggacagcctgtgcaaaggtgttgaggtagaaggggagcatgcacggctttttgtcagaactaagagaaaggcagtgattctggagcccagaggcagggggtacatggcaaaggcgaggctggagaggtcagcagcagcggaaacattcagggcctgtcttggaggtcacagtctttgtcctgagagtaatgggaacatggctaaatgctcattttgtgatgacagctcgggctataaaagaacagattgcacggggggtggggggacgtggaggcctgcctggatgtaggtggccagttgacagatcactgggaggtcggggtgaggatgatggtggctggatcaggaagacaagagtggaatggagacagagggatatttaagaggcaaaactatgccacagagggagaaggagacctggagaatgggctgtcccaggagcccagtgcctccccagaggagcaggagagactcaggtctctgtgcagtccctccacaaagggtcactgaaacccctgccctgctggcacgtgctgggtgttctcatatgttttgtggtggtgccaagctttgtgagacacagaatactatctacatttatggatgaaaaaatggaagctcagagaggtcctatgacttccctgaggtcacccaactcataagtaataggctggaacctgaactagcctcctggctgcaggcccagggctctgcctgccccatcacaccaggcctgggcagccctccatttcctttggaaagagcccttcatgctgctcaggggtctccagcaaggcctctgagtggcattcccagcatcacttcttcgcttgaaacagggatttgttctttcctccatctgcacccctgcttgaacacagcctttgtaatttagaaagccctttcccatgcattgtgtctgtgaactcacgtgacactctgacactatgcaggctcccagggatgaattctcagtgtacccattctgcagctgagaacactgaggcacagcagtgcctgtggcttggccatcctcagatttccttattaggagtcaaacccttgtcagtgcccacagccatgactaactacctttcagggccacccatccagatatatgggctctcgggatcccagccaccccctgcttgccccatcttctggaaaggaaagggggccagtctgaggaggaagcctctacctggcggttttatttgaggggtgaaggacctgccaggagcaggctgggccataagaggggtggaggccatggggagcagagctgggaccccaagtcccagacatggcaccggcgccaggcctcctcttggccacctctccaggctgtggcctcgtctgtgaagagagctgatttgcccacctcatgggctgcctgtgaggatgcagtgggaccccctaatcatgggagtgagaaaggggcccagctaatacctgacgcacactgggggccaagtaaatatgaccctccagccttcctcctctgcttccatgtgtctgtctcttagctgatgtggttcccagcctctctaaggccccttctgtggcagcaagcctgtttcccactgtcctctctcccctcggctctgtgggtgtgggtgacctgcagtgtccctacccctgggcacagccccggtgtgcctgtgtggggatggccactcccacctgcccagcccacttccagggaggcctctgcagttccagagctcgctccagcccccaagccccttcagccagtctgggccacctgtccgccctcctgcctttccacacttgtctgacgtgcctgtgcagttctgccctcccagggctccctgctcctttctttctttggtcttgggtgtctgtaggtctgtctctgtgcagcggcccctgtccatctctagcttcccgtggctttctctgccttcctgggtttctctgggtctcagactttctcccactgtacgtctgtgtgtatggtgtgtgtgaggctgtgtatgtttgtgttggggagagtatgtggctttgtatgtgggtgtgtgcctgtgtacatgtgcatgtctctgtgtatgtctgcatggctgtgcacatgtgtgtatctgagcatgctgtgtgtggctgtgtacatgtacatggctgtgtccatggtgtgtgtatgtctatgacgtatatgtacctgtgtgcgtgtctgtgtgtgcatggttgtgtacatgtgtgtatctgcatggtgtttgtgcatggctgtgtatatgtacatgcctatctgtgtctgcatgcatgttatctgtgtgtgggtgcatgcctgtgtgtgtcgccctggcgctgcatcccccttctgtctcccttgtcaggaggccaggccagccaaggagggccaggatgagatcatgcagtgagtgagcttggagcggggctttgtcaggagagctggcggtgagccggccgtggtgcaggagcacgtgtgtgcatgtgcgtgcatgcatgcgtgtgtgtgtgtgcgtgtgtgtgtcctgggagagtgcgcaggaggcgagcacaggcagtcactgcagcagccgccaggcaggcggctccacgcggccctggacgcccagcccccagctctttgttctggcgcagcctttagcctcagagcgcacgtgcgcgggcgggatcctcctcctcaccaggccccctccctcctcagtacagaaggtcacctgcctggcccggcatcctgatgctcccttgattctccccaggccgggccttagcattgccccacccccaccttccatgccagcccgaggggacttggcgggcagcactgaaatgtcagcctcctcatcacctagcagtcccacgcctgctggcaacgtgggcaccaagcaccaggcagtcgccatgtcgaggtccccaagagccttctgcctgtctcagctcctgtccatgcttgaagaaagccatatggcctcagctgacccgtgagcagccagtcactgttgaaataatcgaatagggaatgctggagcccagggcccagagaggggaggacccaccccaagtcctagcgaggcagggccagagtccagaagagagcccgaatgcctgctgccttctcgcgcccttcctgtcttcctgaggctggcctcacagctgtgggctcccaccctcatgctattggcaaagtcaaaacgcagagagagcagcaggtccaggaggccttggagcttccgcaggatgtcctgagacaggtcgtcagaactcaggagagtggtgagaactggaagaactgccaccactgaggaagaggccagctttccttagggatgagtggctggtggctgtcaatcagaaaacacagactggctgctcataggccagatgtggcccacagacacctgagattggaccactcaatgttttttttttatgcatacaagttgccagcattcactgtttaggaaatttgtacaacagagtcaaatgcctggcttcctttgagtgggaatcttggacccgcgtcctcacagctgactgggactgactgggtggtggtggctaacctctgggacaggcgctgtgccctccccatccttctctattgtctcacacccatggccttccccaccgttggaaaccagccctgtggacatgagtgtttctgacctctgttcaaggacaccctcccatctcaacgcagcagcccgagtcctgggtcccatgcagagtggatcgcttactttttgtccacaaacatctcctcagcctggtttccctgatgttttgacagtccccagaggaactgacagccatgggaaatgtcagcagatcacaagaggggggctgagacatgccctgggcccctggccagcctgggaggtaaagattcaggaatgcaaaggggtccctgtctcaccctccctgtctgtggcctgtggtccatggagagagtgcttgggagaggctgggtacttcactggagctctcgatcccagggagcttctataacaacttgtgcagcagccccagggctcagagaaagaccctgaccccaagggccctggagagtgctccagccttcagattgttgggagaggcacaggtgtcagaggccagccaagtcatttctacctcttctgctcaggacaccttaagccaggtcataaaccactgtttcaacttctgtctttgaaagcaagccctcttgctctcacctggctgaatggtggactctcagaccccgtggtggtggggacattcctggtctcttttggtggcttgactccgatctccccctcacgcctcccttgtggctgctctccacccctctctgcctctgcccaccccagaacatgcagccgccttcccgttactgggaggacaaatggccttattcagggacaccctgccagagctgtctctctaagacaaagctgtgcgcagctctgcgtgaaaaacagctcgcggccgcccagtgagcaggcaggattggtgggtgcaaattgcaggggatttgttaccagctgccggtgccccagagacagcaggcaggcaggcccttgcccttgaaatgccagccgcctggcaggctggggcaccttttcaaggtcgggacagacttcttcctggacaccggcccccacccccacatacaagctcagcaaagctgggatgttggggaggggtttggcttccttcctcctgctgggctgtctccaccgccccggtcaggtgcccctacaaggggctctggatttcatcacccggccctctcagaactgactcatggtcagatctgtttagtggacgaaacctgttcacgcgctcacctccctctgtttcagtgccgtgggaaaggcaactggcgctcttatcagcatgcccattaatagaggaggaaacgggaagacacagacccaggtcacatggcttctggtgctggaagcaggtctgatttctaggatggtcagatgtggagtacagggaaccacctccctctgaattaccctgggtgaactggtgggtggcctggcctgggccaggggccctggcctccgtcccctcccccacctccctgagggatgaggcctgagatccggtggcctcactgtgctcttggagaaaagggatggtttatggacacagtgttcccaggccaaggaattggggggaggggcagctgtgatggtccctggggttccaggaatgagcagtggggaggggccctgccatgcccagaatgagaaagggcagatgtggaaacaacttccaggctatttctacggccattaaaacgaggtctccaaagaatgatgactatgtgggaatgcttacatgtaatattaactttccagaaggataacagagtgctagacttagtatgatcccagccaggtgcaaaaacaaaacgtacatgtatttaggcacagacaccagaagagaatataccaaaatgtcaacttacaagtaatggctctatctggagggggccggagggtgactcttttctttgtttcccacattttcttctttctgtttttaagcagaagcagcagcagtcatgggtttcttcagagtttggttggagttggcaggggcagggtgagaaggagagccggcagctcctggctgggtcagcagttttcctagcgcagccctctctggttccccgagagctccaggggacagacctctcatctgggggattagctcatcactggcccccctgcctacagagcgggggtgtacacaaggacaccctgggccgagccagtgggtacctgctttccaggcctgtccaaaatgagaggggagcctggaggatgggaccctaagaagggcctgcttctgtcaccagggccctcagcagcccaccccctatgccgccccacggccacctgattgggataggggatctgcacagtgagtaggagtaggcattaacgaggtctgtagtaggggaaggccaggctgctgcaggcattgcaactagatgatgtgtgtctgagtgtgggttcccacaggcagagcctgcggtgaggattccagtgcaagttgttccttcaggaggatcccagaaagcactgatcgagaagtggaggaaatgagatggggaagggaaggaaatcagtgaaaagagtggttaggaagcacgtaacctgctgtggacacctggggctcagtcctgctgggagtgctggcagctagaatgtgccccttacccacctgagaggcgaggaggaggaggcatttctccaccatctctccaccattattgggcaaggtcagcttgaggtcggggagcaggtggatgaacccttggcactcgagttagcagaaaacgcccaggcagagtcccagtgcatgcagtaagcagaggctgtgtagaagaagcacccacagtgcctgcaacaagatgctttccagactcagtcactggcatcacacccccatcatctctgctttatttcagtaccgcttgtattaagattgagttcttaatatttcttaaaggaaattttatattgcttccttaaatggcagatcagtctcccttaccacattcagaaactgccaaaacaaagacagtagaaaccataccttgtctcctagtttagctacaggtgactgctcaatgatggagggtgagccagttctctgctagttaaaaagggaggtgatggccgggtgcagtggctcacccctgtaatcctagcattttgggaggctgaggtgggaggatcacttgagcccaggagtttgagaccagcctggacatcatagtgagacatctctacaaaaaaatttttttaattaaaaaaaaggggaggtaaagggtgaaggggtttagaaaaggcttaaagaccagtgagcaccaaactactgagcctctcttcttagaaacaacagcatcccaatgatggaaagacagctgaggttgcagtggttctcccactgggacctgtgactacctaagcaacctggggggccatatcacctagaccacacttgagggtgccctagttaagaagtgcagctctgaaggaggctctggggcctggggtaggctgtgccctgcccagcagccgtctcatcctcagtctgtccatctacaccatttctctgccttcacggctgcaggaagaatgatgaggccgtgggtgtgagagtgcctcttaaaataaaaaatactaaactggaattttaagggcgagggatgacaagcttcttgtgccaggcccacctcatgctaagcacagggcctacaaacacatacacatgcaatacacgcagtcccttctctcctggtttgaaataagtgaatgctcccattctgtgggtgggagatggcagtaaccgtgcagggccacacagcccttcaccctcccttacatgtccaaccctatgactcctccagatgagcttgttcccattttaaggggaaaatagaggctctgaggggtggggaggtggtctcggcaagggcagaagtgggaccagagctctggccaggccatccctgcatctctgcaggtcaccagggactcagtggtgctcccgaggagctggaacagcttctctggagatgcagggccacaggtatcaccatgcctgccttcccgagccttcctgcatctgcctctagccaccctatccacaggtgcacccaggacagaggtcctgccaaaacaacccccaccagcactgccccaggttgccctgaggatgccatggctgcccaaggagttaaaaaagccattggcagcaattaattctgtagaggaaagagccaggtaagaggattaaggaagccagagctttggttttaagatggagcttagcattctcgcccccagaggagggatttcaggggattcgagggtgtgagagtgaaatggagcagggcctcggtagaaggtgggcaggctggttgtggaactttttttaaccaagtgttgcaagccacagccttgtaaataccttgtaaataccaaagtatgtaccttctgggttagacagacagataggcattaatgatggtacggttatcatcagttttgcctctttagacatacagagccaggacaggtcagggaagggcatctggattaggaaaagatctgattcctagcccctttcagtcatgatgcaaccaacattaagttctgcattttctctgtaacaggcactgccttgagtatccatgaactcacttatcccacatggtgatcccaggtactcatatctaccccattttacagatgaggaaactgaggtttagataaataaaataatttgaccagggctttctggccaaaaagagccaaaattgtgattcaaacaagaacattcaaccccaaagccaccagctgcccctgctttctatgaacaggttaaaatgaagtcttgggaaagacacagtaatgatttgagagctgccaaagatcacctgaactgcttgcaagtggaggccttaagtgtttgacaatgatttgtccttgctggtaggttaaacaccctcccatctttgggctcattcaacactcagggtcccatggatgatgaatagcagagagcctgggtcagccccaatttcagatattttttccagaagccattcagctgtttcatagagaagggtggtcattaaaaagcatggattctggagtagcctgtctgggtgtgaatcccacccagccccctaatcaccagttctgagaccttggaagagtcagttaactcctttgtgccatggttctctcgtttgacaaaaggggattataataatgcctacatcataggttttaagtgggttaaggtctatacagtgcttggaacagggccaggtgtataggacatgctgtatatgcgtgagaaattttattccagcctgttggcattcatgctctctgaaatgcctctcatacctggaggtagcacaaaacctagtgttgtaaaaatatggaacccttatgtgtaggtagggccaaggtaaatgccagtcacaccacctccaagggtgtggagatgagtgggaccctgttaactaaggtggggtaaatggggtctccaagacagcagaggtttagatggggctaagaatgcatcccccctttccccaaaaaagaatctgagccactgtgcaggaggcaggcagccctgcagaaggggaaagtagagagctggcagagggaggctggacagggcccacagcaccctgtctgtgccctgggcaagggatgtttgaaggcctctgtctcaccattcccatcctgtctgtgccctgggtgagggaaaccttgagggcttctgtctcgccaagtcttcccagcagcccagctcaaaattattcaaagattggtaggaggaagagaaagtaacatttaaagtaccatttattgagctactgcttcatgccatgcattgcagctgggtattttatgatcctcatgagaatccaacccattctatagattaggaaactgacgctcaaagagatttattcacttgtccaaagtagctcaaccctttgtataacaaggcaagggatgagtgaagacatggctctgagtggatggatgtgtgggcccttgagtctgaagagaagaaggaagaatcaagagactgggggaggagggttgtggacctgggcctgccccaactccaaatatggtgctccttctcctcctccatggttgtgccttcttctcttcctccttccctgggatcagactcattgtgaatgtgcctcttgcctgttcccagggcccatctggcacacaggggcagggaggaaggctcaggccaacagacccctgccctcttgcccctgtgagctgcccaggtcagcatgcatggcagagcaagggctcggaggtgagggttcaggccctggaaatgggtctctgcctgcaggcccctagcccctccttgcctccaccatttcagtgttccctgagtcagggccagctagcttctggtatggggctagtctcaggctatgtagagcccagtgctggaaaccagaattgggggtagcctaggacagggacctgagcttgggcttcaagatcaggctgacgtgggcctggtttagctctgcagcttccatgctatatgtatccccggcctcatctcccagcctctcatgaaatgataggtaccaagtatgtagcataaactgccatctcatgagggctctgcatgtaatagttctgattattttgaagtcctgctttacagtccaggctctgagacctacttgctatgtgactgtatgcaaatcactctctccactgagcttggggtcccacagatctagaatccagctctcctggctggagcagcagcaattctgtttccatggtaacccagctgtctctccagggaccatctggatctcctcaccctgacaaggtgcggcccaggcaaccaggtgtttgtgttttgcagtggaagctctgcaaggtggtaattcccctcactggggacagggcggtggccaggcagatggctggagggaagcagagcctccttgccggctgcctgtgctgttctgagcccagagagacacagaacccagagctcgggaagtctggccacggctttccttgaagagttattaacagatgcttcattatattcctaggaaagcttcctggcttgttgaggctggccaggtgagaaacactgcctggggctggactcctgtagggaattccagaggacccagtctcacctgtttgggatgaagagacactattgtctctgcaggaaacaggaattactggggggaaacattagcagtctgcctttcaaacaggcacataattataatgacggcagaaactcagcgcacaggataagctaaattcaccccttcaacgtaagctcatgggtagctattatgtttagactctgtgatccgtacttagggaaccctgtactcccaaaggagctcacagacccagacctggcagggacatgcttaggaaaagatggtgtcaacagacccacaacacagaaccacactgtggggtggggaagcagagaggcgggaccagccacttccagcaggaagtttccaacctggactgggttgggacggtgaggggatagtcatctgccatcagtttacataggtgagccccttgacttacaacagcccgcaacagggatcccctgtgcttctttcccaggtgaggaaactgaggctcagagaggttaagtcccttgcccagggtcacacagctagggagggactgagccaggatcagaactgactcgttgcaccctgtgtggggacgctgccctcctccgtaggttgccctgggaggctccggccgagcaaaacagttctctgcctctgtccttttggctctttctctctctccccgcccccctttctccttcctctctttcactctccccgtctcctttctcctcctttccctctctcccccacttcctttgtctctcccctttccccttgggaccactgctccgtgcaccacaggtcctgctgctcggctctgccagggtcatctgcagcgtctgctctaggtggccggctatctgctcacaggctgctgccctgctccagccctgggccacgcccccagaaatgcctgctgttgtttagctctgccccctcctgaggaccctcagccaaggaagtgacatcattgcatacattcccatttcctccaggctccgtgtggtcttgagcccactctcagatgtgcgccccagatgtttagaatcacttcctcccaattaagcgtctgccgggagtcgaggggcccgcctgtgtgcagggtccatgtctgttcaaaagggtctcagaagagagaaaatgggaactcctccctgcacagacggcgggaaagtggttcactgttgagctccctggggaagccgggaagccagcactctgaagcatgctggatgcggtggaggtggtgcctgtgcttgattgtccgcccgtgtggaagcgcgaggatgtgcaggtggcccagtggtctccagggagagatttgagtgtcagggcctctgtgcctagttctcctccctctccaaatggaaagagaactgtgggaggagaaaaacaaaagagaagaaagacacagcccctctaaagaaggagggcacaggtgccaaggtggccccatgggtcaaggcccagggtgtggacccctcctccgagggcactcatgccctgctcgggctaggctaggttttagggttccggtcctgtgcctcctcctggggtgcctttgctctgtgtcagagtcacatgtccacacagctaggcagatgacacaaagatggcatctcactgaagatacagaagtgatcaggggcaccagagtgcccagccccaccaaggggacagctgctacacaggggccacctgaggccatgcgtgacacacacccagaactgccagcacttgtgattccacaagaagcttggagttattgtttttgtttttgttttgaaacggagtttcactcttgtcatccaggctggagtgcaatggcgcgatctcagctcactgcaacctctgcctcccaggttcaagcgatcctcttgcctcagcctccccaacagctggggttgcaggcaaccaccaccatggctaatgtttgtatttttagtagagatggggtttcactgtgttgaccaagctggtcttgaactcctgaactcaggtgatctgcccgcctcggcctcccaaagtgctaagattataggtgtgagccaccatgcccagcctaggaagcctggtggggggttttgtttgtttgttttttgtttttttttgttttgagacggagtctcgctctgtcacccatgctggagtgcagtggcacgatcttggctcactgcaacctccgcctctcgtgttcaagtaattctcctatctccgcctcccaagtagctggaattacaagcacacgccaccacgcctggctaaaatacaatttttagtagagatggggttccacaaagttggccaggctggtctcgaactcctgacctcaggtgatccacctgcctcagcctcccaaagtgctgggattacaggcatgagccaccgtgcccggtcatgcctggtgtttttaatgctattgaccactcctgtgcagctagtccagtgagactgaggctggctcttgggtggccagtggaggcactgggctgaaatcatttgaggaacaatggacccatgaatgatgggaggagggtcagtttttggagaatctagtggaggttggccaccttgagcttgcctcctgctctcctgctttagagctgtgtgactttaaggaactgacttaacctctctgatcctcagctgttgcatcaggaaacggggctaactgtaaccctcgtttggtgctgtctgcgttgaggattaaatgggaggatataagggaaaactgtgccctgcatgtagtgaaaactcagtgtcttatttgctacatcccaatgactgagacagaataggtgagtgggtggtacccctgcacccctcaaaaaatcacttatgggaggaagatggctggtatgggaaggaggatactgtgtgttggacagcaaaggggaagcaggaggacggtgtatttttggaggtcacaagatacataataattcataggtatacataataagtattggtggtagggttacattatcgttactgttcctctctgacatgaatgtcagagtgtagagggctttgaggatcacctagcccaagccccagtttaatctgagaagagactgacacagggtgggggatgcaatcttcccagcatccctcatcgtaccaggggcgaggctggcattactcctgctattattgccaccatacctttatgtgaaaccctaacatcatcctactactactgccaatcagttaaggagttaccatgttttagatgctaggcaaaatactgcatgcacatcctctcctttcagctttacgaaaatattaaggtgcaggtgcggaaggaatgtgagctaaaccccctcctgcttcttctgacttggtgtccctgtgcaagatgtgccactttgagcctccatttcctcatctgtggaatgggaacagcaccacctgccccctggggttccaagcatccaaggggctaagtgataggaagtactgatgcccagtactggttccatgaatgcctggggaatctggaggctccctcttggctcctggcttccagccacgcccccgacaccaaggcctctgtcagtactggttgttcctcagtgcaattaggtaattaggccaaattcaattacacaccacactcccaggtttgtctggggcccaaggggggtgtgggctccccttgttgagggggagcagcagaagcactggcttggttcccagggctgggccttcccactgtgcctctcagaatactgcctgcatcctgcatcgcagctggggagactgaggcagggaacaggcagcattgcttggcccctgccttagtctgttcaggctgttatagcaaaatacctttgactaggtaacttacaaacaatagcaattgatcactccctgttgcagaggcaagatcaggctctggcagatttgatgtccagtgagggcacgctccccgtagatggcaccttctggctgtgtcctcacatgggtgcaaagagcgccctcaagcctctttcataaggcactggtcccattcatgaaggtgtattcctgatgacctaatcctctcccaaaggccccagctcttcgtaccatctcaatggattagatttcaacacgttaacttagagaggcacaaacactcagaccacagcaaccccaaaccgtagcatccacagggctgagatcaccatgcctgatttttttcccctcctggagagcgtcaccccagactgctggcccacagctcaccttccctttcaaattcatcagcaggggcctggctcctcatcctctggaaaagcccaaagattggtagggagggtgggggggcctcagcttccctctgccacccctggatttgcagcagtttcccctcctagctgcaggctggcacccagctgctgcccaacactttgatcggcatatggatcttttgggagagcaggggctctagtgaagttgggcaaaccagagtgtatatatgtctttaagggtcttgccgggggagtcaggcgagagcaacccaggctgagggcagcaagatggccctcctggagaccaggcatgacacttctagggaccacatcatctgagtccttgaatgccaatctaaggagcttgaacttgatcttgacacccctggggagcgaaagaacgttttagacaagggatgacatggtcagatttgcctcagcaggtagaggagggacttgggtgctagaggcagagaacatagtttggaggctggtgcagttgccaggatgccaggacaccagtctgctggggtggaagtgtgccgtgtgtggagggagagaagcagaggtgactccccagcaatgcctcgtgcccacgcccttccctgggcctcggaagctcaggtggtgacatggctgttttatgcttgactcttgacttaccagttctgaggatggatggtacacagcacctttcccagggaaaaggtcttaactttggatttcattctgaaatgaaagtggttttatggaatttttcttgtaagtccaaagataatacatactatgtgtaggacaatcaaggaatacagaaaattataagaaagtaaagctgacatcccaccactgtggaataacttggtgaatatccattagtcatgcaggaaacatttaacatacttaatagataaacatacttaacagataaaccacaaataaatataggagaatggaaccatagagggcctgccaccttggaaccagcgtctttgccttgacaaaatgatgtgtgttgtagacctcttgcctggcccacctgtcagcctactccggcctttacagggaattagcaggagtcagttcaataatgacatttcttcttggagcctacccagccagacttggggaggccagtgcccccggcagcaaagagaggtatggcatctacactagatgtcttcactgggggagaggggattagggtccagagagggacagtgacctgcacctggtcacacagcaagctcccaagcccctttccaggtagcatctgtctcagttggggacttggcctcctgggccaaagagcacgcagttctgtgagctcagctctgcaggccctgatttcaacatcaggcctcccactccttgccctgccctggcggccacctttggatttctcccagacattcctgtgcagcctgtcagctcatgtccagagcccctggaggtgggggacacctgggaccacactggggaatgaaggaagccgctggctcccctcatctgccatggaccaggaacaaggggctggaagggagcaggcacccggagaacctcctctcacacggggtggtgaaaggaaggcaggaaggctgcaccgggtgatgaaggactcctggcaaacttttcatgggcttgggaggttcctaaaaccgcgcaattgctgcccagagcacaccgaggtgctcgggcttgcttctcaaccacctctcctccttttacctctcctagcaccctacagcaggcctcagaagccataagcccaccagtacagggtcccttctgcaattctccatcctcagctcatatgcctcaggtgacaggctgctccctgctactccctggcagccctgactgtcagaaattccttccttctttgagcccaaatcaggttcacccacccatcttcaggatgcatgtgattcccacagtaggtgagggaaagagccgacaagtccaggtctagccctgacctccctgtgagcaggaggtaccgggtaggatggacccatcccatcagaatcccacactgtgctgggaaaaaagaggcaactgatgggcaagagtcctttagaagagcgtatctgcctagcactttgcagtttgcagggcatgccctggacgctacagttggcaggaatacagtgccaggatagacagcttggggccgtggaacaagccaggagtctggggttctagtcctggctctacaattaatatgccatgtgactggaggcagtccctgcctcctctttgaacctcagtttcctcatttgaagagggaaacaagggcctctttactctgatgtcgattgagctggcttgattgcaaatggataagtagaggctctgtcaagaaaggggctggaaggaataggccacacatggtttccaggcacgatgggtccgatggtggctgggacacctggtatagtagccctgcctggtcctgcagcctgggccagagtgtgtgagtggccccaaatcttttcccaaagtgagcctcactttcttccgctgcaaagtggaagctttgtgctcagctgccttgtgagcctttgtctgggaagcatcaggaacagaatttggctgctccagcccagacagggaggtgtgccgcacagccaggcaggcagacagtccggcaggaaggcaaactgcatttccaactgcagagagcttatgtcagtccaaccctggggccattcggaagcccccatcaaagctgtgtcctgggagaagcaatgaaaccccaggactgctgaggcacggacattcgagctgccgttgccgtctcttcccttcaaaggcgactccagaaatcaatgggaagagattcattagagacctgggtggcgcgctccccaccacctccagcagcccctttgttaaccagcctgagcttcctgtctgaacaggctgcctgcccctgagaaacaacccacgttctaggaagcaggtcagagacctaggctccgggcagggcagcagggccaccacacacccttagaggctgtgattgttcactgtgcattcaatcattcttggttcactcattcattcaggcagctggtccttgtttcattcatacagctaatatttataaagcatctgcctggcatattttagatactgtcaatataacacatccaaaacagactaaagtcccagttgacatggagcttgccttttagtgagggagacagcattaaacaaggtaaataattgaaatacaccagccaacaatgctaaggacaaagccacgtcaggagactcacaggcatgtcagagggggctgagttgtggtcagtgtggtggcgggggctccccagtcaaggggtcccccgagggaaagcctgcaggatgcggggatgtggggatggagccagggccacctggagaagagcattcctggcagaaccctggaggtgcatcgggtgcattcacagctagaagggcatcgaggctggaccagagtaagccgagggggactggagggaaatgaggtcagagagatgacggagactggaggctgggtcacgcggggggctcagccacaaggacttgcattttacaccaacggggccagagcaacatgaggaagggtcttaagcagaagaatgttttgtgacttaggttttaacggatcctccattttagtttgctaaggctgccataacaaagtgccacacagcgggtggcttacacaatagcgattcactgtctcacagttctggagacctaaaagcccagaggaaggtgtcagtagggccaaggtccctcagaaggctctagggaaggatcttctccaaggttctctcctcgcttctggtagtttcttggcttgtggcaacataacttcagtcttcacgtggcattgtccctgcatgcatgtctctgtgtctaaacttctttttataaggacactagttctgatggattagggcccaccctaatgacctcatcttaacgtggtcatctgcaaaggccctacttccttccaaataaagacacattcacaggttctgggggttaggagttcaacattttttgtggggacacagttcactccctaacaccatggcttctcaattggtctttcctaggacctggtgttaggtggtctcacccttgttttacaaaggaggaggtcgaggctctgaaagcctaacagctcgtcagggccaccagctagtcagaacttgtttcctgagcctcagcctccaaatccaggctcctcccttccctctgcagcgcctcagttagccaggagagcatggccagttccttcctgtctccgccctagccctgggggcagccccaagccctaccggctccccgcttgccccctccccgctcggtagcctggggctgagcaggtagctgagcaggctcctctgaatgatcattttgtgtctggttcacgtgccccctcccctcagaatcctctcttctcctctagcctggcaggatgctttcctggaaccccagtaaccttgcccttgtagaacttctcggaggtactgagtggaggtgtggggcaccgggtggtattgttttcaaaatgaaacgattataggatttgggtggaagccaaatgcagacttctgggaatgcagcctgggtccaggatgagtggccctgctggaggatacgcccaggaaggggagcggggtagagtggcaggaggctaagaggcatggaggtctcactgtgcatcgtgtccctgtcccccactcaggtggagccccagcaaactcaaaatgtcacacaaatgcttacaaatgcatagatgctaaactctaaaaagaaacacaatgaagcaagaactatttcagtatttgtaatgtggtatgagggaaagaatataaaacggagttgggggcatgagctctcatcacagctctaattgactgtgtgacctggaggtcaccttccttctctggatcctagactcccaccttgggaatatgtgatggttatcaatgcatacttttgaactggattgccaagtcatttaaacccttgggcaaattgtctaaacctccctgcgcctctgttttagtttctgtacagtggaaatagctcctgtcagaaaggtctggtggtgaggattgttaatacttggaaaatgcctggaagtgtgcctgccaaccagcaagctctcagtaaccatgagctgcttattacaccaggagagcagaggccaggatcctgcttgggcccctagctctgtgaccccgtgtgtggacacaggaggggttctgaggtctggtggggatgcctgcattggccaggagctcaaccgcaactgtccctttcatcttaaagactaagtgaagacctgaggaggttgaccaggatgaggggggaaagggagtggggacagagagaacagtgtcataaagacacatgagagtttatgccctgacccctcagaggttggcagaagccccaggaaggggtctctggaggcagagcccctgagttgtctcatgccccagggctgctgtttgagccttccttgggcaactgagctggctgtgtgatagctgctccatgccaggtccccggtatgtgtgcatccatttgttgaatgcccactctatgctctacactcccacgtgtcctgagaaggaccagggatgtgaaggtggatggcccaggcagctcccagggcctgagctcatgcctgtcactctcacgtggacacgtggctggggcctccttgtccacctcaccctccctctgagcgcctacgcccgcatgggtgacatctccgagtcataggatccttgctcagccctgctgaatcagcagaccctgcctgaagaagagctctgtgtctcagaacccagcacccagcagagccgtccctggcttcattgttctccctctaagcggtcagagggagcctggcttttgtatgcttgtctttccttgctagtggcctctcagcccccaggcctcccactatgcaaagccttatacaggaggtgacccagcccagaaccactttgacccctgggtgacctacatcctaggtggcttgattctttttactgggtaatgctgggacaggatccaggaagcccatccctctgtgggtaaacaggggagccctggagaaggcccctgtctgcgcccccagcttgactggaagggtccccacccgcccccaccccaaccccacccagttggtcttgcagaggcaggctccgcatggcaggctcctccagctgggtaaagcatcctccctccccttgctctcccgagcaagccaccactgccttcccggctgcagcgccgtgatttatcggcggctcctcctcgccagggcccacggcaggaggagttcaaacacccgcgagaaaagccacccgctattgatcctcgcgtcaggcctcccaagcgctggcgggcattcatcaaggagccgcagcgcgggggctgcagctcgccctttcttcttcctttcttctctctcccaagtcattcccctggggctatgccccccttgccgaggtcactcagagagctcaccaagtgcctgtgagctgaggtggagagcgcctttgtctgcggcctctttgctgtagatccttatcaagggggtggagcgggctgctttgggccccaggcttttgagcaaatctttggaagttggagaagtggagttggaactcggaacaagtggagaaggccctctgaagcagagactggttggagtgcccgtatttctgtagaccggaggcgtgtaactagaaagagtttgctaaccaagtgggccagagagagccttgaaattagcatctgaaaaccccagctttggcctgaaggcctcccgtgcagtctggtgaatggatgcttgaaaacaatttgttttcctaattacgtaaatctagtgaagagtatttatctttttttttttttttttttttttttttgcttacctggggaaagtctaaaatctctggtctcaagccggaggagcgtatattaattctcttctccagccccaccctatgacttaccagagtgggtacctgggagaacagggagatggggtagggagactggcaggttgtctttattgaagtttcctgggcaatgccaccaggtctgtccccctctggtataaacctctgctcaattccagtccaaattctggctcaacctaccaaagtggttttgctgaactcagctcctggggctggccacatggtaccaacacatataggatatctcaaaaatgaatttggaagtcccaaacatgcgggtctttggtggctcagaaagcactaaggatcagattagaatagtgaactgccattgcacagaatggggaagggtttgtgttctggttatttcagatagtggctctttggattctggataatggaggtccaagtgttgacattgttaaaaaccagattaacagtagaaaccagatcttaggtacatccatctcagtgttctcttggaacacgtgagccatattgtcccaccacatctgttttctgggtgtcatttgctgagcagtgggctttagagtaggtcagtcatctggaggatctgcagtggggagatgggcgagtcttcactggacccctgcctgcggtgctgcttgggagggcagggccccagtgaatgtctcagtgagtaaatgactgtccccaaagaagccataataacctacaaggagatgagatggaggtgaggataagcagagcctggaatttgtgcaaagctgaagggaagtccttcccctggctgccctggggttggcctgccagtaaggggatgccaattaatttctcttgcaggaagctagttcgtgtccaaaaggctcaagttatgaagtacgaattaatccatttaaccagcttctcggagggaaagcccatgacaactgcattttcaaatgccatcctgaaagcgatatttcaagtggcagtgggtgggattagagcctgctaacgatttatgtcaaacaaggagcaagaacattatttctagataagtgatttgtcccagcaacttccagggccggcaggaaggtttaggggccagccagaggctgaggctgagaagaggggatggagtcaggagatgtcacctcaaaggccagtgaacctggtcagctcccggtgttggccagggcagcagggcacggcagtccaatacagaggagattttaaagacagtcatggctgcccttctttggggatgaatgatggggactcacttaccttcctaagtgtttggggcagttaggtcaccacacaagcaactttcacaggcaggtgggtggggctgggggagggagctataaaatacagtttctcccgagggggtaatgatgacagggagtgcccacgaaagaggaaggggcgaagatctctggaggtgggacagcaggtgggcttccaggggtgtctaaggggcagagaggtggggggtgagcaagcgctgaaagcccggagcccttgcgacagactggctggaaggaagaggcctcggccaccacaggatgcaatgtcaggaaggcagcagctcccggggcggggcagggccgcgcgcagccgcccccggcttccctcctgccgccagctcctggtcacaggaactccccgaagtcggggagcgggagcgtacgtgcgcgtgttcaccctgtcctgggcccctcgctcggggaatcccgggggtgccagggcacccagggtcagggaagtaagatgccgggccgcctaccttctccaccccgtagcccgttccgaaaatcctttaaaccgagatttaatctggatgcctagccccgccctcccctcccctcccctcccctccccccggccgaggccccctccagttcagctccctcctccaccccctccccgccgtggaccctcattagcatgcccacttgggaggattcgctggggggcgggagacacccgaagtcatccaccgccagcgccttcccggcggcctcctcgggcgacagcgctccgggagccccactcgcacaagtgttgcttccaattaattgcctgggcgggggaaggaaaggggcctcgtcgccgcccccgcccggaggctggagtgctgctcgtcgggtcgtgcgttcgctcggcagcggcgtgcaccagcaccacccctgcgtgcaagtttgaaatgtgagctgcctccgattcatactcgctcgcgctccctcgcagcgaagtggctgggctgacggtctgcgcgcgcgagtgagtgcgggcggcgggctggggggcggggtgcggacggcgaggctcgcggggcggggagggcgcgcgcgagccggggctccctggagacgccaaggcaggtctgctcgcctttcatcttcctcccgcgctcctcctcctcctccctcccctccccccgccgcggctggcctggcctcccccggagcccccagccccacgcgggcacacgcagggtgggtggtcacgcccgcagggtccgcgagcgcggcgcagagcgcgggccgtgggaagtttctccggcgcgccccgtgcgcccccgccccccgcgcgcccccggcccatccccgtccctggagagctgtcgcttgcgcccgggcgcgcggctggctgcctcctcggcggcggcggcggcggccccattagcggagcctccgcctatgattggcttcgcccgggaagctggagacgggcgatgaataattgatgtgtgcggtgcggtagccggacggcggcggcggtggcgggcagcagcgagcgggagcgcgggagccggagcgccctcggagcgggcagcgcggagcgagcgggcgccggacccgcccgggcccccgcgccgccgccgccgccggggcgcggagcggggatgcaggcggcgcccgctgcctgcgcgcagcctttgttcggcgctggctgaatcctacccggagtcgctcgccgcggccgccgccggccgggccccaagcccccgagggcgccagggcgggatcgcgaccggtgcaacttctaggtaagtgcggggtcggaggggtcggcgcctgggcgcccacgggccgggccctgggctccctccgggcgcgggggtgagtgtgcgtgcctgtgtgtgacagaggagggccggtgcattgtgggtagcgccgtgtgctgcatggtgtcagccccaggcttggccgcgagagtggcaccggcgtgcaccgggccggttttgtgtgcccacagacggggccttcatttctctttggggccacggggcagagtgcgcccccacccaggtccctgaaggtgaagtgttggctctccagcagacattttacgaggctctgtgctcagtcggctcacgctgcaaaaataagaatcggccaggatgccttcggaggcagcgcctgagggtcctcgacttcaagctgctcctttgtcagaatgcagccctgatgcctccagcgcgtagagaccccacgggcactggtgatgccaccattgcggcagggtgcccttcgcaaaggtggtgggtgccgaatagacttctgacaagtgtttgctggcaagctggctagaggagagaggtggatttgcaccagagggcaggaagcagcctttcaggagatgcctggttgtgaggaccttgtacaagaccttggagaaagagccccttgatagggactaagaggaggctgcctggggtcctgagcatgtggttttggtattggtgtcttcgaagccaagccatggtgcggtgggcaccagataggtaccagttcctgggtcgagaagccctctggggggaaactaggagaggtcagctggcacttctttagacgggtttcaggagactgtcattcctgcagtggggacccagtcccttcgcccttgaccatcaggcgagactgccagatgagtgttgagcagggctgatggctcttccagcaggaaggctttgtgtggcaggtggcatggagttggtgccagtgtgcttctcattggcccatctttgagagtggccacagaaattgggctgaggagagaaatcaggctgagagtcagaaatctggctgaggagtgagttggggtgaaaaggccgtgccatcctgaagtcagggtgaccccagatgttacgtgggggctccggctcccccagttatggggctctgggcctgaagcttatctcccatctgctatggaggaaaggccctgtcccaggggttgcgtggaagggtgactcttggagtccacgtggctcctaacaagcctttcccctttttttgtgtataagccaggcagtgactaccctccaactagctggattcaagtccccttctgagctatttttatcctgaacttccttagtgagaaaccaccaaacggcgatgctttggtgagaatctaggtctttaccggaagcgcagcctgcacagagtttacacctcgctacataaggctgcctccactgccctgcacagccctcccctggctcagagcccctgtgcctctctcatgcctcttgattctcatcacagcctgtgcgctcagggacttttgagccccagtttcagatgggaaaactgatgtgcccgagatcatccagttggggatgtaggaggccaggcctggctccaacaggagcaagaccttgatgccagtgggctccctgaaggcagggaccacgtgtttctcatcaccgtatgccccagtgccaactgtggtgcctggcggatggtgggtgcccagtggctgctgaatgatgatggcacgagtggaaggctggttgggtgtgttttccccattggagttgggacggggtcggggggcagagggattgaaagagcacttccagatctcagtctgcattggttgagcacccagtccatgcagtccctgggaactctgagatgagtccctagtctggagtcaggcagctagagggagaaaggtgcttccacagaggttctgcggaagtcctgcccggggcttcctgaatgttgccccagggagtaaggagtgactgagctgggtctaagatgacgccattcagtacagtagccactggccacatgtggctgtttgtgaatttcaattaattaaagggatgagttaagcttatccttggcactaaccacattcaagcactcagtagccaccgaaggctggtagccgccttgttgggcagctcagactctagaacatgtccaccacaacaggaagctccatggacgacagacagcgctgtccaggaggatagacttaagacagaggtgcagtgaggacactagctcagagcccacaagtgtaacagtgcaggcgagtctgttagataaagagacctcctgtttctctagcatttgttttgtggcagcctgctgcggggaaggagtagaccagccaggcattcccatttaacacaggagaaaactgaggttcacttttgcccaaggtcatccagcaagagggtggcatgagtcccaggtctccaaccccttggccagcactctgtcatccagcagaggtcagccagggggcacgagtgggcagcggtcccaggagcagcctcagacctccctgagggacagtcttggtgccagtaggcgtcagtccctgtgaagtcatccattgatcgggcgggagcgccagctcagcctcgggtcctcaggaacagagagttctgtgctggcagagctggaaggagcgggcgcgaggctctctgggcaagggaggtgtttaccttgagcgatgcggcatgggtccctcgggagaggctggctcctccatggggaaggaactcctcagtggggcctgtggctgggatccttagcaccacctcagagagaggggtacaggcccgaacccagcagggagaaggatttcgggacctttgactggtacagagtgcacctcacccttgctcttgccccgccacaccgtgtcacagagcatctgctgggcctccctcgccctccttccccaagcctcggctgcaggaggaaactctcccagggcctggcagagcagcagctgcctcacgagggagcctgcaaagggaaaaacaaggcctccaccctcgaagcacttccagcttcccagggagctccctggccagacaccacaggcagggaaggaaggccagcccactggccggagggccgaagggacttcctgccccaaggtcacatggcaggagaggccatggatggagccaatgccctctcccagcccactgcaaatcccagtctcccagtgggaacgtgtggtttatgatttcattgtgcctgctgcctggtttcctgctccagccctgaggtgagggttagcttcctgtggccttgtccctgtgtcctgaggtgcccactcccccagcagcaggccttgctgccgcctccagctcccatggccctgacctgactgaagtgggaggtctgaaaatgcggtggctttctgcagggacccccgcacaccagaaagagggttcttcaaggcccatcagggcagcttgagggatgcgaggacctttggcgacactctcaggtttccagtcctctagagggagaaaatggtcaggggcggggcactgatgaggcctttccggggagcccttccaggacccatagtgagtccctcggggaagctcacagtgtccttgttccccaggatctgatgggctgtgtgcctttccaaactgatgcacagagctgggagctacccccatcacccagagtactgggcgtgaggacccctgggtgggccaagcaggcagtctgctgtccccctgcctggccaggctcaggaagtatgacccttttcctccctctcagtagccccagccatggccctgacttctccttagagccaccctggggcttctctaagccgcagagaccctgctgggttccccaactgctcccaccccccgtagggtgaggccaggccttagaagtgcctggcctggggcagtggtgctgctttgtgtgtactgggtgaatggagaacaggggatttagccaggacactcacattttctgagactgaggctcccaaaccaccctggagagttgttgggtctgaggggaggcccggcccctgtgatttggcttgtaaagctccccagataattctgatgctattggtagaatcatggctcccaacactagccctgaagtgattgtatctgtagtctggtgccaaattagtgtgtgacctttggcaagtcacttcccctctgggggcctgagtgtctcatctctgcctcatctttatctcatctctaaaaggtagactccactccagggcctcaataccagccctgtgccagagaggtggggagagaggaaagtgagaaagaagcttgggccatgtctttgggtgccaccacccgcatctgggtgtgcagtgggaaatattagggtgcagcacggcaagagagaattagatgaacagaggcctatgctctacaccccaagagctatagaaggaagaggggaaaatggtgactttcaggctggagcggcctgaaacacttcccaggtgaaacttgattttggaaatgggcaggatgagaaaggactgttgggtgggaggactagtagctgcgaaggcttggaaaccaggagaggtatggcgcttgatgagaaaggaggatgtccctccagatggcaggggggaggttagcaggagctcgaggagaggttgagtgaggctgctgcaacaccttcagggcagtggggagccatcaaaggctttggagcctcagaggcactgggactcctcctgcttctaggagcagggctgctgctgagtagcaggcaggaatcgggcatagaagttgggagtagtgcgaggtcggcgtcctgctgtgggaatgtccctgcccctgctgacgcaatggaaagcctcgtcttgtttcagggttcctgttttgtggttgcccatggtggggggcgagggcagccagctctgccttctgaggagctccgggaactggatggagcttgtccagacctccccacaacagtcctctgctctcctggaaaagagaggcagtcctgtttgtggagtctctccctagtccctcgggggattctagccaggcccaggaggctttaaatcaatgtgtgcatttccctggggctgggactggagtggatgggtgccagcgggtagtctctgggcttgcagagttggtctcccaccctcccagggctccagtgttgaatccctgctccctgggtcagagcctgaggcactagtgatttaccagctccctgtctgcctcccaagagcttatgatctgatgggcagcttcactgtgcgcagaagatttagcaaggtctggttcaacccctgtgtgtgggaggccaggactgtgaaaaaatggggggcatgtttcagagaggaaggaaaaaggaagcccaaggagccctttttcctgcctctcacttctgctgcttccaggcccagctctaatgccatggcatggcccaggaagctttccctggatccccacacccagcgtccggggccactgtctccttgcggtccttagctcctgtgcacatccaggatccagcgctgtacatcagtagcttcctgtcatcccttgcccacctgggtgtcagcccactacactgacttgaaggacaggcggttcgtgacttgcatccacgctgggtgctgcgtaaatgtctgtcagatggccagcccggagcatgaggacatggcggccctggtcacccaggcaggaattgaaaggctcgaggtcttggcccagctctggctccccagcttgtctgtgtgatgtgaggggtgcctgcctttcttgaggtccctgcttgtaaggagcagcgtgggatttactgtgctgtccagtatagcagccacacatgtatttaaatgtacattagtaaaattaaatgaagttttcagttcctcagtcacagtagtcacatttcacgggctagtggctaccagattggacagtgcagtggtggaatgttcccatcatggtagaaagatctgttggcagtgctgtgcctgaagtggtcactctgtggcccgcgggcctaccctgttggcagctctggtgactgctcctctccctttccccccaatgcacgagggacctccctgcccaactacccggggctcttaaaatggggccacccggtgtccttcccaagccagtgtcagacagtaattatgaaacccacatctgtcatttaccaggtgactttgagtaagtcaccaaggttctctgagcctctgtttcctgatcagtgcagtagagctacttgtccctgcctggcagggttgcagtggggagtaaatgagatggggctaaaaggcgcttaggttggtatctggcccatagtaacgtctcagtagctggcagctttcatcactgtcaggtggattcatcccctcgcagcatgggcttagttccaaaactggctgggcattaggttcccctcaagttcctgagcccgagactgggttctctccacccagctccaccaccagcccccttctgtctgagcctcagttttctcatctgtacagtactcctgcctgtccttgccctgtgttgcagctggagaccttgctgtgccctgtggagggtggtgccatctgggggcttatccctccttccagcatggccactgtaacaggagagcctgagaaggtcaggggacagaggggcacaagtgtgcttgccacttgtctgtcccagagagaagctgcctggctgtccctccggcagccatcagggaggtcctagcatgtgtcagctctggaggaagtaagcgtggccggcacccacgtgcccactttcatttccctcttggggaatgagaggtgagagtctgcaccctggacttctgaagcccgccagtgatttgcacaaggacttcttccttgaggtctacccatagtttgtcagggtctgtgagcccctgcatttctgggcagagggtctgtgagtcgagccatgttgaggtggcccttggggtccagccatcctagtgagagtgggcttgcagaataaggactgtgagtccagccttggctttcaggtgcccaaagggtgcctggagaacccctcgctgagaggaaattctgggagctggggaagggtcccaggagccaacacacggcttcttgtcaaaccctaggtcctggcacccacggtgtccttggtgtcgggatgggtactgggagacagaacagccttcaggcgcaaggccggaagaccatcctggggaacagaccacgcgcagggagaaggcacaggaagctggggggccaaaaggggaggggcttgctggggacttgtggccattgtagagatcgaggaggtgaagactgggcactgcactgaattgggggtttccaggtggggatgggatggccctcctgtggctccccactgttaggagcgagaggccctcaccccacaaaggtgccctcccaagcttgctccctacgtctgtccccctcctctcctgtcttctccacacaccgggacctctcaccctgtctaagcctcagtttcctcatctgtagaaccggagactagtactcatcccctagggctgtgggaggattaaagagctcattccagccagcaccttgagcacagtgctgggatctcatcgcccctgagcaaacatgagctacccttcctgctctacgtggttctcctcatgtttgtgggaggcgtgttcctctgggtcacttgtcctcctgctccccagctttggggcctctttattgtccattgcagcccagcctatccagacactcccccaacccctcaccccatacatctgttgggggtaccttttctccagcatgagccccgaactggtagaacatgcagaatgcccatcttctccaagagcctgagacatcttggagcaaatagtccccctgcctccagccagggccccagggctcttggccagaagctcagggctcactcagtgtttgctgagcaaaggcttgtgtcttccctgcagggagtggggacagcttgtgtaactctcaggtatgtcttcatttgatttgccagcaacaggctcagaaagttactgggcagtcccgggatgccctggaaaacggacagaagccattgtcccagggggtcagggcagcagcacccaaaacagagaaacgccctatccccaccttactagaaccatggcagccttgaccgttgggtccttagtggcttctaggaggccactcgggcaatgggtctcccaggagcagcatcaggacaggggagggagtaagggccgagcacttggcttccactgtaagctcaggctctggcttcttctgtccaggccaactttggcccttgaaatggaggaaggtcttccaccctccctgaaccctgcttttccttcgactgctgctgcccaagggcacccgtagacagcaggtgggcctcaggaggcaggctcctgcaggctcctgtacccacccagcctatgtacccaccctgcctagaattaagccttcccagcatcaggcctaccaggggcccataatcctctcagagctttacatggcggtgtaccttctcagataaatacatttagtgacctggataagatctttctcctcaggtgacagcctttgggatgaagatttctcccctggggtttcttcccaggtgtggctttcctggtcatcccctcctctctcccaggagtgtgtagtccaccacaccctcaccatggtaccccctgggctcttacctaaatagaaaccagcctctgaaatgacctggccgagactcacttccctggacacctccccagtcttgggcacctgctacctgaagccttgctttcaccctacccaagtgatcttgtgcttgagatgtccttctgccacccagcagcatactcagttaccacttctgcaaaacggggacaccctcacccacaggtctgttatagctacaggagtcaccatgtaggctgcccactgagtgtgtgagtgtgtgcaggcatctgctggggaccctggatgcacgcccccctgcccgtgcccttactaacagatgcacctgtgacccttactaggcacactgcaccgtcagtacagcacttagtgcagcccttggtatgtgcaggaatgtggcatttcttcaagttcataactatgactatagctcgctcaagtttgtatggtgagcatccagataggcaacatatacatgtaatatattttggaatgagtgaatgaacaaaagaagagctgggttctctctggtccaggcactgtggggaaggtgaaaaaagacacatcccctcccctctgggagcttaaaagtcccagaattaagatgacagggctggaaggcagtgggtgtgcggggccggacatgcatctgggtgagaagtagggctgagcctgttgcagagattatgtgttgatgaagagaaatataagacagaacatttgcaaatgttgcctgggttttgcatctttgtgcatatatcagataaacatgcagttgaacatgcatgtgtccactaggacgtgtgggggtcgtttgcaagttgaatggctgttggatatagggtagtgtacttgtgagtttgtgcaggcttacaaacacactgggtgttgggagtgtgtctgtgacataggaggggcacatggggaactgggtgtgtaaatgtgttgacacattccaatccccttggggcttacgggtacctgcactgtccctccctgccgtgccgtcttggattgtcttgggcgtttctagagtgcttcagagtccagaaaagccttccacgtatgcagtggcttctcctcacccagcaaggggtgggaactgagggtcagggagtgtgggggactggtgggtagaggtgcggcctgaactctggccttctaccttccaagtccgaggcttcagtgtccaccagggcactggcaaggtcctgtatccacttgcctggcagcgccctggggaatttgggatccagacgcaggaggctcacttagatccaggactttgtgagaggcccctgagcaaaggaaggatgactgtgaccccaaagatatccatctgctcagtgtccatcatgccctgtgtggatgcatgggcctgcacacatggccccacacacaggtacatgcacacacacacacacatgctgacacgcacactcacacacacactcatgcacacactcactcataggcaccccacccttggggttttcctctccgttcagaaaacttaattgtagcttaaatttttattttcagccaactttgtttttaatgttgagtagctatcacttgtttgtatatacttcagaaacaaagtccctgggagagaaggaggctgttttcttaagctgaatcctagaactccaattaggagtgattgttccacttctgaggttttccagccgcttcctagcaagccctgctgagcccctaattaggcagccaggggcgcccctgttcagggcccagcacatctcagggtggcctgtttgagggccagtcttagggaagttcagggccagaaccccaagtggacctgcagggtactggggatggtcctctctgttcagggagtggactgaggtcattgcccgccatcccagggccctggctgcctttggggacatcagtgcagggcacagaagcagagtcagggtgccctgggtttagggaagccccataagccgggctggacggcccttggcccaggcagggtcccatggggaggctgccgagtgctgctcttgctctaactggggatccacccacgatggggcctggcccgctggtctctattcactgctaagcaaactaaagctcacaaaagtaccacaggaattagagccagggccacccctcaggcaggtctgggtgaccaagtcctgccttgcagtcagcgtgatattccatgccatgggtcccatttgggtgggggatggccttcctggggtgaggcaaaactgagaaatttgaagggcagtttagacaggtgggcgggggcgttggtgggtgagggtgccaggcaatgcagggagagccgactgagtgagggacctcggccttgttggctttcaaaaccaaacacctgatacctttcaccgcagtcgtgattttcagcacattgcccgatggcccccatccactcttgctggggaagaagggcgtgtggttgaagaaacaaacctcttgcagcctcaaggtctccctgagctgcccacgacagctggtgcctactcgcaccccgcagggctgtgggcctccagcccgggctggctgggtcctctggtgccatggatgcctgtggccgccctgggagacgttgccctccacccagcccaagccgattccctctggccttgaggaggttcgggtttctgcctgccaggtgggcagctcccctcattccccacagcagccactgagctcacgacactgccctgctcctgccacctgagtccccaggtgccatctgccaccctgtttccaggcggcaggtaggtggcctcagggcaggggagagaagaaggcaggcaaatcccagatggggaaggccgggctctagccctgaggggcaggcagtgcctggcctgccacctggcacctgggttgcccccacccttcttcgggaatggatgtgagcaagtctgctgaagcatgggtatgagtaggtaagggggttcccctagcatatctgtggcttagtttctctgcaggtgtgaggagtggagtccgtctgggcacctctgtgtatatctgcgttcctaaccatctctgtcttgagcccgggcattcaccagcgtccctgcccgctcccctcttatttctctgtgctctccaagtgtaccttccatgtctctcagggtctctgtgttcctgcctatctctgtctctgcattctgagctcatgagggtgcctttgccatcagagccacctctccccgccaccccccacattgagttgttctacttaatttcattttcccggggctccaactcacagaaataaaccgtccctccccacccctgcactttttcgatttaacaagcctgctggaaaacaatagtgatttccgcatcgatcataaacagaagtgattaccatacaattacagcctgaaccatcagtctggatgcaatcacagagccgcattgtaaatcggaagacaattgcctgcagaattacccccaaattggtttaagtggcaacaaaggagtgttggcattttggtattttggaaagggatggggggaatgcgggtgtcctggtggcagagggtccccactgggagccccccagggccccttccttggcattgaggaggctcttgctggggagagctgcctgccaccttcctccccatgattttcccttcaattactgctccctgcccgtcttggcacagcttgtcataaactcatttatactaatgtgtgagtggctaagtgtgccttcgaacttggccggcagaggggtgaatctgatggagggaattctggggggcctcctcagctccccaatatccccctttctccattcccatctcacctgtggctcttccatgtcaccccatccctctatgctcctggcctggcacccaccccacagtagccttccccactatctcccagccctcggtggactctggccagcatctcccacatcccatccagagcagccccctccctcctgcagctgcagtgtgtgccctgcatccttcccagccttccagaccagctggaggccacagtccaagccaggtgggctagggcggccactccagggagggagcctgccggtgcccctgcagcacatgctgaggggatcacaggtgggtctgctcctttccagcctgtggtttcacaagaaatgccctgccagcaggacccctctgagtgtctgaagactggactcttaagctccagctgtttccacagggggcatgtcttgctctgggaggtgatttctctccagggtcaggctgctctgaagttaccaggaaagcctgcccacccactgacacagtcagatcccctcacaggcatccatatccaggtcataagtgctttggcatgccccatctgatcctcacagaaaggtttgtgcatgcttgtgattttgctctagtttttccattaagaaaataaaaaagaggtggggagacctgaggggtgacatggcttgctccaggtgacacagcccatcagtgaaaagtgacgtcttcaggcttctatgtgagtgcttcttcctagatgctgtctacagcctccccagacccacatgagacagactggggtctcaccttgtcgctgacctgccttgagacctcagacaacaccaataattaagcaagcccgagtgagcacatgctccgtcctcacctgtttattcacatgtcaactccgctcatcccattgcagccctgtaagaggatgggtgggtccctagtgaggggactgaggaccactgtggggaccccagagccctcagattcctggtgacagcagctggtctgccccctgtctgccagcctctgagcctctgctaatacaccctggaaggcaggagaagccggatgaccctgaggtcttttgcacctggtgccactgagggcctcagttgtgctgtcctggttgctctgcaaaagctttaggactgggcaccatctagagttggtgtatctggaaccagaaactctgttggctgccccagctctaccctgagtcaggggaacatcggtgttgccctgggcttggcctgcagagctggggtgggtcaggctttggggtgaccctgtgcctggcattgggaggtgctagcattgggaggtgactgatctggaagagaagccaggcctcacagaccatggtgatgttcagggaagaagctgctggtctttgcctgccaggcagacctgccctccccaggccccatcctggagcctttgctcttgctgtctatctcctggggagccaggtgtccagtggaaagacggggttccaagccacagagacctggactcaggttctatccctgccactttatggtttgcaccgtctttaactctgagctgtattatgagaccacaaaggtgattgctgttgagtccagggctcttcagacaatagccctacatccttggtctcagaacccagagggaagggacctcgcttttgttgagcatttgtcatgtgccaggctttgtcctgggcattttaaggatggcctgcttactcttcacagcaaccccaagaaggtagtcagaaactggatttgcagagcccagcgtgggagccagtatccccatgtgctaattggagcttaaatttaatgaaatgaagttaaatgggccgggcacggtggctcatgcctgaaatcccagcactttgggaggctgagacaggaggattgcctgagcccaagagttcgagatcagcttgggcaacatggcgaggactcatctctactaagaatcaaaacaaattagccaggggtggttatgcacgcctgtagtcccagctactcaggaagctgagacagtgggatagcttgagcccaggaggtcgaggctgcagtgaaccatgtttgcagcactgcactccagcctgggtggatagagccaaatcctgtcttaaaagaaaaaaaaagaagaagaagaagaaaagaaaatagttaaatggaatttaaactcaactcctcagttgcactggccacacatgtgcagtagcacatgtggcccctgcctcctgtttcgggcagcacaaatcaacatttccaatactgcagaaattctgttggccagcagtgtactgtgttatcccatttcataggtgtgaagttgaggatggttggtgattgtcatgcgtagggtctcagttggatgaggcaaagtgggacataaacctgtgcccatcagtgcaacatagctttcagcaccaacattctaggctctccaagcccagcccagatagctcccctttcatgagccttccatgagtctgaaggccatggactgttttctctgcatcctgatgctgagcccaaggcctgccccagggcaggcactttggggtgagtatctggagtgggtgatggaaggaatgactgactgaacatggtctgctgaaactttggggcgaactcactcccctcctgatagaactaatgtggggagggcagagccagctgctgaggagtgatggatggcccctctcccaagataaatgtggcagtcaaggtaatcggattgtgtgtgacggtctaatttgtaggcgaggggaggaagcgcccagccatgcctcgccccagccgcccgtattagtttaatcaaatgcccagtatctaaatgactgggcccaagtgatggatgatgtgagctttgttaaatgttgttgccctgtcgagccaaacttcccaaggccctgcccggctcctggactgtttaatttgttttttcttgcttggttatctctgcgtggggcagggaagggggggctggagctctcctgtctgtcttaaagcctctggtttttcatggaggagaagagagaggaggccagacctaggggaggagtgggagggagtcaccttctgcctctcctgagaagccttcctgggtcgctgcacagtcttgaggagcccaactccccagaacccttcaacagggcttcatcgtgcaccgtgtggcttcttctgttccatgcagactcaccctcaccctgtgcttctcactccattaatggggtattttgggatgcaggacattcttccataggaaaatttatcaagtttccctaatgcttagtgcttgtgtttcttgagaatttccccaaaccccagatcatgaagatattctctatcaccttcttttttttttttttttgaggtggtgtctcactcagttgcccaggctggagtgcagtggtgcaatctcagctcactgcaacttctgcctcccaggttcaagtgattctcctgcctcagcctccccagtagctgggattacaggctcacaccacgccctgctaattttgtatttttagtagagacagggtttcaccatgttggccaagctggtctcaaagtcctgacctcaagtgatctgcctgccttggcctccaaaagtgctgggattacaggtgtaagccaccgcgcccagcctttcctctgtcaccttctagacagtatgttgttttgctccccctctctccactcccctcgactttttgttggtctgtggtgtgaggtaagggtcacgtttccggtctggtcattctgagctctgagcgtctgctgtgtgccccagactaggctgtgtcctagcaagagacaaaagatgaaagaggcacaggcgtgacagtgagtttgagttcaaaacagcatgcatactctgccaggctttgtgtacctgcagtgccctgccttccatcagtgttaattgtcacctgtgtgccaggtattgttctaggcactggggatgtgctggcgaatgtagcacatgggaaccctagccctggtagagcttttgttccagcatggagggaggggaatcaggactttaaaagcaggtggtgataggtgctctgaagaacaatgaggcaggggaggaaaatagagggagtcggtggtggggaggtacgacaattcataaacggtcaggtcagggaaactctggctgcatgaggatgagggggtgagtgaatcacgtggctgtccaggacgagaaccttccaggcagaggtggcaaagtctctggtaggtgccaaggatagaataaccctggaaggaaaaacccaaagccaccagcagtggttcccctttggaaggaatggcaacagggaggcgtcaaggagactgtttttcaatgcacgccttttattcggcttctgtatatttctaattacttcttcaaaatagcatttcaaagtgaagaaatggaacggtgaggtggaatcatcggatgtgatggggaaactgggtttggaggctggggaaacattagctttataaggagaatggatttgtgtagtacttatgtaaatgaaaagtaattgtattaattaaaactaaatagatcccactctgctgttttcgctggttgtccttgggcaggttttcttaacctctctgaacactagtttcctcctatcaaatcagggtagttgtctccacaggattgtcaggaaaatgaacagagaaaggaggcgtgtctcatttctgcctagcctgcagctgaccttcccgaggacacgtccctgcatgacctggctctcttcagggcagagagagactgtatccctgtcttcagattctccaggggttcgagaccccagaaaggcccagactctgcactccggctcccccaagggtagttggatgtgctccagacccccaggctgagcgtcatgaaagaccctgtggccccgccgggtggtcgggtttttgacccggccggcccctcagaggcccatccagttcgtgcttgcccaactggtgcgcgctcagctcaggccagctggtcacccagctccaatgcccctccctacccggtgttcccttccctctccctacattccgtgttaatttttcatggcctccatcagaggcagaaggcagagagctgttttctgcagggagagagcaggcgctggagggggaggagggagagagctgcgtgctgattaaacactgcagaggcctaaacaaatgacggctccctcccccagctgctctggaagagaaacagggagcctggcctgaactgcagatggcccaggctgctgtctgtccctcgcctacctggggctgcttcctagagccggcagtgaggcggagcctgcaggacctagttcagttcttacagccactctgtgaagcaggctccaaggcagagggctgagggacaccagcaagtggtgttgctgagagatgccgggcaggggacaacaatgccctctcagagtagaagctttaattagaccacacatgcaaagtgctcagaacagtgcctggtctgaatcaagttctccatccatagccactgtcaaggttaccttgttacacctttagagcaccgaggtgagataggtttgcatgcaggcaaagaaaccaaggtgcacacgcctgccaagatcacatagttcataactagtagataaagccagggctccatgtgcctgacacccttgtaagagtcctttctcctgtctcataggccagggagagagagctcagggtcaaatctccagagctttgaatgcaaaggtcaggggaggtccacagcagtatcagcgaacgtttgccaagcacatgcttctgctggccctaagaacttgcttatgtcctgaacccagaaggggagagaaaagaatgtttcccccctcatcttgttcatggagtaacagagcacctgcatcttgcaggcactgagctcatcccttggtctcgagcagtggttctcaaagtggggtccccaggtcagcagcatcagcagcacctgagacctggctagaaatgtattcgttggctccaccccagacccactgaatcagaaaccccactgggggtggagcccaacatgcatgtgttttaacaagccttccagattattctaatgcatgggcaagattgagaatccctggcctggagatccaggctgcagtgaatcattcagccctgctctgggaccgcaccatccagacatcaccccaagtgtgttacactgagtaacaggtgcagccaggaagcaccagatgtaaatggcattcttataaaccattttgattttcattgcaacaaggcaactggatatttaaagaaacctcacagagaaccatttcatcaggtaaagaatcttctacaaaaagagaaattctctcatttcctccctcccctcagtgttctataaattcagtccctatctcaggttgtcttgaacggcgtgtgcttgtgcacgactaaaaccggtagctagcatgctaaaagagtgacatgtattctccagaatgcacagggacccctgcagctgggaaggagggcccagagcaatgaatggagaccagtctggtgtttgggcagccagtgggcatccactgggcaatctgctggggacttggagaggtttaataacagccaggcatatgtgatttccagggctgtcaagcctccatactctgggtttctcggaaaaggaatggaacgaccgattaggaagtcaagacgtagaaacatgaaatgtgccagccgtcagctgcttctgctggatgaatggataagagggaaaaccctacaacaggttttgggtcgagaacccatctgaaggttgtcatctcccatagcacagggtcagaagggagcgcgtaagtaccactgcatgcgccagcgcagtggcgcagtgacagagatggtgccatgcgctcctgagcttacaacacgtgtttccagagtggtcacagctggcgtggagcctgacctcgtggcttcggtctttgcagggtttagacctcaggtgcactagctcagagttagaggaacgaatagccttctgagtttcttgcatcaggaacctgagagtcttggcaattaaccaagtcagtcaggcactgtaagcagggaagggtggggtggagtcgggggtgcaaatggttggaggtgagatggtagagtctggtcagcagagtcacccagcaaagcgcagcccatctcagttcctctcctgccccttgttaccacggcacaggtctcctgagtcactcttcaggtttgggaagatttgtgggtgttttctttgtaataaacagtgatgccctaggctcaccacctccccaaggcttagtgtcagcaccgggcccccaggacagagcccatactctggattcatgagcccaggctgggtggaatgaagccacttgagaggtcctgggggttgtcactggcaggaaaaaccaagggcttggaattggacactaagggttgaggtcaaatcaaatcaagggagtacatgacaaggtctctcggtgctcaaacacatggtctcttgccgtctgtgaagtccggacagccatgatgtgtagaccccagggtctttttgaccctagggaaggcccagcctcactccaaccacttcttcttatgctgggtgggagaggacacagctaaactgcctacacccacctgggaagggtaaggaggggacctcctcagaaaagtaaattatgcagggaagaaattgattcacataacccctccttacccttccatctccctgagagccagcaacgggcagtgatgtttagccccgaggaaaaattacatgcggaatggaaagcaggcgctcagggtggctcctgctggaatgagagctggagtgcaggctccgtggttcctgggcatgcgggtgtggctcagttctcaccttgcagatggagtgggactgttgacccaggccagcctggggactgcctcctcacctccctgcgcaggctgaccttgtcaccttgcctcttgagcttgcctctctcctgcccagaggtccttggagcaaaatggaggtcgagaggcatttggcactcacgcctcaccacggacactggtgcattcttgggtacctcttggcctcaatctattgctgggggagggaggactgaggcccattgctggggccctgaatgcagggactgtaaccacccatccccttctcagggcacctctcccctctccagcacgcttgctttgctattagtgctacctaatttcctactgaggtggtctagagctcctccgccattgccctgccgccagcaaatttttatccctagggtaagatgacagaggccagccttggccctggcctgccacatactcaggtgtgcactgaggcacagtatctagtttctccaagataggggctgtgacctgtgactaccccacctccggaggggcttgtgagggtctgaggaacgaggaaatgtgagccagcccctcacaagggcacagtacatggtgacagctcctgtgagctgttctcagctaaaagtgcatggtaggactaagggggcactttgcagaagcatttattggggtacccccaaaaagaaaggggggcattccctttctgtggacaacaccctcttgagcttgttttgggatgtctttgatggcccctgagttagagatgatagtgtgaggtggcagggaattttctgggctggggttttagtctggcgtcttatcctgggtccatgcatcctgcccagcctccactgggtgaggcatggccaaaccggtttgggaaacagcactgacaaaactagccctgacggctctgaggttccctggagttcagttcccagggtgagttcacacgcctcgaggctcccagttcccagctcctgacaacccgggcagcccttggggagagggggcgggcgtgcgaggagtgttcctagagggagggacaggctgtaggccctctctcaggccagactggaccacaggacctgagaaggcaggacctgcccagcacagggaagcaggtagggcagggtgagctgggccgggagcctgcttgcagatcccaggccacctgcaccacccaactagccagtcctccctatgcacagggcttcagcttgtgtggggaccgggggtgggggcagcagagacggacagggtcactcgcagcccaagcgccagcagacaactccttttttttcttttctttttttttttttttttggcctttcttacccacaagtgatggtgatagaggtacagggagcagaacatgggaatgatctagaaaactcaggaggagctgaaactcagttcagcttgctactgatggtgctgaggcagcaataccatcagtctgccggagactgagattttcccccaaggaaaacctctctgatgtaggttccaggggtcagctgtcagggtcaccagagtccaactcacaatgccccagaagtgatgttttctataaccaaggagaaggcctagcccctcagcagccccagcagctgagaccacagggtgctccccacccatccactctcctaggaccctgtcaccctcagagtcctgcaagcatcggctgtttgacctcagcgaatccactctactctctgggctttggccttgatcaacggagcagcccaacagggtgagctctctggagccccttccatctgtaatccctgctagcggtgtggagaggcagtccaccccaagtgtgcagacagacagctcaccccatatcacctgcaagattgagaagaagtcatgcaaggtcaagactggcctgcgccctgagaaacgtgaccccacttggaggccagggctgattcagggggccacagacttcagagagcagtgcccaccccctgtcttttacatgtggccagagacgggaggaagttgcccacagtcacacaggaggttcaagaagctggggttggcaccaagtcttaggagtgggaggcaggcaggaggcacagagctgtctcctggggatatgcctgctctcagacatgatgtcacagaattatgggcatgaaagtggggccttcgcgtaccagcagtgggcggggccgttgtcctgtggagtgactgtttgaatcaccccttcttgggcctggatttcccttttgtaaaatacaggtagtgtaatccttggcagggtcctaattgggtcttgggaggtttgaatgaagtaggaagaaccacacggctgggagaaccaaaaggttgtgtgctcccacggcccggttagatcctcatccacagcagggtgagtcgggccagaaggggtgccccatcttacagaagcacacacatggccctgaggctgcactgatggtgcggtggtctcgctagagccaaccctggtctcctggggcccagtagtcactgcccccggtccgaggactgtgagtctctgtggtcatgtgcttcctgtgctatttcctcctgggagatgacccaagagagctggcagggaggaggccccttttcctatttctggggcacccagcagtgacgggtctacaggcaggaagtccagccccagagccccagcctccagccgggcagagtaacaattctgcggctagttctgttctcagggctcatgagtcagaccactcattcctgctttgagtaaatcagccagagtaggaatcctagttcctgcccgtctcccacctccttctggacacagtggaatggggctgaggaggggcttgggctctgcccaccgcccaggcctcctattgtggagaggacagctgcaaagtccccccagcccctgtacccacacactccagaggaggaaggggtctgcctagaccagcctcctggcactgcttggcctgagagcagagtcagaaatgagtgcctgtcggggtggccctgtgagggcctggggtgtctggatgtgggcacagttgggtgctaggggagcacccagtccagtagggaagggggcactgtctgccccagggagcacccagtgtgaaggggtggtgtgaggctgggcactcctgagcatctgcatgattttcttggagatgggtgaaagaaattgtattttatttgagcaattttctacagtacttaggtggagaaatggagcaccctctgcatcccaagggaacatgtatactacagcaacactgctaacagtttattcccatgtaatgctttctacatgcctggtattgtaccaacattctatgtatagtaacttacttaatcctcatggtaatttaggtggtaggtgctacttattatccccattttgcagaagggaaaaccaaagcacagagagctaaagtaacttacccaagatcacacagctgctacgtggctgagctgggatttgaacccaggcagcctggctccagagcttgtgttcttggtcactctgcctcctggaggcaggagacagcatattactgcttttggtttccaggtgggactctggtgtgagatgggccgtctctcacttgtgttgacaaaggggcccttccttcacctcatggttcctcacaccaggccagtgagcaggagaggttcctcttagtgtctgtccattttagagatttgatgaggagtccaggcccgtgttgactcaaacccctgtgtctgctgcactctcccgcccctcccaagccctcaccaccacttcttttctgtgcatggctatagaacttggggtcccagggatattcaggagaccccattgccttgaactcccaggcttccccggtcccaggaccctgtgtttgggagctgaaagaggaggatcagagggtaggggagcacggcctgggcccaggagcagaaggagcagcactatctccagggagccctgggtgagatgctgggaacatctcactaacatgaacagcagcgccggcccctgagcagaggacgaccagggctgtggctggcccccacgctgtatgaactgttgctgctgtgaactgcttgcctcctgttccccgtgactggggtggctgtgcatgtcatgaaacatgtgtcatgtgactcagttgtaggttttatttgaggacagcaccagtctctggacacattcgtgatgagattcctttcagaaccctgtttctgaagctggtttcctgcccccaggaatggggagctgctggtaggtttaaaggccgctgagcgcctggtcacagatgctgctccagttgtccgggtctcagtgtctgtccttccttcccagtcgtctcagcatattgggttatttctagctgtgattcatgtcagtgtgttagtcatctgttggctgcatagcatgtgctaaacgccgtgctgggtgccagggttgtagaagtgaagcccccaaatccgatcgtggccccaggggctcatgctgtcgctacggagcaccatggcattcccctgggtagtgtggcccaagattcgtgtctgcatccatcaagcaactgccatctaccaggccctgtgcagcctctggggatacagattggaaagaggtaatcagaatgcatgggtggaagaagtcctctgaccgcgttgcagagggcaggttggcaggaggcaggtttggagatggagaggaatgacaggatgctgttgtcataattcagaggagaaccggcagggctgcagaaggtgattggattggagcaggcaaggagcaaagggaacagactgcaaagatcatcaggatgtggtgaccagcgggtgggacagggaggggcccgtcttcctgaggcagctcgaggtgctccctgggattctagtggatgtgggagcaggaacttgcgacatgtcagaggggagagtgtgaggaccagtgtgggggcctggctctcctgcccctgactcaacaggcaagcccctgcagctcccatgcccagtctcccccgctgcggagtggcgccactctcactgctgctgctacttcagagggtcttgtgtggccttttgtaagctcatgggatggaagcatctgaaaatgtatcattcatatttttattggaatcatgaatcccacttgccacctgccagggcatggtttgaggatgagagggccctgcttcaagatgctgctgccattgcttcgcaggcctcttcctgggcccctctgagtgctgccccatccctgggggtctcctgggtctcagaagcacccctcccaacacctccccccaacacacacacacacacacacacacacacacacactttctctgttctccagcagccttttagctgctaagatgctctttgatacttaggcctttgtttcattttgcgtgtggcttccccaggctgcagtgtgttcgatgactctcccgcccagccatacatccaggcttctgttcccttctccagatggcctttcatccctcccagcctccccctgcaccccactgctgctgtcatccattcctgaccgccagatcttaccaggagcaagcatcccaggcttctcactgtccgcacctccccttgcctggctccatcaggagcgcctctttccctatggctgctgtggctgcctctgctttcttgctccttttcaagccaagtgcagcctggcgaggaagcctttcccaggtgcccaggtgagcgtacctgctccccgtgacacccgacccgatcgatgctaacaaaggctggtcactcggcctgtctgaacagtacatgtagatccaccctcctcacctggcactcaggcgattcctgaactagggctgcactcctctgcctctcacctcctcatttggtcagccagtcctgggcgtctgtgctgctaggagctacaggtacaggggcaaatacagggcctgtcactgcccctggggagggcacgcctgagcaagccaggaccagctgccccggcatcctcactcaggcctgcctcacccgacatctggtttcattttttccccctaacggacagacagtatgggggctgctggctacaggggagttgctggaaaggtcttggggaagcagatgttgggaagctggctcttcctcggtgccttcctgcctggtccccttctgatcctcagagccagtgcttgttcactcccttttctgttttagatgagtgaccacagggtcactggctagtgttggtgctgccttcgccatagcatccttgggtgcagctggtgcagggcccttagacatatccactgggtcccatttatagaagataccagccctggtcgcacacaccactatttcacatgccactaagaaggaagaatgcgccgccgatcatactatggcacagcgccactggaggacacgtgttgcttgtcagtgatcttggttaagtcacggctggtgtggagtgggaaccctggtgtccccgtggcttcctggagacgctacaaagactagcataggcaacaggagcatgaggtcaactgtcgcttctgctgaggtcaactctcccttctgctggcccctcagggctgctgcttccctgcggatgtggcagtgactatctggatcttatctactaaaagccagggccctagagggggtcatgggagaggctgggtctgggtcttgggctgttctggatcctggggaactgtccccactacccccacaaaagatggccactattgaggggttgctgtgggagtcccatggggtgtcctagggaaagaagaagtaatgccttccctccagggccaccggcgccttgccaccagctgaagcagaggcacagctgcctccaaatggggaattgatttttgcttcctgcatctcagagcaggacactcgatgtcctcattctacccctaggcggctcagaaggaggcagggggaaggggccctgtgcaacatgtgtgccagatgagcacacaggcctgctcatctactcagggcccccaccatctccatgaacttctggagcttcgtgcctgcccaggccctttgtctcaccctctgctatgtgatcagaagcagagatgcaaagtcccaggaccatcctgttgttctcttctctactgagcgaggcagaaacaccaatcgtggtgtaatgagcatatgcagggatttgtgtgcctggctcccctgggcttcatggaggtaacgcggtcccatccatatggctaccctaggagatgaggaaactggggtgcaggaaggttaagtcacttgctcaaggtgtcacacagtaacagacaactgggatcaggtcttgggtgttggtttcaggctatgcctcagcagccttcacagtgttctgggatgcggagttggatatggggttgcagggattggtgagggtccttggccctccgcccaccctgcacacttgctggcttctacttggatatcacaggggttggcttgcaacactaatttacaccccatatccagtgaagcaggcagctcctgttaaacccattttatagatgggaaactggaggaagcaccattagagatgagccttaaagaagtgcaagttctataaggaaagaggcatgaaattgcagggtgtcttgtggggctggcgcatagagaggtgggcctggagcctgctgggcagagggggcttacgaataagagaccaccttctgtctggaaggctctttcttgcctgctacaagcagagcacacacggcgctgagaggctcttcgtgctaactacatgccagacacttttaaacactttgtaggtgttagtgtcattcgatagcacagtaaggctgggctcagtggcttatgcctgtaatccaagtactttgggaggccgaggtgggtggatcacttgaagccaggagttcgaaaccagcctggccaacatggcaaaactccatctctaccaaaaatatatatatatacacacacacaaaattagccaggcgtgatggtgcacaactgtagtcccagctactcgggatgctgaggcacaagaatcgcttgaatccgggaggcagatgttgcagtgagccaagatcgcaccactgcactccagcctgggtgacagaacaagactgtctcaaaaaaaaaagaaaaaaaatagcacaataaccctaaagagtaagcattaacatttggcagataaaccgaagcccagagagattgtactgtttgcctaaggtcacgtaggtgtgaagggaatgaggtttcgaatcgaatccagactttcggagtcccttaccctgaaccacagggttgtagctgccagctgaggtcaggagagatgagcgccaaggcgtcctcccagcctgcggagctttgcacgtcatcttaagtggtttggactcagcagtgggggccatgtgcggtttcagcaggagtgctagcctcgcctgcttcaccgcagtacctccagaacacacaaggtgctcagcagccagttgttgaatgaacgttgggtgagtgatagaacaccttggtactgtaggttagaatggatcgaggtgagggagtctggtcacaaggatgcagtttggagaggtgaggggagctcagtgggttcactttagacgagttgggtggtgcgtgcttttacgttttacgctgagacatttgaggagtgcttggaagtctggattaaggctcagcattggcagttcgagtctgggatgattccctgctgctgtcccagccccagctgtggtcaccatgaggtgagctggaaggccccaaggtcctcggcaccagcccctggacaggctggagaggatgacaggggatggggcttggtgaggagcctgagagcccagtttctggggtgcctgtacccagctcagcacctgcttgataagaacctggtgccttgggtgatgggggagaggggatttgtttaggggtcagaagcagtgcatttgcaggtggttgtgcctctatttctcctcccccaaagaaggctgttacccatcagagatcttgctggaggagagggggcagtgggtactgccatagctgtactgtcagcttggctgacggggggtggtcccatgggcctctgtggccagctctgcaggccccctcctgaccctaaccccctttctgtggctgaacctctgctcccaacagcccctcctgcttcttggtttcttttttctttctttctttctttcctttttggaggggaatggagtcttgctgtgttgcccaggctggagggcagtgacgcgatctcagatcactgcagcctccacctcccgaggtcaagcaattctgctcagcctcccgagtagctgagattagaggcgctggctaccacacctggctaatttttgtatttttagtagagacagcatttcattatattggcaaggttagtctcgaactcctgacctcaagtgatctgcccgcctcagcctcccaaactgctgtgattacaggtgtgagccatcacgcccagcccctgcttcttggtttctgacaggcagaaggcctccccatgttgacaccccagattggaaggggcccaaaaagtttgcagggtggagctacaattcctctccacgccccttggcaggctttggagtatctcactgccaattgcttagccccttggagggtggccgtgggtctaatggcattcattgacagctgtgcaagtgatgtgtacgtgggcctcccgccgtgggagcaccaggcaggaggccaatcgtcacccgtctgtgggagagaggcagtcacatgtactggccaaggctgtcctgggcccaagcgagctgcattttatgaagggggaaagggacattgggtcctagctgccattttaatttgaaaattggggacctctgtgtaaaaaggggcctttggggccagctctcttaaccactggtaagtggggcccacaggacaagggacaggctggccatgttggttgcttaggcagtagaaggcactcttgaccctgcctgcagcacagaggggctcaggtcaggactgacactgccctcccattgcctggtatgctctgcgcacaccacaccaggtcctcccgtctctcccactcaccctgggactgtttttgccattctagcaagtgcacagaccaaaggcacgcaggtcaaagaagcatgcaggccagccccgcctaattagagcagacagacttcccagtccagatgtgtgagtgactggccaggcgcacccagacacccgcccagctggtgtcactctgtctgtccttgcgtaatcccctgcctgcctctgtctgtccctgtcagccctcctggttctctcgacagtgcccagactctctttttggctgcgaattcccgggtgttgtcattaacccacgtttgcctcagaacaacttgtgttggtttgcaccataaggagaacacgcacaacatccactgccccgcatgcggctgccagcgtggcctctgtgctcaccggcctcgggggtgaggggtggtgactccccatccccccaccacctcttggttgtaagaaagtggcctttgtggctggctgatccacatatcacgcctgtttgcggcatgccagactgtacagcaaggccctgtcacgcagccagcctgcctttattccctttatggaaaccactccactaggggcaggaggacaagggctgtccttggctgagcagggggtggcccgtgacattggaggaaagccctgattcccctgtggtgcctccgccccctgcatggcaggccagcccccaggaggagcgagggctgcgaggggtggggcgggcagcaggcggcaccatctgtggccgtcctttgtgctggcagtggagtgatccctccgtcactgcgatccagcgggcctcgtgcttggcgtgcaaatgagtttccagatgcccagtgcccccgcacaagaggcggtacctaggggcctgggagaaggatggagtgggctggaggctcgtttttgtgtgtcctggcctgcccgaataggctgcctttccagctgtagcacatgtgtgctggacacccacataggggtgtttgttggtttctgtgcagacacacatgacagaggagagtgtctcttctctcatactgtcctccttttgagggtggtggcaaggtgaccccacggaggggggcaggacacatcttttaagacttagctcatccaccaggccccctcctggagggagaaacagggcccctcttggggaccacagcccctgcttgccttcttggttgggcatctttgtgtaccacacaagctgagcagatggagcaagcagctctggcgacttctcggggctttgggctgacgggaaccccgtccaggatctgggcggcttgggatggcagcctgcccagccactcccggtcactgtgcctatgggtgtcttccaccagtgccggccaaacgtggtggcgtacaagaggcctgaggggttccttattgagtcagaggggctggggagctgtgaacacctaggattttgccttctgaaggctttcacctcctccccaccttctggtccagcctcaggctctaccaccagggcatggggccaggagcaggagcactgtctctgtccctgctgactctggctgtggttactgtgagtagctttgcctgactgggcccccgtctactcatctgtagaatgaggataataatagctaatgatgtcctagatggtcaagaaaaaaaaaggatgcagaagcacgttgtgcagcatccagatgggagacccttgaaatgtggagtcggctttgcacccagccaagtggctgagcagttatgattcaaaatatgcctggccactcttgcccatcgactacttccataacgctcaggtcactcccagcaggagtaggacatcagctgaggtgtggccaccctttgtccagcattccacagacccagcaggcccccatccgtccctccctgcagcctgggaggaaggcaggacacgaggcattactcctttttacctctaagcaaactgaggcccagagagtctgtgggctcctgaagtcaaacagcaagatggtgactgagcgcagccagttccccagccctcagcgtcctcatgtacttcaggaggacaggccagctgagacacgatggacagcccaggctgagacacgctggcctgggaggcgcttttggctcctgtggccacgtggggacagtgaacagtgaaagaaaatggaagttttccccagtccccagttcatgtggggctctcttatcccggatgtggatggctgctctgtgctcctgccttgggcacccctggctgcctcctgcttggccccccaccaccctggccaccctctgctctggacatcctttgtcttcctaggcatttgtgcccagcagagcagggaccaaccgtgggtgtgaccagaaggtgtgtgctagggggccagtttctgggcaggagtttcagggacagccctgcagacactcctaggttgtcagcagattccaagattttgttcaaaccttgtgatgtttgagcccacccatggggagaagccacgctttgcctctgatcgaagtgtgagggagtgagcttccctgagggggatctggggtggtgggcagctgctaagcttgccctgactcaaggtctgtgtcaggccccctcactcctccagtttccacttggcaccatctctgccacccttcccatcatcctgactctccccctctttgcctccacggaccactacttcctgcacgcgggccattctgaccccctcttcatgacagaaacttttgtatcctccttcaagggtgtcagtcccatcttacagttgagaatactgaggcctcccaagagggctgagtaagtcttctggcgtcacacgaatctgggagcaaaaccagcatggatagcacccagtctggggagagttgggggggggtcttggtgtggcagagcatgatgaacaagcacccactgactgtcctgtccttcctgcagccttgttgtcctcctggtgcgaagagctcggccgcctgctgctgctccgacatcagaagagccgccagagcgatccccctgggaaactccccatgcagccccctctcagctccatgagctccatgaaacccactctgtcgcacaggtaagtgggtgggtgccatgggtgcaggtactgagcagacacccctctggtctcagatctccttggacatgtccctggggtgggggcctctgtgcaaccatgaggatgttgcattttctaaggtgcagttgtttttttacatcttcgtgggtgagccctgtttctccctctcaaacaggttgaaagcactgagtttgtcactttggtggaggctgtttttcttcaggttctaggcttctggcagaacgttagaaattctgagctcagcaccttccctctttcttgaccagggtattgggcaaacccagagaaaccaggggctgacagggatctcaggaaggccacggggttggtggttccagccaagatggggacagagccagcccaggccagccaccctggagccaagtaagactgggctgggtccaccagaagcccagggtcacaggcaggcatgggcttgctggaggccgacagcaccgagggattgtccagtccacctgtgccagcctcagaaggagcacgtggccaggactggcaattcccccagttaattatcttttgagtcccttgctgagctggggatgctctctctgagcgctctgcaggctgaccctgcaacaacagggcctgtcatgctgtctgctctcccctgtgtgtgtctccgctaatgatcaggagggtcatttgcagtcagagctcggctctcattatccagcctgactgagggacccgcagcccagagcacactgcaggcagacctgggtcgcaccatcgaggtgctgctgggaactcgggtgtcagccacgctttataaatcgaattagaggcttgttgactttctgagctggaaaggaccttagtgctcatcatgtccagtgccctccctgggcctgattgcccctgacatgtggttgcctgccttggtcataagccctttgtaccatcgcaagcccaccaccacccaagggcactgcctcctcagatcctgggtctggctgctgagcagctccaagcttctcttctgtagcagtgttccttagtgcatttacacagggtagtttttctttttattattattatttattattattattattttaattcttttttttaattttttttagtatttattgatcattcttgggtgtttctcggagagggggatttggcagggtcataggacaatagtgcagggaaggtcagcagataaacacgtgaacaaaggtctctggttttcctaggcagagggtcctgccgccctccgcagtgtttgtgtccctgggtacttgagattagggagtggtgatgactcttaacgagcatgctgccttcaagcatctgtttaacaaagcacatcttgcaccgcccttaatccatttaacccttagtggacacagcacatgtttcagagagcacggggttgggggtaaggttatagattaacagcatcccaaggcagaagaatttttcttagtacagaacaaaatggagtctcctatgtctacttctttctacacagacacagtaacaatctgatctctctttcttttccccacatttcccccttttctattcgacaaaaccaccatcatcatcatggcccgttctcaatgagctgttgggtacacctcccagacagggtggtggcggggcagaggggctcctcacttcccagacggggtggccgggcagaggcgccacccacgtcccagacggggcggcggccgggcgggggctgccccccacctccaggacggggcagctggccggacaggggctgccccccacctcccggacggggcggctggccggacgggggctgcccccgacctcccggacggggcagctgccagggggaggggctcctcacttcccggacggggcggctgccgggcggtggggctcctcacttctcagactgggcggccggtcagagacgctcctcacctcccagatggggtggtggcggggcagagacactcctcagttcccagacggggtcgcggccgggcagaggtgctcttcacatctcagacggggtggcggggcagaggcgctccccacatcccagacgatgggcagctgggcagagacgctcctcacttcctagacgggatgtcagccgggaagaggcgctcctcacttcccagactgggcggccgggcagaggggctcctcacatcccagatgatgggcggccaggcagagacgctcctcacttcctagacagggtggcggctgggcagaggctgcaatctcggcactttgggaggccaaggcaggcagctgggaggtggagattgtagcgagccgagatcacgccactgcactccagcctgggcaacattgagcactgagtgagcgagactccgtctgcaatccggcaccttgggaggctgaggctggcagatcactcacggtcaggagctggagaccagcctggccaacacggcgaaaccccgtctccaccaaaaaataggaaaaccagtcaggcatggtggcacgcgcctgcaatcccaggcactcggcaggctgaggcaggagaatcaggcagggaggttgcagtgagccgagatggcggcagtacagtccagcctcggctaggtatcagagggagagaccgtgcaaaggggagagggggagggagaggggtattattattactttttttttttttttggacaagatctggttctgtcacccaggctgtagtacagtggcgcaatctcggctgactgcaagctccgcccctgggctcaagtgatcctcccatctcagccttccaagtagctgggaccacaggcattcaccaccacccatggctaattttttgtatttttagtagagatggcattgcccaggctggtctcgaactcctaagctcaaggaatctgcctgcctcagcctcccaaagtactgggattataggcatgaaccaccatgccggcctattattatttttaaaagacagggtctcaccctgttggacaagctggaatgcagtggcactatcatagctcactgcagcctcgacctccttggctcaagcgattctcccacctcagtatcctgagtagctggaagcatagccatgcaccactacacctggctatttctttatagttttgtggagatagggtctcgctatgttgcccaggctggtttcgaactcctgggctcaaacaatcctaccaccttggcctcccaacgtgctgggattacaggcatgcaccactacacctgtctgacacaggggtaatttttcttggtgcaggactttgcagggcatttggcgtcttggtccctacccactctgttctttttttttttttttaatgcccacgcttggttaatcccaccccattcttctgatgactgccctcttcccctaagcattatcacaataaaagtaccctcccacatttgagtctcacctttggttaaggaccgctgctctaaaaagacaaaacctgcctccacctccctctgtgtaccctttgctaaaagccacagtttgtcttcatctgaaccaagccgctgagcacaggctgcagctgcatttcacttaagcagcataccttgcagttgccctcgggaagctttaccttattaattctaactcagccgtccatccctccagaatcatcctcctctcatcatcctatgtgtcatgaccttcccaagcttctctcctccaagttattttagtaaagttgttgcttatggtgggccagagccctgcagctccccactagggaccagcctcagacctgcttgaccgtgattgttcaggtcacagagtgccacaaatctggatctcggccagccctttgccagctgagttgagctaaggcatgaggttgttcggtcccggggttaaacagagatgaggtatttctgtgctcgaggagcagcctcaagctagttggggaaataagactcactggggccacgttggaatctggcagagcagggcaggactagggttcattgacaggcagactgggctttggggttcagatggaggaagatggacagggctgactgtcaggaggctgcccagaggatgggagtcttgaacttgaaggacttcggctgggaggggtagttgcattctatgaattcaagctggctttcccaagaaatgttatgggccgaagagccactggccagcacccagtgccctgctgcctccatcaccatggcctcagctctctgtaagtccagcagaatgacctagaatgcaaagccagtggtctgagagcttgaagaccaggctggcacttactctttgggccataagtggtctgtcagagaaaggaaagctgtgtgggctggaagactcgctgagtactggtggctaaccagtcggttccgtggagcgaggcttcctcgtgggagcacagggaggtggagggcctgctagacaacatcccacactttgaatggcagaactggaaggaaaattgggcccagagtaggaaagtgaattgccccagaacacacagccagtaaagggcagaggaagatattaaacagcgcacagggctgtgctatttagctggtccttcagggtcaacgaggtggtatctcgttgttaacccaatttggagggtctttttagaagagggtcatctgttctgatccacagctcacctttttcccatttaatagcccgtgttccttctccaagccccaggctattctgaggacacgttgtggttaggcaattgaaagttacacagtctctccttgcaacctttaggaatttcacaaaggataaatccctcatttccagggaaactgcaacggggtccaacacctcataagtcctcagtgcaatttcccaaacaagacggaaagaaaatggaagagaaagctgagcgctttcacaattagcaaactgttttagtccgtcatcctccataattttattgaatggcttggaggcaggaagctctttttgccttttcattaaggcgacattgagctggaggtgagcttgggtgagctgggacagttgagatttgatgcccgcaggtatctggctgtttgaaggctctgggtctttgtctgaaggctctgaggacgaacaaatgggagaggatgagggagcctggacacttgcagccccgccctgccccgagggacggcagacgcctggagggtccctggtgactgtcatatttggagagctcgggtgtcacaatcatgtctgctgcaggctgcagagctttggcactgcggcatgaggctgtgagtcagggcctgctttcttccacacaaatgctgtgcctcccagcaagacccttgacctcttggcctcgtggttccctgctgatgggggacatggtgccgcatgagcaggatgtcaggaaagggtcaggctgccatagccccgcagctatatctgggggtaagggtggtgacgaggaatactaattatcctcagtttgtggacgtctgtaggctcactccctgttttgtcctcatcactggctgcagtggggctgccgtctatactcacagatacccaggatactatacaagagaaggtggccagagaggcctggcaaggtccaggaccagtgcctgggcaagtagggcaccttccaagtccctgcagtgacctggacttgaagccagtgaagtctttcaacctccttcttccagatttttaatgagtggtttaaaaagccatttgtgattagcacattgtccttatgcagatcagtgttgcaaaggtaattaaaggcctaataaatcttgtttatgctgttaatttgattacagtcaaaactcgctagggctggggaagcctccaagattgagaggtgccttcctccttcttataggtgcgggatttatgaaccccaacagagaggcttctgggcgggagggcccctggcatcccctgagtatagcaggtcggggaacaggccctggagccaggctgctgggccttgagtttcagctgggccatattctagctgggtaactggccagttacttaccctccttgtgcctcggtttcctcatctgtagaaggggagtgacaacagtggcaggagtggtgtgcttgtcgccaagcctggcacactgggagcccatggaccagtcattattcccctgatcctcagccaggtgccatcaaattcttaagtgcttattcatggccaaacaagaaagaagggggcaatcaaaaccagccacatcacaccatctccacagctgccatttttagctcggttttgcatagcttcaccaaagctcagtttatgttagggctttgttgccccaagaacattttaaaaacaaaaaaagaaggaaaggggagaattgaaagacccataaatccctgcaccatcagttccagatggccaagatgcaaaggattttttcctttcctccttcctactgaaaaagttttaacaccctctaatatgcagttagctgcacaagttcctaagtttcaccgcagggagggaaggaagtaggccccagtaattgtgatgatggagaacactgttaatggttcccctaaattaaacagggtgggagcttcagctcctcactggcttggcatttcattagcagtaacactacagccttgcacggagacgggaccagtatggctggatcagggaaattaattagagtctgacaatacccttaatggaaattggttatttctcccaaataaagcagctattacaagtgcaagggaagaaataactcagccctccccccgcgttcctttcatgaatgtgtgtgtagatgctgccatagcgggtgcacaggagccaggaatcatcactgccttatcccaggccttgctcattttctcacattcagcaaaacctcgatcattgcccgtggagctggcacagacatgtaaactgtctactgtgactgcagtgcagagagctctctataaaatacgtgaaaaaagtgctgagggaacagaggaaagtgtccttggttctgcttaggagggtccttaaagggagtatgcaggctgggctttgaagtatggatagaagtttgctggctggtgaagggaaggcagaagaaaaatgaagaaagtctcagaggcttgagaagcacattttttctagttgacaggtaggaatgaaaacggctcctcccattggtagcatatttgaaaaattcctaggccactttcattgtatcctgaagtaaacaggggtagctgtgtatggctggttggaggactggagagaaaggtgtaagtacagttgagcagggtctttctaccaggttctgtgctaaactttacttttttctcatgtttcttaggaaagtgttagtcccactttacagatgagaaagttgaggctgactgaaagtaacatgtccaaggccacagaaagcttcagtggcagagccagggtttgacccggaagactgtaactccagagcccacatagggaacctctctcctgctgggcctccctctgtcggctgaatattaacctcaaaaaggggtccctgaatctttgccaacacggccagtacaagctaaagcagacgatttagtgtataaagaaattctttcctggaagactatttgggttttctctgcagctgggctttgaggcccatctttacatttcccctgtcccttcgtgctaggcgacttccccaagaacccccaggaagatgcagcccttcttggaattcttgtggcttctaggtggcctctgcagtgtgctcccttgcctcgtggccatctctggagaggggagcgttgccttgctggatcctaagttcctaagacagtggtgagcctgatacggtctggtgacccggcagccttgcccttgattggctctgctacctctgtgagccccagcttctaagatgggcatctgttgggcccacttaatggggcactgaatgagttcttaggtgaaggccacttcacaaaattccttgcatctagaagtcactcagtaaatcagaacaacagtaacagcggcagccagcagtttcagggtgtccaaggtgtgcgggactctgggcctcatacatgttaggcacttacacttaaccctcacggcagccttcgaagggaggggctgaatcagccccatttcatagatgaggttgctgaggcatacagagagtgagcagtggtttcatcgcttccctctgtgtccttctctcactttctgggccccagtggccatgtggccacagacacactgtgtaggtggtcggtcatcaggcttaacgaaatggacatattcattttcagcatcactccaagggtgagtgcagagaggtggtttctccctggcacatttttttgtttagcaaaggtttcctgagccctattggtgtgtgaagacatcatgcttggctcagggagcccaagaaatcagtgacagctcctgaggcagaagggagaaggcagagggttctcactcttgccaggaatgcgaagagccagtggagttcagtaccttctgcaagggcttcccggaggaggtggcctttggaagagcctggaaaggatgaatggcattttcaaggtgggatggaacttgccagcctgagaagaggcacagaggcccctgtattagggagcagttggcaaatggaaccgttgctgctgacattgcagatggcttctggccttggtgcttctgtgggtggagcaggattgttggggccgttttggctggacaggactgtggctgggagcagcttatggtgtgatactgggcaggccatgctggattagggttgtacagagtgggacagaattattaaaaaatgccaagcacctgtgaccaggtgaagcaagtctgcaggttaaactgtgctcgtcggagagaagaagggctctcaggcaccctccagaccctcctcccatcccagccaggccatgcctttctggtagcagcccaggggtctgcttggtccttcatccttgggaacagggaccaggcattcccccggtggtggtatcttgagtctaggcagtggcgtcacatcagcagggctgctgtgggggcctgcgggggcgagagccttctctgcgacagcaggagcccgtctcccccagaatgagatgagtcacggtcctgtcggtgcggctgccacttctgcttctgcagcaggtgcgtgtggaggcaagctagtcctgagactgccccacacgctgtgcctgtctcttccccagtgcacgggcagcatgccagcagggcctcgcgtgtgtgcacggatgtgtcctccatatgcctgcgtgcatctttgctctggggcggcaaaccttccagccaggcagtgggatggccagtttgggaacgttggttagctttgcttctcaccaagtttggggcagaggggacaaaacaggaaggagctggtttccgcccacaaggctcacccacggagctgcagggcagttgggagcttgttcgtgggcctgtgtagcgtcctgggctgaggtgatgaggcagcagttgcccactccctggccacaggcagggccctgccggcccctggggcctcccatgggggttcatttcctgagcctggccaggcatgttctcaaaggataggaacttccgtctcaaggccatcagcctggagggttggtgggaacttgtggggcagaagttctggggcgagaagccactcaggcttgggttttgttcagatgtaggggaccccctctggtcatccagcacacctaggacatgggccttgaggacagcaggtgtccaggggatctcctctttgttttgtaaaagcgtgacctgtagagcctccctgtgagactctggtgtgccagtctggaaccaggtggtgtgccgggtccccagtgacctccctgggagacagaggctgttccagcccagccttcctgaggagcaggctcatggctactttcctgtgtttctctgcactgcccactccctctgggctcccagtctccaatccgccacctggagagcagagtctgtcgctatctgtcacctttggcccaagcatctggatcttcaacaagccactacccatcattgtgcctggccaactgagtgccctgagtacagctcctctactccaaatgcgagtcctgcagtttccccagaaatcacgagcagcgctcagttgggaaagccctttgactgcattctcctctttgagccacatcagatttaggctgctgaacctgtgttcaaacctatttgaccaagatccacgataaatacacatacgacaccttgacccaaggtgcacatgtatttgtgtataaaaccaagacagaagctcaaggactaatcttcatctttattgtgtgctcacactccatcactttctagttgatgcttttttctcccctgctggttggatgtcatcacctgctcagattctgtaacccacagttggaaaacacagagtagagtggggaggtatcatctgatgcccattttacagatgaggagattgagtgaggaaacttgcaccagggtcctaagcacaaaagtctctgccgtcacagagctgttctagaggcagacagacaataatcaaaaaaatatataattaggacagtggtggagtgctatgaaaaaaattccagtgccagggtgagggggcaggcagtgtcgggtaggagctgcttttttatacgaggagggcgggggaggcccctccagcgatctcagacaggaagaaagcgaggggctggccaggctgagaaatctagggcagagggtatccaggcaggggaggggcaagtatgagcagacagtggtgtggtcctgccctccaggctggtcgcctctgcaggagcccgtcagacttgaccagcattgccaagagctcagccgggcaaggcacagagcacaagacttggctgccctgatctccgctgcctgcgggtcatgcagccctccgcctccctctgggaagtcctcacctctgggctgggctccttgcatccccagaggtgcctcctcagcacctccatccccagttgccctggctgctagggttggactggccactcagctagggtacaagtctgccaggtgtgactgagaacctttgccatttgctgtctcctgtgactaagacagacacaagccagacagaggcatgaggctctttcctgttgcccggcccttctcccaatttccctcccccaacacacatacgcacacacacatacacacacacacaccctgtgccctgggtagaggcagtggcacagctgtgggcgctttgcttttctgctcttcctggttccacatctagaattttgtgacttggtgagggggtggtgccagagagccagtgccggctctggtgggagaggcagcttcatccccagcctcctgggggctggcaccctggcaggtcttcatgccctgccccttcgctgggatctgctggcctcactcttgtgcaccccagcagtcggtaggaagcatcactggacactcactgtagacctaagcacaagaggtggggctgaaggctaactccttgcttctgatacgtgagagctccttggggagatgtccacaaacgtggtgggtactgctggacctggtgaggggaggaggggaaatatggtccgggttggtagagaggaggcagtgtttaggggcaggggcagctccacgagaggacagagccaaagcggggtgagggaatggtggggtccgccagaggagtaagtcattcttaagtgtgtgtttggactctgccttataaatgctggaagccaccaaaggtctttgattgtgccaggcatcttaggtgtttgagggagattagcttggggaaaatgtacatgagagatcggggtgggggcaggagagggtgtgcagcaggtaggcctgtacccacattgctgggggctgggaaggaagggtgccggaagaaagcctgcattcccatggcccaggcagccaggctgctgtgaagggctgggaggtagagggaagggctgacaccctcagactcggacccttccagcctgtactgagaagggaccaagcagttccaagggtaaggtggtttgggggagcccaggctcttcctaaagggcaacgtggagtcagagcccgggtgaaggaggagctcagattgggcctcaggtcacaccacttcatcagttgcatgacctgtggactcggggatacagggagacacacagccatggaagtagctctctgcagtgatcgggggaaaggtggccacttctgaacagcctgtcaccatgcagggcacactgttgtgcactgggcactgagacaggcctggggggtccagtaccgactcggatgggggttaccttggactgactgggagctgcggtcacttggtggggtgatgggcatggcctgtcttgagtctgtgcctgccaggccctgaagatctccctctgtctccctctgcagtgatgggtcgttcccctatgactctgtcccttggcagcagaacaccaaccagcctcccggctccctttccgtggtcaccacggtttggggagtaaccaacacatcccagagccaggtaagagcctatactgccctcagccacagctctttctaggcgggagtgtcccttgacccctggagccataccagccctcttcaccctcacaggccttgccctgctggaaagaccagcttccagggcacacccagctgtggacacgtctccacccctggcaggctctgcacccgcctcaggagggcagcctctatggactgtccccatcctaaggcctttctggaggaatggcattcatctgacagacagcaaggggttcttccctagcccatttgctctggtaaacaggagaacttcctctgtgttactggcttcagggctccaaggtctgaggtctctgaccctggatgtatggcctgagttggatttcatcaaaatattgtgccttggacttctgacaactccctactccccattgccctagtcagacccacctccctctcattccttcctctctcttccactcctcctctgcccagtcagggagtctcccacctgtctgacctctgccagccttttctgtggctacatggaaggctcagggctgcttgtcaccctggagggagccactgggctgaccggttgtcgcctgctcctgctgccctccagagctagcagggtgggttcctcttggccctcacagagcagcagccaggggccttggggcccctgtgtgacaagacgctggcatccaggctcgtttgtggggcagtaggcttcatggccagggctctccccacgggtacctggtacaagagcagcctcttctcccttcactgggctgcgcagcccctggggaccgcttgaactggctttgtggggcttggtcataccctcagcttgttccatcacaaggctgacgttctcatcccccacgccacctgccgcccaggcccgctccttatcaccggtacactcagaatagttcatccaccctccatttttttcctcctccctgttgtcctgcctccactttgttctttctccctttcccctcttcatttatccctcttcctctccacactgcctcgggtagcaccttaggtgacaaccacttctctgcccacaggtccttgggaaccctatggccaatgccaacaaccccatgaatccaggcggcaaccccatggcgtcgggcatgaccaccagcaacccaggcctcaactccccacagtttgcggggcagcagcagcagttctcagccaaggctggccccgctcagccctacatccagcagagcatgtatggccggcccaactaccccggcagcgggggctttggggccaggtgagcagggctgacctgtggcagaagccatggacgccacccctcttcctccttccagtggggagggacccacttaaatcccagctccacgctttctgccctgagaagttatcctctgttgttacatgagttgaaggggctcagtcatccctggctcccagggctggcctgcagataaggcgctgcagcagttggcctgtgttctgacagtcgtcagactcgtagaaatagagaggtgacattcttactcctcaaaacctcaaaacaacccttctctaaattttgtctttaatgaataggaaaatattgagaaaatctggattgggaaagtcgaagagcaggtatagatggggtccagttgcccaaagacagtgaagcagtctgggaatatctgctctgccttgctgattggtgaaagcagaactatgcagagactgcgagtcccttggctgggaagaaaagggcagggactcccaggatatggagctctggggagtggtgtgaggcgagcagaggtgcccattctcctctttccaccccgccctgcctaagacccccaccttggcctcagccctcaccagccctggctgggtttctggcctggggttggcacagctatatgacctggtggttaaacacagggatcagaaacacctgcagctgcagccgcagctccgccatcaatgctgcagggccttgggcaagttgctcaggttctctgagactcagtgtccttcagaagatgggctcaccagggccccgacagcatgcagtgagggtgcaggcacccccaagggctccaggagcacagcagcctggtcgttgccaagtggcacaaatgaatggctgccaatcccaagaggccccgtcccctctaggttctgggtacagctccatcatctcccttccagcccacagcttgccctcagttcccctcagatgcaggcagtacctaactcttccacccttctccccctgcagttaccctgggggtcctaacgcccccgcaggcatgggcatccctccgcacaccaggccgcctgctgacttcactcagcccgcggcagccgctgcagcagcggcagtggcagcagcagcagccacagctacagccacagccacggccactgtggcagccctgcaggagacacagaacaaggatataaaccagtatggaccggtaagggttcccactaatcctggtccagccttgcccagccagccaggcagacagccctgggaaaccagagttgggatgtcagtgcttatggggccatgtgtgctgggagagctgactgcattagggtgcatttgggctttcatggaagcatgtggaggtctgtgtgtttagaatggcgcatgtctagaatggggcgtgtcagtgtgcttgggtgtggtggggtgtatgggtgctggtgtttgttctgtgtgttggtggctcatgtacaactgcatatggggaaaaggttctacatggctctctgggcccccaactcaccaaggagtgggctcaatgtctaaaaatagtcttgtgaccggtctgtctcctggattgcctctgagaccagtgccctcctagtcaccctatctgtgggtctgcgcaggccccagtgctgctccctgaccttctgaaggatgggttaggggatgaggagaggggagcccccataggaatgcagaacaggaggtgaggaggtgggaactgcagggcagaggggcagaagtggaagctgggctgaggccaactttggggatggagggtgtgcctccactggcccaggaccaagggcagggccagggcttccaggaaaggggctgcagtctcactcgggctcctgcctccaccctcatctacctccaccctcccatacccctccctgtccctgcacactttcctggttttctgcctgcctccctccctggaaatgctgcctgtgcatcggagtgaccacctcaccccaccccaccccatcccctaacacccctgagctgcatctctcctgtgcggctgcagagggcagcagtgagcctgggtggatcctgctcccctggggcctggttggtcaccagtcactgccgcacaggacagtgccccctccccactcctccacctccccaacccttccctccctgcactttcaatgcatgtggcattttattcttttttttttcttctcccgttgaaggtctgttcctctttccagatgggtcccacccaggcgtataacagccaattcatgaaccagcccgggccgcgggggcctgcctccatggggggcagcatgaaccccgcgagcatggcggctggcatgacgccctcggggatgagcggccctcccatgggcatgaaccagccccggccgcccggcatcagcccctttggcacacacgggcagcggatgccccagcagacctacccgggcccccggccccagtcccttcctattcagaacataaagaggccataccctggagaggtgagtgcagcagtgggagcctgggaggtgggaactgggacacctgggcttgaagacatgggccgtgggtacggctttggaaggggtgtggcttggactccagcacacttggacaaagaggcaggggcttaggggtcaggtgctcctgggtttgagacctggttctgctgtttcccaactgaaagacctcgagccagtcaccctgcctcctagggctgcttgagggacttgaggaggtgtccgtgaagtgcttggccctgggctggcatgtgccgccactcagcaagcagcagttcctcttactgtagtgactcttgtcttggctcagccactaactgggtgacctgggtttagttcctcctgcccacatgagagcttccccaactcctctccaagaaagagagctgagacaaaatgcttccagtctataagggctgacccgtccgggaagtgactggaaggcaggcagcgtgtttccagtctgtaaggattgacctgttggggaagtgactggaaggcagagagcgtgtttccaatctataaggactgacccgttggggaagtgactggaaggccggcagctgtttccagtctataaggactgacccgtcagggaagtgactggaaggcagacagcgtgtttcttagctcttgtttccatccacacttggtcactgtataggaagtggcactgcctcttgggctgcacagccagctcagccaaggtgttggggaagatttggggaagtaaaacccacacctcctgccctctgggaagtgaggttttagcaggaaagaaaagtttttagcagagactcaccagggaatgaagcatagcagactgcacagaactcaatatgagtcagagaaggcaggcttcctggagggtgtgtcacaagtaaatcctcagaaaatgatgctggcagcagctggcccatctgggtacccaggtaaggatttagtttacctgcagaagacgtagggacgtggctctgcagatgcccctcgtgaagccctggttgctccccacgaccaagcccctttttgagcagggtgtgcccagctctctgcctgcctccctcccagcttgcatgcccactctcagagcagttttctcctcctagctcctctcagctctgtggccttcaccttgggttcacagcggctttagattccaaagaccttaagttccttgaagatctgcacatttcccctcagtatccaccttaggatgggcggggaggcttggcaacaagtggaggtattctgagttcaggaggggagagagaggggggggggtcaggggcttcctcatgcatccaagaagctggatcaagccccaaccctccacctggtggacactagttcagggaggggccagagaaggaccattggctcctgggtcctgagtttgggggagcctcaagctattggcacctctcctggcactcaggccccatgcagtttctaggccttttctcagccaccctgtgctcaaaatcccagtgtcccactggctgtgctgggggtgcatctgttagcccacgccaaaggaggcaatctcggatgaggcttcagcagaattcctggtcattggtgtcacccctgcacctgcacctgtgccatgcttatggctcttgcctgcctaaagagagcacaccaaaggctctccatatttttactaaattaatcatccttttcatagagtgctgctgctacccagctacagcactgggtggtcacagcctatgcggcctgatcctgtctggaagactggccttccttccccttgccatggcttgttcatacaatatttgaattgttggagccttaggacaggggttgggtcatctggtcccacagaggactctcttctctagcttggtgggcaggtaggcaccagctacgtcttctatacctcctgtggtgggtgcctcactgtcacccagagcagccaccatgttgcaacaacgtgagttgtagattcttccacactgacactttctgacatttatccctaagtccatcattcgtttgttgagcaagtattaagggtattttcccaggcactggggcacagccaccaacaggacctctgggcaagagagacactcagatggggaagaagaaaccactgactcacaggatgtcatgtggccgtgagggtcacctgattttccagacagggaaggtggctggagggtggtgctctctcctcttctctaaattgtctgtcccgggagaagttgtcttgttccttcaccaacctggctctcccacctcctgcacaggtggcaggttgtcgatggcccagaactgaacactaggtgtgtgttctgctctgaggggagtacgaggacaatgccacccaagttcagccttggaatgcaggggcacagggggctcctttctggaattgcatcctgttgactgtgttcctctgtcacattggggtacacattggggagcacagccctaacccaggcaccaggagagacacaaaggtcgggggagttagaatcaggcccctcataatggtgtgagcaagaggctctgaaagtgtccctggagttcaggggcacatgtgctccaggaagaacggcctcaaggggaggtggcctatgatctggacaggcagaacaaaatgcccctggatgtcaggacgagaaggggcccaaagcattatctggttttgtgggtgggaaacagcaggagcaaatgaggagaggcgggccccatcccgttgttcaggtgacctggctatgtgacgttggcaacattgaacgtgtttcccctctcctttctctcccaccacagcccaactatggaaaccagcaatatggaccaaacagccagttccccacccagccaggccagtacccagcccccaaccccccgaggccactcacctcccccaactacccaggacagaggatgcccagccagccgagctccgggcagtacccgccccccacggtcaacatggggcagtattacaaggtgagtcccagcctcgccaccacccacggggccccttccctcctaaccacctcactcccctaactccaccgggatcactctgaccctgcgtgtgtttgccccaaggacagcgaggggtgggtgatttctgaacgtccccatgtgttcagggcgaagttcggtggccagaatgtcagagtggcttttctcagttcctattctcattcgtctcggatgatggtttttttttctccttttcttattcacggcactcacaaaataataaaggaaatatattttattaaaaaaacacacatcccctgtatatattaacatttcattctaaactttgtatgtgcaggtgggcactaacatgttataaaattgttattacagctgtaactttgaatctgtaccttttacttaacatgacataataaggatgatacttactgctactagagcccctggggtttttacttttaatggctgcctaatattctgctgagatcaccatatcatattttattattccttctgttaggtatttgggttgcttctgatttttcactttagaaataacactatgatgagtatcttcaggcatatagcctttcctttccttaggattattttcttgggagtaaagaagacactttattattttacatttatttgccaaaaatcatgctaatttattatggccatctaccaaacaggtttaccgtttttgctccaacttcagcatactaggtgttgctatttttgtaacttctgctaaattaatagctagggacagagagaggcaaaatgccgtccctgaggtgtagctgtcccgccctgctcactcaatatacccagcagtggatgggcccctgtagcatccccgtgctcctggtagattttactgtccagagggagagcgggcttctgatggcttttctgccccccactcagtgttgtttatcttgttttaatagccagaacagtttaatggacaaaataacacgttctcgggaagcagctacagtaactacagccaagggaatgtcaacagggtatgttccaatttaatttacaaattctaagccacagggagttgttgcctctaaaggttctcactgttcctgctccagcctctctggacattcaaaggggcccatgggtgggggtgcactccctggtcccctgtcctggggacagagatgctcaggactgagaatccacggctccaggtggggtgagccccagggtaaagtgtcagcctggctagtcttgaaaacaaggagagggagaggggttcctggggaacctgggccccagattctgcaggccccgactccacctggggaccctgatggggtaggcatagagggtgtggccttgagtcgtgatgtgggaagcccacctgctcgggtgacaggaggcctgggcttcattcccgctgtcctgtcctccaagggttgtgctgagcaagtccccaaccctgagcctctgtgtccccatttatcacagggatgggtaagggtctccacaggcacctgacacaggagctcagtggtgagacccagatgaagggtggggaggcccttcccagggctgtcttctgagcaggacagagatctgcgagagagaagagtttccctggaggaggctctcctcccgaggggcatggctccaggcccctgggatgagtgcggtgtatgtccatagccatggccccttctgtctccgtaatcccataactcgtgcgtgtcttttctttccctccagcctcccaggccggttcctgtggcaaattacccccactcacctgttccagggaaccccacaccccccatgacccctgggagcagcatccctccatacctgtcccccagccaagacgtcaaaccacccttcccgcctgacatcaagccaaatatgagcgctctgccaccacccccaggtgagggccctccctccctctcttggcagctccacctgggccccccagtgggccgggagcaggggcttcgcagtcaggctgcctggggagtgggcatcagaaggggcagagagttgagagcaggtgagatacccaggggcacactcaaggcggggtaggcagctcacagacagcctttcttactgctgcctgggcgcctggaggctgggaggaaaatctatacgcagccatggaaggatgcaaggaggcgggtggaagaagaggggatgagtcgctggggcggggccgtgtagaatcgaagaagccatgactcactggtgtgcccttggactggctatgtctctggccctgtttacacacccctgccttcctctgagcatgcagcccagggtgagcaagtcccacctacagccccagaacccatggcagctgaggcttgtggctcacccacctcctctcctcgccccagccaaccacaatgacgagctgcggctcacattccctgtgcgggatggcgtggtgctggagcccttccgcctggagcacaacctggcggtcagcaaccatgtgttccacctgcggcccacggtccaccagacgctgatgtggaggtgcgtgtcagggcaggggcgccagcccaggcgggatgaaggaggtcccctgggatggcttccttgggcccgagtggggccctgggcagggggtagcagcatcttctgacaccttcacgtgttcagcatcattgactgggccctgtcctgcggttgtcatgggaagtctgcaggtgcacaggtagatgagcagtcaaggtgtcgtggcccaagggcagggagcagctgtcactcaccccagaggaaaaggtggctggctcagacctaggctgggaagctgtgtatcccatctgagaccgtgagctgacaagagggaacgcagtcaagaattcgagtgtgactcatgtggccagagccaggaatgcagagatgaggctggtgcaagggccaggccggggtcaggcaggccccatctattgcagggggctgaccattgggcagggctgctgctcagacacttaggcacgtgctggaacacaaggtccggaggttccctgctgagccaggcccatgctcagcaccttccacgtgtgacccactttgatcttggaaatgggcaacactttcccttttgacagaggaggaagctgaggctagagaagtgaattggcttgtgtgagttctcacagctagccaggggcggagctgagacttgggcccaggtctccaggatgccagaaccaaccctgggggtgtccacccttcagtccttcatcctcagtcaagactcacagtctcactgtgcttgtgactcagacccccttgactgcccagtgagcatctccagcgcaagagctgggtctgtgcctggcacatgcacacacacccctgctgttttcttgaccatgctgagcaggctgggtgaggtggccacagatagctggtgtgggcgttcagaacacaggagctgcaacgctcaggcaggaggacagaggtccctggcacgggacaaaccactgtgctgcctgcctgcaccctgctcacccacgctccttagctgggagtgtcctggcctgggaggcctcctcttcctggcttgcttgtcacacatatatggtcactgctggttcctgacactcctcagtgctgcgtccttggggggcctccttggggagtgctcagaaccagaaatggccgtggcctgggaggacagctcccagcaggtctagagatggggttggctggcctcacagcaggtcttgtcaaatgagtgcctgttcatttgcccctctgtctctgtcctggggatccaggagttgacccctacagggaggacattccagggagatgggagctagagctgtggggtgtgatgggaatgattggtgtgcgggggtcttgggggcagtttgggtgtagagggagtatccagaatgggagaggagaactcaggctgggggaatcattggggtcagggatggggtcctgaggatctcggaggttgtggtgtgtttagaggtgtgtgacctggctcggggtcacggaggccatggacagccccctggcagagctgccctgagcaccctcgttccccacctaggtctgacctggagctgcagttcaagtgctaccaccacgaggaccggcagatgaacaccaactggcccgcctcggtgcaggtcagcgtgaacgccacgcccctcaccattgagcgcggcgacaacaagacctcccacaagcccctgcacctgaagcacgtgtgccagccgggccgcaacaccatccagatcaccgtcacggcctgctgctgcgtgagtgtggtgggccaggggcagcgttggcacaggcaggccctgtttcacggcatgagagtgcggaataccctgccccactctggtcctcagccttgtccctgcgtcaccacccccgtgcccacagccgccaaagatacagcgtccccttacctgtgcccagggcctgtgcaataaccttcaaaccgttgggccttcaaagccactgtgccctggcttcagacgtggcctcttcccctggacactcagcctccgtctgttctccacacatgcttccgattcacccctcctggcccctcctccctacccttcattcattggtgcagttctgtgttcctcaaagccatgtcctgcttgcctcattcaccagcagttgtcattgtcagcaccttttcccccagacccaacgcccccaaacctggagttaacgcgttcccttctttcccaacccccttgtcttagagtcacgtatgggggtccttccaacccgtgacttgttacctaggaccagctctcagccaccctcatgtcccctgaagatcagggcccaacacacagggcttgctcaggccccagtggaagtaaattgcctgccccactccactggcctctctgtggaggcatggagaaggaaacactctgatccacccttgtgagcttaggggcacggaggctacacagagataggggtcacagacctgggcagcacatcccattctggctggggaatgtgatgtgctgtgtgaggctgcacaactgtcagagtgaggcggctgatgggtggacgtttgggatgtgcagttctggaaggcttcctggaggagtgaagggagggatgagcaccctggcaggaagggctaaggacacatgatggggaggcagtggtaggggaggttaggaagcaaagtgggacccaggcttaaagccttgtgtcctataaccttatccagggagtatttcagtgtcaaagtccaccttgtcgatctgcagcagaggcagcctttccagagtagtgctcaggctcgcaagtcccaggagacaccctgggggagcctcctgggccggctgtgggatcctgggagcagtctagggctgctgaggctgcaggcagggcggggtgtggggacagtgcacaggaactgagtgtctcctctctccccgcagtcccacctcttcgtgctgcagctggtacaccggccctccgtccgctctgtgctgcaaggactcctcaagaagcgcctcctgcccgcagagcactgtatcacgaaaagtgagtcagggtggggacgggggtgagggccagactccatccccgcctgagtttgggactgagaagcagtcaccattcacctggaactgacctttgcctccgtgcatgtcaccaccgggcctggagtgtccctgagcgcgccctgtcctgaggctcatgccctcctcctggggctgttgtcgtggtcagagaagctaggtcccataagagctggtgggagttctgggacctgccctgtgtggaagagctggcagtccagcttgggagccagaacaggcatacctgcaatagcagcacaggacatgaggcagattaaaacaaaatgtcaggaagcaggcttcctggaggaggtgatgacctgggccaggcctttaaaagatgggaggatttagagaagaggggatcttcatcaggcagaaggcatggagggtggattccagattggcctccctacttcaacagctcatgcttttttttttttttttttttttttgagagagagagagaatgtcgctctgttacccaggctggagtgcagtggcatgatctcggctcactgcaggctccgcctcatgggttcacgccattctcctgcctcagcctcccaaggagttgggactataggtgcatgccaccacgcccagctaagttttttttttttttttttgagacggagtcttgctctgtcgtccaggctggagtgcagtggtgctatctccgctcactgcaagctccgcctcctaggttcacgccattctcctgcctcagcctcccgagtagctgggactacaggcgcccaccaccgcacctggctaattttttgtgttttagtagagacggggtttcaccgtgttagccaggatggtcacaatctcctgacctcacgatccgcccacctcggcctcccaaagtgctgggattacaggcgcgagccaccacacctggccagcttatgcttaaactcaggagaggactgggcacagtggctcatgcctgtaattctagcactttgggaggccgaggcgggagtccaggaattcaagactagcctggccgcatagtgagagcctgtctctacagaaaaataaaaaattagccaggtgtggtggtttgtgcctgtggtcccagctgctcagaaggctgaggtgggagaatttgtttgagctggggaggtcgaggctgcagtgagccatgatcaagccaccacactccagcctgggcaacacagccagacactgccacaaaaaaaaaaaaaaaaaaaaaaaattgggatggagggacttggcttggagtcccctttgaaggagactccgggtgtggactcgggccctgtgcaagaggtacagggccactcttcacattgctgccctgagtcctgggattccagcaggcagctgtccgtttccatttccacatgtgcagagtgaagtgcaggagtgcctgagggggcttttcactgacccagtaaatcagagaagtgccataatgactttccatgagctttgcagacatgccccttcctcgcgaaggcagggcctgctctgcagagacaggggaactgccacagccacctcgtctggcacacacacaccacacgtgtcccacatggagacagcagcccgggcacccggccctgtgactgccacacagtgccacacactgccctctcagcgtttggtgtgggctgggaggagaaccaggacatgccccagctgcacgaggaagtggggagcacgtgcagaccccctacctctgcaggactgtcttgccatcctcacctgtctgtgcctcctgccccgcagtcaagcggaatttcagcagcgtggctgcctcctcgggcaacacgaccctcaacggggaggatggggtggagcagacggccatcaaggtgtctctgaagtgccccatcacattccggcgcatccagctgcctgctcgaggacacgattgcaagcatgtgcaggtgagcggccccagaaagcacagctctggcaagccacctagactctggctgggatggtgaggggtaggcagaggggcaacagagcctgtcctaacactgtcctgaaggacgtcatggagatcagcagctggcgtcactcattaatttccgccatcatttatctttgagcatcttttctgtgtgcttaaggccaaaggggctacagaaatgggttcggacagcccctgccctggcagatggcagatgccagctggaagtcccacacacatgtcagggctgattgggggcccaagagcagggacaccactgtccagttcatgcctctgtccagggccttgcatcaagtcagtgttcaggaagtagccctggcgtgagtgacagccccagtctgagcaggcagtgacagagcaatgagtaaacatgggcagcccggcctggaagaagaaggagccgtcttctggaacctgggtgtggtgggcatgcagaaggggcccagggctgtcacctgcagctggtcctgagggtgcagtgggacaggagcttcccctcctccctcccaaagaatgctgtgggcaagaggatggtctggtcactttatctatctgatacagatggatgaacttgatcagacttgtcttcggtgcctgggctgggctgaaggggctacccctggcctggttgaaaggggctattacagggcaaaaaacagtgagtcagctggggtgggaaccaggaaggcttctcagaggatgtaggcacagggtcatttggggcatgggaggtggtgtgagggatgctggggtggaggcataaggactctgcgtggcagaaaggtagcattgctttcattccacccagccccagcccggggtttctcccacagcctatctttctctctggtggggaagttattccaagggtccctgaggcacatctaggcagtttctgacagtcctggtctcacctgtgtctgtctgtctgtctgcagtgctttgatctggagtcatacctgcagctgaattgcgagagagggacctggaggtgtcctgtgtgcaagtgagtgatgcccaccccggtgggggcttcccccatcccccaaccacagacgggaggggccagctacctcccacctccacctgccctaaatgcaaaccagaacccaaacatggcagaggggctcaggttatgggggctccaggtggtcccttggtatcacgcggtcagagtccccctctcttgtgcctccagtagtaaccagcagcaggggtgggaccccactgacactgaggtggatgggctttgcccctacctccttgggtcctggagcagaggccaagctccccatctccttttccagtaaaaccgctctgctggagggcctggaggtggatcagtacatgtggggaatcctgaatgccatccaacagtaagtggggccctagcgaggggcagggggtgggaggggacgaggcctggattagagcaaggtgagcaggtggatagccctgacacagccctcccctcccaggccagcagaccgtgacccacatcccccacctctctgtcccttaccctcgggggcctctggatctggggacaaatgaacttcccagaaagcatgaaagccagccacagcaggaggctgacagtgccccgccccgaccctccacctgctgctccccacgagggagcccttgaggccagctgccctgtgcccagccacttgcttttctagcctcagtctccccatatgtcaaagatatatagagaaatccctgccaggcttccgcctcgtccacagtgtggtgagagtgggagcaggggcctcaacaaggtcacctgggtgtctgtcggagctggaggtgcttttatgcccaaagccaggcaccccggagcctcagctctgccacccttcctcccccagctccgagtttgaagaggtcaccatcgatcccacgtgcagctggcggccggtgcccatcaagtcggacttacacatcaaggacgaccctgatggcatcccctccaagcggttcaagaccatgagtcccagccagatgatcatgcccaatgtcatggagatgatcgcagccctgggccccggcccgtccccctatcccctcccgcctcccccagggggcaccaactccaacgactacagcagccaaggtgggtgatgccaggcagggaggaagggagaaggagggcagccccaagtccctgcagaggcacagaatttctgtgctgatggtggcaggggtcgggggtgtggttgaagagagagaagtaacacatcccccaaaaaacaattcccagtttgctagacttgagggtacatgggcctagcccaggggcttcagagcctgccctggtgggagatagactgctgcctcttccctcccacacccacccgagttcttggccttaccccttgccctcctgtattttttctgtgatatctacatttcccctgcaactttcctgccctcctagggacagagtccaggttcctagagcctcagcctttggccaccaaggtcacccactggcccttacgctcccggctgcccagaccaagttttactcctactgccactgattcctggaaagtacccccactgggtggcagctccccctgggatccgtgatcttaggtccccatgagaggcccagtgaggttaggccacctagccgaactcccacagtgtgccaagggccaagcctcccagtctgctgatcctctgacccttgccatcgccacatggtggagggcacagtgaccagggaggcggaacagctggcttctgcgggtgtcatcctgagtctgctgcagctttctttgtgggcttggcagaacatgcacccactctgggcctgggtcttgctgggtatgaaaagtgcccacattggggagtagctcagcaggtctgctctaggctcaggccatgtcccccactccccacaggagcctggcccgccccctttgtcccactctgccccctcctccatagcagtaggggcagcacatcccctagggtaccacagaccacgggacagggctgagtggctgctctatcctacagcccggaagcctcgggctgctgtgacctactacagcctcgcaagaggaaaaggacttggcttgtatttttacacactctctgttccctgggggtggccactatccctctgggtgaccccctcccctccccatctcatcccttcctaggcaacaactaccaaggccatggcaactttgacttcccccacgggaaccctggagggacatccatgaatgacttcatgcacgggcccccccagctctcccaccccccggacatgcccaacaacatggccgccctcgagaaacccctcagccaccccatgcaggaaactgtgagtacctcctcctcaccccattccattccccagcctttggggttgatgccttgggatctggataccctgttccctcccaggcaaggcagaggatgaagaattgggtgtgtgggctcagaatggaataggaggggtctaactgaggctacgtcgtgccctgtcagtgtccttagacttggctgttttacctaggatttcggattctctggagatgggggaagcttcaggctcttccccaaaccctcaccaccccatgcatacacacacacgtgcatgcactcgccactacccagcacacgccatcagccctctccctctcccacttgcacaatcttacactcacctaacacggttccagccacctcaacttttgtcccaaacccaggcacttattctccaaggatctgaattcagggtattaccacctccaacaaaagaaatgctaggaagtctgattatctgaagagcattcacttctcattctgtttcacacttatcgacatatgccctgtgtggctgaggacgtccctggtggggtaaggtgtcctgtgttgtccacaggccctcccttcctgtggccccagtggcagtggcaggaggccctcctgtcccctggagtcctcatccagtgagtgccacgtggttccactcattttaacaagcgttttttgagctgtgctctgcgcaggccatgtgacaggtgtaagcaagacagacaggccttgggctaatggagtaaaactcctggcagtgcgtgggtgcaggaagaacagttggagtttggagaaactgaagcctccggaggctgaagtggtgtgtctgaggtctcagtcattctgggctctcatcttggggaggaggggccatcactgagcacgtggctgggggtcctgggccacaccagccagggagagggcccggggtcctgccagagtctggcagtgggcttgggtggcctgcacaggaaggagcctctggattatactgccttccacacacctgacatggaattgcctcaggactctaggtgaggtagcagcaactttccctcaggaccccaggagtccaagtcggaaatagatgctttgtggagctttggccaagtttttcaaagttactctctgccccatggggcttgtgatttctgggggcttctttcctgatgccccttcctgggccctgagggcatcccacacccagaagacaccaaaatcacaccccccgacacacacacatcctgcgccctcacagttcctaacactggaatatggagtgctgatgccgtctatttccccttgacaatcaagctttctcctgccttctgtgagccccgctgcctgcattctgtgtggcttgatctgagcctgtgagttgacctcagagccccttaagatgctctctagatggtcctgtcctccatttctgagctctcactagagggcaagcagacctggaagtgcggatgtgccaggccggtggggcagggcagtcacaggtaaacttctaccacacctgcccaggtggaggcagccacacccccagctgagcccaaggctgggaggcactgccatgcccgcagagactggccagagcgctctatccagatgctgctgcccccacagactgcccatacttggtggcgggttgacaggtgtgtcagcagtgctccaacagcacctgcccctccatgccggagacattccagccagatacgaagctgaggggcacagctgcctctgaagatccagggactgtctgtcttgagctgggctgcacagctggagtgtggagcccctccctgctctcccagggtgggcactgagggcatctacaggagtgggagccctaagctggcctctcactgaccatgggtggtggcccattcctccagcctcttgtatgtgtctcataaacgggtctcccaaggtctccagcagcaccgttgcgaggtcgtctcattcttggggcttggactggaagggcactgtgctccctaaggccgcatggggttggggccctacaccctgagaaggggacacctggaccgtgggcagagcccgacccatagcaaggcctgggaaacagttttaggagaaacaggaagaggaaggaagttggggatgggcaaagaccgaggatggtgtggctgcaaattctaaatgcacacaggaagaacatgtcagtgtgttctgtgtggctgccccaggatggggcagggtgaggggatgaaaagaccaaggaagcatgtgccaggctgctgttccagtggagcacctggagcatccgtgagcccctctcactggcagagcgaaagtggggctgggggctgtcagggatgcttgcagtgggatcagggcttggtctgcgaggattccccggcctttcactttgaaggaggatctgcttgggacagcaaacaggctagcaggggaatgttcacatctcacccacccacccacagacagcccagttttcagtgcacgtgcccacaggagggtgcgagtcctctagttatctgttagagaggcaccgccagcctcaccctcagcaagacacccaccattggtgaaccgtcactcagtctccttgtccttggagtcccagaggtgcctgcctccctcacaaccctgtgtttttgagggctggtgccgaccaagtgggatgtctaggaaaagggtctggcagggtgtgaagatgcccctggctggccaggtgcccacccagccctgctcctctgacagccaaattccacccgcgctgcagggcttgtgccaaggccccagctgctccacacttcggactggcagaaggcgccttcgtacccagcatcacccctgcccagggcccacttgggaggtgcagacccagtcctgagccgcacgcccgcccaatgctgtctgtctgtgtctgctctctgccgcccagcttgggatctgcaccacgctgaggcagccgccctcctgcctcccgctccccggaacatgcccattctgcttctccatcctgccctcgctgttgttcgttgtctgggcggggaggtggaggggcctgggggagcccaggcccagctccccgtgtctgtgcttgtgtcgaagccctccccacctcctggggctccacgtggcccgagaggtccccgccgtccccctgcagcctccctgatgggcggttttgggggagaaatttttctttgtttctctgcccagaaacaacgttcagcctcgtaccgggtggccacgtttcgggggttgtgacttccctggttgtgttgggtttcattttctccaggcatcatcgccgtgcctcctcacctcacctctcttctctcccgctctctcctcctccacagatgccacacgctggcagctctgaccagccccacccctccatacaacaaggtttgcacgtaccacaccccagcagccagtcagggcctccattacatcacagtggggctcctcctcctcctccttcccagcctccccggcagccgccacaggccgctcccagcagccatccacacagcgacctgacctttaacccctcctcagccttagagggtcaggccggagcgcagggagcgtccgacatgccggagccttcgctggatgtaagttggggtcgccactcgccttggcctggggctaggcctggcgccgggacctgcccgagagaaggggtgggtgtgagggctcgaggccccgaagggaggaggtgggtgggcggtgggagggcttcacccagacctggctccagaccaggaagccccatgatggggaagtgtcaccactgagggtccccaccctgctggctcctgtccccccagtccctttggccatagccctgaaccccagccctgacccaccttctgacccaagccctgcggggtcccttgcgcagcacaggagggtccctgccctcccccgatggtgagcttgcggtttctgtgtctgcctctctggcccgggcagggagggctggagggagaggccgtctgtctgcctcgctggtgtgtgtctgtctccagttttcttgtccgcgtgttgtccatgccctgcttctgcttgctccatcgctcactccaagaggcccccatgtgggtgacagaaggtgggggcagagggggcagccttgggtcacagccaggggcagcaggccatcatgggcagcagaggtgccagggctcctaccctgaggtctggaagatggtgggggtcaccctggatgatggggctgggctgctggatggggctggcgggatgggactgagcaccggccccgcccatgcctacacagagctggtgccagactccgggaggaggcttgtcctcggcccctcctgttcttcacccccagccctgctctgtcagcctctgccctgcagcatcagaggagctctgtgctagctaggactcactcactgtgcagccatctcaggtccttgcccagtgttccccctcaaaccaggccagtggggctgcttttagatgcatgaggctccccatgtgacagactccaaggatatctcagtagagggtagagacagtctgcatcccctccggggccacagggaaggatggctgccagccagccacaggctcaccaaggagtggcgagcccttgagaagagggatgttggggggttgggggcggtgcaggaaccactcgccttcccgccttcccaccagcccacctccttgtgcttacacgtgaagcatgtgatttcagctgggaggcccaagtgacctgccatggggccttcccaggttagggctgaagtccatgcctgaaaagggtcagccctgctcaggcctcagctggtgggctgcgggtcccaatcctgaggcttgaaatgagcatgggggtgccccacactcggtgcagtggccggggtatgtgtggggatacctggcaggcccaagcccaaggctgttctctacccctttttttggctagggtcctgagaggcaggtggagggggacgggccagggcgcccctgcattcctcacccggggcctgcctctcaggcacacctcatctgaacttcattactccttcttttccagctccttcccgaactcacaaatcctgacgagctcctgtcttatctggacccccccgacctgccgagcaatagtaacgatgacctcctgtctctatttgagaacaactgagggccacccggtcggggccatccctccacactctgcatcctaccccacctacccaacacacttttccacctgggagcctgtgccctcagaccgccccgcaccagagccacgggctgtggggcggggagccctcccccgctgcagccctctcagaacagaggggtagggagggtgcaccagtgcaccaggaaggctgtgtgggtctggagcccacgtcccacctccacacccttggcttgggcccatgcccagcgcaggcctgaagaccaccctcccgagaggaaccagcccggtaagagggcacacgctgatgcggcttcccggtccctccgcgtgtgccgattccagatgaccttccagtgtccccaaggttcttccatcttctagactgtaaccctgcctccctgcttcctggtccagagcctccctccagtgactgtggagcctgagaaggcccccgggccccagcatgggccccgagccttggaggagcactggcagttggtggcagtgagaccagcccacccaccaccacccaccacagaaaagcacaaacctctgggaaagacaacgtctctcgggggccaggggtcatcggtttgacccctgacctataagccaagataccccataaacacactcagaaagcagagaaaaaggacaagagtctgtgtttgagagggggtctgccattcctgcttggggactggtggggaagagggccaggacatcttctgagccaggacgtccctgaggctccacctccaagctcagacagggcccaggcttggggaacagagagagcaggtgtacacccaaccaaagtgattgtgcccttggttggggggcgcgggcatataacctgtcagaagcaaacaggagcggcaacttctaactttgctccaagccactctctttttaaacagcaacaatttaaagctatgaagtcacctggagaaaaggaacgttgctcttggacagcaagcaaaccatttctctccgtctgttctgtttttctcctagtccctctcctgccacctctccaagacttccgtgggacacccacttccctctgtcctagttctctttgtccaatcagatggcaagggcagtgcgtggaaaggccggggaggtgcagaaaccagagcccagggcaatggtgtctgtccagcccctccctctgtccctgtgctccaagctgcccccggctgcagcccaggccatggacatgtgcaccagtatgtacctgcaggcatgggggggaggggggcgtgtttctgggcctgccccagacactgcccttggctgccagcctaccctgcctgcactcctccaccatcacaatctcacccaaactcctgctcactcaagcaaaagcagcctctggccttccctccaccgctttgctccatctggcttaccactctccagggcctcctggggagcctgtcctgtgttcactttgtttcaggctggtctgtgccccgtgagccacatggcctagggtgatgccaggttgtcccgtcactggggtcccatctgtaaattctttgcgcccttcccggctgctgcctggggccctttcctgctctcccgtccgctgtgggtggtccccagctctcctctgtgggttttaccggaaaggtggccccagctgttgacttccagtcactgtcccagacggcacaaggttttctgtaggaaagctgccattgccccggccccttttcttcctttgtcccgttgtcgaggttttttcaaatagcgtgttgttcagtatgcaaatcaattattttaagaatcgcttttgtaaatatctttgtgaatattttagtatcgtctttgataatattcaacattttcatgacctggttatagcctttgctggtgtttttaaaatacctggactcaatgacaaagaccgagtcttctttttttttaaacaaaaacaaaaaaagcaaccagggctatttgtacagttgaaggggtgaacagaatgggcggctgtgctgggagttggaagaccgggcagcccgctatttagagccatccctcagtcagctggcagggacaagccaacgccaggtagcatgtggccacccttgcccagtgtctgtggcctggcaagtggccacgccctgtgtcagaccatctgggaattaagctccagacagacttacagatgccttccttaggagttcttgcttcttgcgttgatactttgccccagaaaggcctgggattcattctggttcttatcagggtgtgtccacactctgctcacaggtggatccacggctttccagtgcggagagtcgagatgctccctgcagcccaggccccgggcacctcctgcaaccatctctgggctcagcacctgaggcgggtttcctgggtcccctctccagcaagcctccaccagcaagctcggcccagagcttcccttccggctggctctgaaccgtgcgtggtgcctacagcctgcagtctggagacaagctcttccggagtgctctgggagccaggccagggtgtgagggaggtgcagaggcatccggggcgggagcaagccccaggttgtgacaggtgcaggtagacaacgcccataaacagagatggtcctgaactctggagagatccttccctgatcctttcggacgactacttggagccataagtaacctcagcaaaaacgaggcctctgcaagccacttttccatgccaagcatccacccggcccacaggcatgtttctgccgccactccgcaagatggacagggagccagcaggcaggcgggaagggccaagtacaggcaatcacccccatcttcttggtttgaagctttatccatgtatcatgttccgtgtagccattttattttttaagaaactgctaatactttctccctaatggaagccctgatcccccagagagctacaggtctgctcccgacgggcctcgggcctgacccgtccacacagggccgtgtcaacagcagcgactcaagggacgtgtgtacatatgtaaatgagaaatagagacgtgtcaacagatgcattcatttctcttggaatgtgtattgtttttattttgcgaaacaaaacaaaacaaaaaaaaaagcttggaactccatcacgtggaaaaactagatcctgttggttatagcatttgtgagttctccacgtctgtctctctcgctcatgtaatatactctgaccctgagtggaaaggggtttttgttctgtttttattttacctacatgtactatttagcttcagtgtactagtcctgccacctgtgtatttttagggtgctatggaaataatgaaaagaaacggggatttcagaagaaaattgtaaccaaattcatactttgtataatttttgatatcatgatcacaggtgattcacacgtacacacataaacacacccaccagtgcagcctgaagtaactcccacagaaaccatcatcgtctttgtacatcgtatgtacaatgcaatcatttcatactttaaactggtcaaaaaactaattgtgatttctagtcttgcaaagctgtatgtagttagatgatgtgacaacctctaatatttatctaataaatatgtattcagatgaaacctgtatattaggtgttcatgtggttattttgtatttaaagatcaaattatttgactattgctagacatttctatactctgttgtaacactgaggtatctcatttgcccatgttaatttttttctaaataaattgacaaaaacaaaggtttggcgaattagctattttgtggatgttaaggagtggtttgggtgtttttgcttttgttttaaaccacaccccccgccctgttaccctctgcacacacaaaaaagaaaggcaggtggtttgggtgttgaattggaagaacccctgtccatgggggtccctggaaccagtccctggtggggcaagtgcagtgtgtggccggatggttgggggagttggggtggctgaatagggccaggtggctgcagggtgctaggggcccctgtggcatgtgactcagagtgtgcaacagtgtcccatctttgatggtcccttgtggattatgctgggtttaagtagcaggaagctattcatattaagccacagagggtgctgttcagagcacacaggagtgtggcttcaatggagagtgagcattcactgcacccatggctccctgctggcatctcagcatccctggcctccacctctcggtacacctgcccctcccctcctagggaagcttgggttttccctcctccgtgagcatgctttacatggggtactgtctcacgatagcccctgcccaggccatggttctaaccatccttccagcctcggcaccaacacaaactgacaacacttgatgtgtctccgattgaagttttaggaacatgcatctgacacagccccgcagccagtccctgccctccctccacgcagcctcaccttagggggaaagcaaatgtggctgtcatggcctttcctccacagggactgtccacagagggaagaagggccgggccggcaccccagagatctccactcagatgtatccgggtgtcaggagagtgaggggcatgtgtgtgcaggagccggcggtgtgggggaggctgcagggtgctgcctgtagggggctgggtgcctagaagccccctgctcctggggcctctccgaggtggctggagtttctccttttggagggaggtggaaggtgaggaggagaaaagatttaccttaaataatggaacacccaccggccactgctcagctgcaggcactgccttctgccagcatcaccaggacaggctgactctctctgaacagacacccctccgagaggagggtgattagttagcttgagggagaacttcccgtaggagacatgcccccctccctgtgccttagagcagtgtggtggggctggaccagcactttaataaaacaaatgagaatacagtagaaaatatcaggagtgtgccctacaaagtaaagggtagcattctatcaagaaacgtgtgtgtgtgtgtgtgtgtgtgtgtgtgtgtgtgtgtgtgtgtctgctgagtcatgatgttaattcttatttgtgggttgtggttgaaaacaaaaagtttgaatgccattgacttaaaggcaggaagtgggcaggggagcagggagggaggaagggcagtgtgctcccccaacttcatgataataagcaaaccttcctggcatttcagctggagactctgaacctgggatac

SEQ ID NO: 684 - DNA, 291323 bp, Homo sapiens
  source 1..291323: mol_type = genomic DNA
gaaaaacaataacttaagaatcagatcaaactgggttcaaatctaggctttgtaaccctagccaaataattgcccagatatttggtttccttatctttttacttctaaccaaaataaagtgactcacctcttgttagtttctttcaacaaatgtttagaatagttctttaaaaattcatggggtaaaaaaaatttatagtttcttccttaaaacactgaagagatggaaaggggaagaaataacaaataaatatggtattcagattttcaatataaattagcagtgcatcctacaaaataaatataatgattcttgatgttattaaactgcacttataatccaccataatcccgttgttttaacagggaactataacatactaaggtgtcttgatagttcttaggcagtcactagagtgcatcactggctttcatattcttatcaaaggagtttaagcactacaaagcaggagtaggcaaactatagtccatgggccaaatccagccaacatcctatttttgtaaataaagttttactggaacacaaataggttcataatttacatatcatctacagtggctttcatgatacaaggcagagttgggtaattgtagcacatggcccacaattatttactgtctggccctgtagagaaggtttcctaaccgctgctctaaagcactgctaccaaaggtttggtttgcatacctggattggttgttcctgattggagataaggagattgaaagagaatgtaaaccagctatggtaccaaatacaattcttaattcagctattttttttttcattgccagactttctcaatgaagcacttacagtccagtataggttccttttctcatagtatataggtacaaacagttcattgacctgctactttgaataccactactcaaaaggtatatgggggctgatgtagcaaagctccaaagggattatggtgtcataatgtgataatgtggcaacagactgaatgagactcacaagtggtccttatagagacaggcgtttttcctaaccctgctcttctaaggtttatattattccaaaaatcttccatgatacagaattacattttaacaaggtgaaggatgagagctaatggctccctctctccctatcttttcttgggagcaggaaagataaaaatattagctctcctccccaaaatactccaaataattcataatatattttgcctatttagcctctttaaattgttgggcagatagaaaagtataatattaaattctatttctcttgaagtaaaagaatttataaagcaaatctattctcataaatattagcaatattgtcccctgtactttaagtcctaatttaaaataatgtatcagcagttaaagaatgtagaatggaatcctcaccactaacactgatattaaatttcttgaacaagtatataatttctaaaggcaccaaaggtaatctgaatcaagcagtgattggaaaaatagaattattcgggggcagatttttattgcaaatatttactcaaaaactactatatacagcagagtattttaatcgccatttaaaacattgaacattcagtgaaacaaaatttaagaatccaaagcacattttaagaagtaaaaatgaagcattttaaataaaagtttattagtatttcaaagcaaactactgttcttcatattattcatttctatatctattatattctagatgataaaaagaactgaaaaatcaatttagcagccatcttatagataaattaggctaaatttccaaaaccagttcttttacatcactgttttaggtcccatttgaagtttttattttacaattacagaaaagtcacttaaacatggctgaatacatgccaggacatgttttcagtttactgctttacaatatctacattataccatactttggtttggcttccagaccatttttatgggcctatttctaaggaagatcattaaaacaatattaaaagcataatagctacaggagtttcaacaatgggtttctactttacattaatacaactaatacatcaaagaatttctacacagcttacacactgacaaaaagcacaaatataaatttatatcttaataattccactttcactgaaagtttaattaaggtaagcttacagcctggcaggctaacacttgtatggaggtacaaagattcaaatattctgtttacatgcgtctgactggaatgttatattaaatccaaaattaagtttatgttcatccaaattctcattagatcaatttagtactctaagcatgctccatttaccagcatcatcctcacaaataaagccttcattaacaatgccaatcagccattgtttttaatcaattactccccaaaagtacatggtttccaaatcccttcctctcagttaactgaaaaggatatacaggtaataaagatttttagcttaggattgatggaagtttgaaaggctttataaatattactaatatcatcaattcatgtcagcaaccaaatcccatttccttgaaaaccattaaatgagacctttccactgcaaatttaattatcattaaaatcctgttcgtgtttttaaaaactttttgggaatccctactaatcatgctattattggtgaattgatttgtttgataacataggttgaacatacaggtaaagtgtatgtgtgacctcccttacatatttccatttctgaacctacaacagcaccactgagctcacctgatagcactgttccaaatgcccttatcgttggtacactgaaacttaaaatgactaatttcaacttctttctttttcgtcttccaggtctactgttgcctctgttgtgctagggttatttcctccaggaatgtcatctgtttgatcagacactacttcatcagtcttggctgaaggatcaccactacctttctgaagaatctctgtggcttcatactcaagtacctcggatggagtcagaggttccaaatgaatactgccttgctcgctaacatcagaactaacagattcaggttcatgtctttttctcaaaaactgatcaatgcttacattatctgatgctaatcgcaaatccttaatattctttgaagaaaatctggcttcactggagttgtgatctttaatctgatcagataagattatgttttctgaactttggcacatcttcaactccatttcctgacaaacgtgttgtatttgttttttcttttccactttatctgcaccaatatttgaatcacaactgacgatgttttttgagccagtttcctggtctgcaagacaggtttcattttccttatctgaaactgttatgctttcttcactttttgttgttgatgagccttcaaatgaatttgcattacatccatttttttcttttgaagaagcagctttatcttgtttactgaaaaataaagtcatttattatgtatttcttcataaagcaatgtttttgaacactgtcaaaataaagacgtgttctaaaaaataaaaagtcaaggtacatttgcccaccaaaaaggaaaacagtccaagttcccaatcctcgctatggcagtaaaatttaggaggaggccattttcttaggcaagattctgagaaactctggaatcacatactaaaagatatctatcaactagttttagtcctggctgtcattattttcatctgttcatatctcttgcctgtttctagtttaaatttaagtatttttattaacttgtaaaagtacctaaaataaaaaaatatatttggaaaaaaatctatatttttttatgatttttttttttttttttttgagacagggtcttgctctgtcacccagacaggaacacagtggtgcaaatatctcactgcagctttgacctcctgggctcaagtgatcctcccacctcagcctcccaagtagctaggaatataggtgcacaccaccaagcccagctattttttttatatttcatagagacaaggttttgccatgttgcccaggctggtctcctgggctcaagcaatcctcttgccttggctcccaaagggctgggattacaggtatgagccaccatgcccagtctcctttatgatttaaatagcttcttatgtttagaatgtctttccatacataaaatcagataagcattcaaacatatttttctaatttttaatagcccaatttaaaaaaaaaacacatgcctgaaaaagtatatgtaaatatataacatacatacacatctaagtgtgtgtgcatgtttgtacacatatatatatgtgtgcttctgtgtgtttcttctggccctgaagtgttaacagaaactatctagtgaatcacaaaatatgagaaacaagatttctaagaagatcatcagtccattatctagatctaaggatgcttattttatgaaaataaatttaatgattacatataccttatttcttacatttaatctgacatttagacgtattcccaatgaattgcacaaatatcctagcaacatttccaaaaggtaatttattatttactaaattactatttatataaggctatttctctgctatttgttttgttctactgatttgtctttagactattcctaaaccagtagcacccagttttaacaattattgattaacaatatactttagaactaaacaaatcacctacaatctacaactcttccccataaatttcatacttttaatatgtaaaagatatttatcaaggatgctcattaaaacaatgtttaaaatagtaaatataaaaaatctaatatctttttatctttttttttttgaggggggacagtctcactgtgacgtccagggtggggtgcagtggcatgatctcggctcattgcaacctctgcctcccgggttcaggtgattctcctgcctcagcctcccgaatagctgggattacaggcacgtgccaccaagcccggctaatttttatatttttagtagagacggggtttcaccatgttggtcaggctggtcttgaactcctgacctcgtgatccacccacctcggcctcccaaagtgctgggattacaggcatgagccacagcgcccagccaaaaacctagtatgttatccagcaagaaaggaatgattaaatacattatggtattaatagtgagaaaaatataaatctttttttaagtttgtcagtttccaaaacaaatcccatgtttattaaattcataatttaatttgtaaaatagtctatcatgtagttaatatattattttttatcatggaaaattttgcttttcttcatctggatcctggccatttctctctctatatatagatatagatatttttaaggctagtcaagtgaatcagtgggaatggagaaggaacaaagaactctgcaactggctgtgatcaattatttgtatcatttttgttacattatgattgagtgagtctgtccactatattttgtaatcatatgttagtggtagaaagattctgatttttacaccaggctactttaatcaatactctcattaatttcaatcacttaactcattttttggatcttaactggtcaattacatatggaaaaaattattttttcctcatttcaaatttgtataattcttagttttgttcagatcataatggactaactacaatttacgtaaaatgttaaataatacagagatgaccagtccgcattttctaactccttagttgattttttgttaacattcccccaagaacttacaaaaaattcaaggtgaagaaagggcgagataactttactattgaagtataagaaacaccttcataggaacttaatccataacttgcttttagggacaaaagattaatctcaacagactaacaggcaacctacagtaaaatatatagcatacagatataaatgggtcaaattacttaaaagacaaaataaaattacccttctttggaataaagttctaattggaatgttcagattctcttctgctaaaagactgtgaaacatcttgtgttctttaacattctaccaaagtatgaaaattttaaaagccaaaccctgagttttgaaactattgtgatcctaccatataagtagtcttatagctttttgaaaatactttaaaaaatcttaagattacctatgtgcaacaactgttcctgtccagtaacatgcagcatcttgtaaatgttttcatttaataggggcaaagaaaatctgccaacattttacttgctagtaagtagtttctcaaaaatttaacaacataaaatatgctctatatgtttaaaagatttaaaaacaaaggatatagagaatatttttcttggattaaagtttttaagttttattttaattaagagccattacagaaaatagcactatatacaaacatttaaatagtcctttgccagttaactgtgaaataatgcagctcaagtgttattttgtatacttgaattttatgaaattcagtttttccttatatttacctttcagaatttgatgtttctgtttctctttcagccatgttaggtcttgcaatttcctgaaataattaataatacttttcttttacattcacagttaatcttaaaactatttttattatactaaactttctggataaaagaaacaagtgtgcaacttaatataacaaagaaatagaaaaataatttattaaatataaaatataattagaatactccataattatatgcaggttttgaaaatgtttttaaacctataaaagtttcagtgtaccaaaagtttctgattcaaggtaaaaaagcagttacccactcatgtcaatatctgcttttcgtaacctctatttcaaatgtggatcataattacaattacttaaatagaaaactagtaaaacacaacttgaatttgaataacaagatgcatccacagtattttatataaatatattaggcacaggtatttagataaaacatttctgaatttatgatttcatattgagtcatggtaacccttccactgtcaaaccaaaaacatgaaacagtacacaaagtaagaaacattctacttatttcaaatgttttacagggaagcaagaaaagtgtaaaacctcagtaagccataggccaacctaacagcttgtaacaattaccagctatggagtacatatgatgcatgaagcagtatattaagaactttacatgcactatctcatttaatctacatattagattttataaacactatttcaatatatgagaaataagacttgagtgggaacccaaggcaataccacaataagtagtaaagattcaaatctatatctacctcttaaccactatggtagatcgactcaagcctgtaaaattgataatggtgtattaatcacacacacttatctactcaccgtctcaaaactctgctaaaacaagggcaaagaaataaaatatttttactcataaagatgaagaaaacaccaaagtatactaattgctaaacagatttcaccaaatgtttagaaacaggaaagtcattggaagagtggttactgatttagcagtatggaggaagttacaatgaatgtctgcagtggaggagtgcaaggaaaagagatcaatttgcccagagaaccaaaaacacctggtatttgcaggtggtcagtctactatttagtacataaaaagtaaaaacaaagcattgctgggaaatctaaatgctccttccccgcaacttacacaacaggcacctatcccttcccttaccaaagaggctaaaacttaacttccttccttcctattttttttttttttttttgacagagtctagctctgtcacctaggatggagtgcagtggtatgatctcagctcactacaacctccacctctcaggttcaagcgattctcctgtctcagccccctgagtagctgggattacaggtacccaccaccatgcccgactaatttttgtatttttagtacagacggggtttcaccatgttagccaggctggtctcagactcctgacctcaggtgatccacccacctcggcctcccaaagtgctgggattacaggcatgttccaccatgcccaactaattttttttatttttagtagagatggggtttcactatgtttgtcagcctggttgtgaattcctgacctcaaatgatccacccacctcggcctcccaaagtgctgggattacaggagtgagccaccgtgcccagcctaaaagttaactttctgaagtggagatagtctagacttatgaacaccaggaaaagtaaaaggcaggcatgagatactgagaaaacaaagttttagtaaaagtccacgtacttaacaatccttctccctgcctggcttccagaatgccaacagccagagaactcactccccaacctagcactctcagctagaagctagatttctctctggagaaaatgatcaaccccaaagaaaaaattttccagaatgaattttttttttttttttttaagagacaagatctcactctgtcaccaaggctggaacgtagtggcatgatcatagctcaactgcaacctcgaactcctaagctcaagcaatcctctcacctcagtctcctgagtagctaggactacacagtatgtgctcaacatgactggctagttaaaaacattttttttttttgtagagacgaagtctccagtgttgcccaggctggtctcaaactcccagcctcaagggatcctcctgcattagcttcccaaagtgttgggattacaggcatgagccaccacacctggcctctccataatgatgttgagaccatcctcctcaacaaagaatcagtcagttcagcacctaattttcccacactgaagtctacgcaattttcatgcagattgtgcacacagtacagtgcacaaatccagagggcaacacattgtaattcatatcatccgtttccaaagtatgacatatggacacctggagaatccaagccactttcaggaggcatctgaagtcacaactcttggcataaaaacagaagtgtgtaaaaatggtggcaaattaatataaatcaaggcagtagcaacctgtactagtagtcattgtattcttcaccaccatacacattgtattcttcacaccacaccgagacaagttaaaaaaaaaaactttattaaatctcaatctttgagctcatatctttttaatattttgtgtgacaaaatgcaaagaaagtatgcataagtcacaaccattgcctactgaaaatatttgggtctgtgattgagttgtgagttgtacttaaccacatttttttcatagaacaggatcatttttattttaaagaatgactgtcaaactatgaatatctagactagagtttcagtagactttttctttttgaaaaattaacaaagtgagcctgtcatatcaaggaaaacaactgacagtattcgtttccagtaataaaatcaagcaaaaactcctacccaccactgattagattaatgctaatatttactgtgagtgcttgatattatataatgaaatatttcaacatttggaagatccagggcacttaaggggccaataagttccaaatgaccaatgcatgatattacaaaattaggcatggataaaagatccattcaaaatataaaacagacaaacagattttgatgtaacaaagcaaaaaaagtcagtgatacggagctagattccacagtgcaacaagcaagaaaacttccacttttggtgcagtatcaaaggagaataatcacaattattggaaaagattattgaagtactgggtgaggctgggtattcttcatacatttcaaccaaaagaatgtatcacaacagattggattcagaaacatgagaatccaatttttttctactaagcttgacattaaagaaatatgcaaaagtgtaaaatcaagccattctttctcactaaatttctgttgctttggaaaatagttatttttcagaaaaaaaatgtgatttatgttaacatatatttattatttttatttttgacaatagttttaaaatatcattatttcaatttctaatatggtaaacattagtaatttttgagactacaaaggatatatttaaatagtatccgcaggagttctgcagtgttcaacctgaatggctatgcaagacagccctgtctccattcaaacacatacggttttcaatgattattttagcctcattctttaattatgtatgggcgggtaaggatcaccacataacaaaagacataccttaacatgaaaaataccaaaaaaaacaaaaaggaataaagaaaggggcttggagacatcagatacattgctgggaacaaaagaaaaaagtatatatacaatatttaatatctccaaagaggtatatgttattatatccattaaacagtaacaaaaactgtaaaaaagagaattaaagaacaaataaaaagttacagagctcttcaaaattacaaatatggcaactaaaataagtaattaagtttagaaaattatttaaaaagattgaaacaaaaaaacaaaaagatgaaaggccagaaagaaaataacatacaattaaatgagctaaaaaaaaaaaaggagttgatgcaggaggctcagtgtcagaacaatgtcagaacaataggagtttcttaaaaaaaggagaacacagaaaataaaagtgagcatttaccacagaaatgaaacaagaaaacttctcccaaacagaaatctccaaactccaaaggtttgtcagatgcctaatacaatgaatgaaaaaaggatgggtgaacatatcatgcgatttcaaaacaccagtgacagagataatcactaaagtttccaaaaagaaaaaaagtaacctaaataccaagaaactggagcaagacatgcatcagacttaatacaaatactggatataagaagatagtaaaaacaacattttaaaaactgcatgggaattatttttatgtacttcagccaaactatcattcgcataaatatatttttagatatgcaaaaactgaaaaaagatgcacaccttctcaggaagctagtagaggacacaattcatcaaaatgatgagtaagccaagaaatgaggaataattcatggttcagcaaacaggacatccaatacaagggagtggcaaaggataatcttgacataacaaaactaagcacaggcttagggagcaactagtttaagttgaggcggggagtctgggaggagatcttcagaccccttcactccccagcgattttttttttatgtgtgtgaacactggaaaaactatttccaaatatttgagagagaaattgcaacgttagaaaaaaatacagcattaggtgcacagaaaactaaacaaacgagtaaaaaagatacatatttttaactccagaaaaataacataaggtacagaaaaggaaaagaaatcatggggtactttctggctcagcataacagtctcaaaaattttgatgtaactattctgcaatcagtgctataccaagccatattgaagcctgaggcaaaagaaaaaatgaatgcccctataagttttgctttgtgtgtggtgtgtttttgttttgttttttgtttttagcaacagggtctcactttgtttcccaggctggtctctaactcctagacttaagcaatcctcccagctctgtctccaaagtgatgggattacaggtgtgtgccattgtgcccagcctgtttctgtgtatttaaaaaattttttttctagaatgttagtcagaaaaatattgaaaaatttaaaagtaggagaattaaactcacattagcttaaacttaaagattttatttatgccaaaaacagtattattttattctcctggctaatggaagcaaatgcatcaacagtacattttcaaatctaattcttttcttattttgttttcaaatgagcaaactgtcatgtacaatttctcttgaacaagtgacaatcataaaaaaatgttatattaacttcagtttacagtaagcttcatttgcaggattccactgtggctggaattgtttaaaatttttgaataccatttccaaatctgtttaagactgcactaagcaaaatatgttaagaaggtttagaagacccaaacacaaacttgattgtatgttattgatatcaaatgctgctttaaactatttcatatagaatttctatagaatttaaatcgtcagaatatttaagtgcaaacttagtggctcgtctttgtaaatcagatgtatttatacaaaacaatttttctccagtttagaaattcaaaatctgaaaacatttcactgaattttttatatctctatacaaaatatgaaattagggcatttataatcttaatttctatttaataagcactgccctcataattatcaatactcttcacccagtgactcatgcatttctcatttgtttacttttttcatttattttaaaatttgagaagaatatgcatatctcttgctcaagttttatgttcatcaaatacactttcaaaattaccttcaattgttgtaagcaaagggataggccttttattaagtgtgtagctttatattagtcatgtttactgactgtaaagctttagcttcttccacttggctcaaaatatccatacagataatctgcataacactttgtaatctattcataccaatatgctttcaatttcagcataatgtattttgtcatttgatattatatcttttaatatttgataatcatctttaatttgtgtgcaaagtgtctcaactgcatttatcttgatgcccataatgtaactatatgtgattttaatgtcgtttttagaccagacaagaatatcctgtttgctcactgaattcccctacccctaaactatatatcctttgtacaatactaaaaaagttgatcatatttaaattcacagaatgcagcattttcttctgttaaattatgatgagttaaacaaggaacaaattaggcataattattttaggggcaaacagtggcttgtatacccctgtataaaccggaaacatttgctccattatatccctggccagaatttttaatgtaaatgcgataaacagaaatgaagactacataaagaaatgaagagtataggaaatggtaaaaataaaggtaaatataaagctaattttaaagtttttaattgccctaaaaaaactgtctaaagtaaaaactgtaatactgcattctgtgtatttacaacatgtttaaaattaaaatatataataagaatagaaaaagcacacaaactgtcaatatcatgaatgagaggggatatcactgcagattccaaagattacaaagacaataagggatactataagcaactttctcaatatacataagattcgagttcaacatattaggtaaaatgaacccattcctcaaaaaaactacaaactaccaaaactccctcaagaagaaatagattaaaaaatttaaaaacctgcatctgttaaagaaatttgtagttgaaaaacttttaaacaaaagaaaactttctatggtacaaaagaaagctgcttggaagaaggctgatacttctgcctggatttcacttatattatgcgccattcaagacaaagtattcaaaagataaatgtcaaatctacctcacttcattacactcaaaaagaggcaaacaatcattaagtaatatcaacataaattgacatcaagaaagcaagtagttgagcaaaactatttctacagtcatctattagactgtccggtaaataacatttatatgataattctgagttctgcattcagagtacttgtttaaaacatatttaagatacatccaaaatatttctattttaaaaattagtttaaccttttgacagttaaaatatcccagaaaattaaacctggaaagattaatttttccagtgtgccaaatgattgaggttttactgatttggggatttttaattcataaatttatctccattactcactagttgaactaaataacaggcaagtgaaatataagatgtctttgtcaaaacaagaataccttaaaattttacttagggctagatatttttatatgtaatgaaaaattttaaatctcgattttttttcttcctcacaacatcccaaatattgttgatgtatgcatgctgaaattgaaaaaaaattttatatcataccaataatactttcaaatgtataaacctttaaggtataaagtaaaacaaactttaccttagacacaggttcttgttcctttgcgggagcttctttttttaatcttgaaaacaagataagtattgaatattttattttatatgtacgatggtaaaatatgaaacagttctttctctgccagcctaaaataattaaaatgtagatcgaaactaatgtacattttatactttaatagtaaattgacctctgtaaatgttttaaggtaaaagttaaacgtatgagactaaatagtagattcgataaatgtgctaaatcaataaagacatttatttccttgttctctaaaaacaaggacacttaagaaatgttctctttgctaagtacaatttaaaataaaagacatacacattagtaaaacagtttcaaaacaagaattactctttaaaaattaaaagcaggttatatgcttacataagtaatatgcatcagtatttacgattacaggacttaagtgaaaaaagataaatattttatctattgtgaaattcaactaaatataacaatattatagttaacttactctggaggcagtaaaatcacagaagtaattagaattttgaggaatatattctctttaaaacctccataagcactgctcaaatattaaaacttcttgatttctaaaaatattaattataacttattaaaacattaacaaaggtatatgccatccagaaaatcttgtaaaataatcaatttaatctaagaactagcttatccaaaggatctttgttttagaagctgcagaaatgactaaatattatttgtgatattatacattaaactcaattttaatctgtgtaagtagggtacctacctgatctgaaatgtcattaatcaagagttaagtgatacataattttatgaaggcttaatagctatacctaaggaataacatatttaacataagcagcaactatattatcttaaatttcattgacaaaaaaaaagatatctaataggatagaaacgtcaaccatcctaaaagctactctcatggctaatcaatgaaacagagttggcaaaaccctccttcttcatccatcctttgagggcatatttgaaaaattagggctataaatgtttatactttgttaaacattaataattaactgtatgaaattacttatctgtattttagctattaggcaaaactgctacttaatatagattatgtcctttgtaaaaccactatattggcagtgcactacaataatttacaaccaacttgttaagccaattaaaatgaataaaacttgcagaaaaaattgacaaaagacacaaatgtcaatcattttgggggttaaagattttgtaattgtctcaagtatttaattgtgcacaatacttataaagatgagatcacatcaagtatacagtataacttcactgctttaatgcagtataaaggaaaataagttttaagaataaaattagttatgaagtactaagaaaacatgaaacattagtctaaaaaagcaaaaagcatgaaaaagcaaattaatgaagttttgaaataaatgtgtatattacaactcatttttatttctaagcatttagtcattttaaattcagtttgaaaaacaaattggtcacagaacaatttaaatatttcatgaaagatttttctccctcaacttatcgtagtaaatgttatcaaagtaagacctattatattcttataaaagaaatatcaccatgctaatcattttagcatatgcctattataataaattaattgtatgcagctattaaaatgagccccgttaagtatgttcattattgctggcatttcaacagaggaaacacagtcctcttgctatctctgtgatggaggttggtgacagaggtttttatcactctttattgtactggcaagaaactggtaggtgagaacaaagtaagttattgaaataacttgcattaagaggcctatgatttcaatcttgttttgtgccttttaccatattagtactctctttaaggaacagaatcgtaataactagtgaacacatttagaaaaataaatcttaaaaatatttagaaaagcacacaataaattttaaattataaaatgcatcactaaaatgtacactcaaactttgaactacaaaagtatactttaagattaatactactaacacatcattaacacttttagaaaagaaaaattttcttacctataattcttatttactaaagatacctgctgaaatagtcattattttagacattcaattactttggtagaagacagaaatttgctaagctcaaagttctgagctaatgacccaccattaggtaattatactttccacctgtgaatgttacaatacttcttaatagaaaaatatagtgtagtatttatagcaaacactatttaaaatttcaatgcaaagagaacaggactgactggtgatcaatttcaacatcattagtgatcaagattgcaagaaataacttttcccctctatgaaaatctgctgaaatagatctttctgatgtatttctacaggacaagcttttccctctaaagactaaaatgaccctatttgcatttttctgcaggtcttaggagcaatccatacaaaatttttgttttgtttttgcagacggagtttcgttcttgttgcccaggctggagtgcaatggcatgatctcggctcactgcaacctccacctcccaggttcaagcgattctcctgtctcagcctcccaagtagctgggattacaggcacatgccaccatgcctggctaatttttgtatttttagtagacacggggtttcatcatattggtcaggctggtctcgaactcctgacctcaggtgatccacctgcctcggccttccaaagtgctgggattacaggtatgagccaccgtgcccagccaatccatacaaaatttaacattctggctcacttatagtagtatgttcctttgaggtttcattcacactataaacataccatggggtgaggggaagaactataaggggaaaaatattcagattcatttcagctaggccacattctttctttctgatgacatttaaaagccaaaattttcaatgctgatgttagaaatgtaatctttaagaatatttgtaagcatactaaaaaagttgaaaagaggctgtaaagcaaccagtagtaaagtcagccagtaatcatgaccttcaacttagcccaggcgtggtgccacatgcctgtaatcccaatgctttgggaggccaaaatgggaggatagcttgagaccaggagtttgagaccagcctgggcaacatagtgagacctcatctctacaaaaaaatttttaaaaaattagccagacatggttgtacatacctgagtcccagctcagtctcaggaggctgaggcaggagaattgcttgagcccaggactttgaggctgcagtgagccatgactgcacactgcaatccagccctctggcttgagcaaaacagcaagaccctgtctcaaaaaaacaaacaaaaaacagcaaaataaaataaaaagaccattcactgagacattcagggactaaatttaatatagtaatcatcagactaagacataacagtaaaacatctactctaccatttctgatcatttgttctgagaattatcaatatatttatatgtggaaaggatgcctgagcaaaacatttaccaggttgtacatatttcagggattgtactaagtgttccagtccaaagttaaaaaagactgtctctcctctcaaggagttcactgtgaagaaaacacaatgaagcaaatgtttacattatgaaaaggtttagaaaagacatctttgttcagagacctaagccactatgaaagggaaagaggcaaggaagcaatgaagatactacagtgaacttggttttgcaaaaagagcaagaattagcaaagcagagtaaggagatccaaggcagagaaaaagcaaagaagtatgaaacagagaaagtatgaaaaagcaaagaagtatgaaacaagatgacaatatgagaattggtggtctcatatcactgaaatgtcaggcacaaagcaaagtagtccaagatgaaactgaaaacatacaagagcctcttcagggaaggtcttgattgccatgctaaagtgttcatgctaagaactttaatgctaataggaaagtatgaccaaatttgtgcatcagaaagacaaaggtctgtattggtagaagacaagctgagagtccagttaagagacagttaatgactttctcaattaaaacagtaacagtgtcaatggagaaaaggttggtttagggagatgagaacaagttaaaaccaaaagaatgtaagtatacactggataaaggtaaatgtggagaacaaatatgaccccctcaaatgcctgccctggctggtaagagattattcatgatatggaattcgaagaagggagaaagcattctttgagggaaaaataaattcagttttggacatattggatttgtggtgcttacagaacattcatatggaaatatttaccactcagacctgcctcttgtgtatctcatccttatacacaattccaaccacaacttctatttatttatttattttttaaacaaggtctcactctgttgcccaagctggagtgcagtggtatgatcacggctcactgtaacctccacatcccaggctccagtgatcctctcatcaccatctcctgagtaactgggattacagtcacaccacaacacttggctaatttttatacttttttgtagagatggggtttcaccatgttgcgcaggctggtctcgaactcttgagcccaagtgacccacctgtcttggcctcccaaagtgctggggttacaggtgtgagctaccacacctggccaccaaccatcacttctcttcatataacttcaaaatcaacatccagagaatgactcctccatttttaatacactttgttatttttcaaacagttgacaattcagttcagaaacatcacagtgtattagacttgggtcctaagagattatattattcaactacccccatcttgcagatgagaaaatctgaggcctaaaaatgctaaagttataaagccattaagcaatagaaggaggattaaatgtgtgggttctacttcaaatttccactgcactgcctcaagccaattcctctcctgtgaaccaggctcccttatgatcatgccagggaaactgaaaaccttaactgatctctctgcctctatatgttttccactctaaaacatgctgagtatcactgctaaattaatcctactaaaagaccagtttataccattctttgctcaaatgttatattgcccaaacatcattagggcagtatttctatgaagtttgagcaatagaacataggattgggacagtaaactggtatgctagattactgtcccaatcgtatgattgtgtcagttgctgcctacccttctgcagaaagagggccttaacactgaagcttagtcctatccagtttcttggccaatcacaaacaaggcaggatgtacacctggaactacaagcagaagcagagaagcaatagaggatactactgagtagtttagtctctgaagacagactgacagaatttaaattgaggctctccacttaacaggtatgtgcgaccttgggcaaattatttaacatatctgtatctcagttgtctcatccataaaatcagacagtaacagctcatatctcacaaatatgtgagaattaaatgagtaaataaatgcaaaacacttagaaaagtgtctgccacactgtatgtgctcagtaaatgttagttattattgtcatgggtatgggtagagtatagaatcaatcttcttgctcagaatctgcttgagagtatacaacaaatttagtataccatgtttccacctcaccctcaacccaacagacattaattttgattgctggtctattctccttaggaccagttctattttttctagtatgaaatgatctgctaatcttagaacaccagggtatgatttggccatctaaagctattataacaaagagcagaataatcattttagatagacagaagaaagaactaggtaaagacagagagacaagaaataaaaaagaccaaaatattcatgtgtaaaaacgtgaagaaaaaaaataagaccatcaatgtaggcagaagattttaatgacagtctaggactctattttattattttggtttgttggtaatattgaattataccctggatatttaatttataatctataagcaacaaccctcaggaaccagagactgaaaaaaatggtagtaacctcagaatcactggtagagattggtacagtttgtcctaaatgaaagactacactaaagtttcatttatttttccatctcactgggtctcaaattctccctgcttaccagatatcaaaggcagaagtccaaattgccagaaaccacttgcaattacataccaggagcaaatatattaagtctattttgaaaaggaagaactattttacagttcctaaagatcggtttgagatattaatgtctatggtaggatgagagaatctaggggctaaaatcccggtcacatttcaaaagtttaaagaaggaaacaagcccaaaatgaactcaatagatcagtttgttttttttttttaatcttgctaaattaatgaaatgaagtctcccaacaattttgaacacataagagctacagagttataatttaggattatgaccagagccaataattcctccaagtaagttcaaaatttcacaggaaaataatggaatgaacccttatatatcttcaatggtcacaggttcaatgacagtaagtatctcttaacagaaataatattttaaaatataagatttatagaaaaaggctgccattctgttcctaagagtttacttactgcttacatttatgaaagataattaatgacttactggtttgagaatagcagaataaagtgctatttcaccttgagaataggtccagattctcttctgatacagcatttcacaaaaaaaatcccataatgcaatatatacatgatattagtggtttaattgattatgaaatcagttgactatagtccctgtaaaaaatgtggattcagtgtctacatttctaattcccttattctgtaattgctttggtgctataaaccatgttttattcatgtttccaacacctgacacagaatcttgcacacataaaaagtagggtgtcaatgttcagtgacaaagaatatatgggaaggttgtctatatcatactgtgaatgagccatgtagttactactggtgctaagtataaagctcattaaattagggggatttaataaagtataatacacacattaacatctgtaaaacacattttacatatttctaacatcttcaaaacaaagatattttcaactcgatttcacagaaaaagaaactgaagtaactgtaccttaaataaagttagtgaggcagctgggtcctttaactctaatattttgactgtcaatgtctttcccattgtactttgcttagaacaaacatggatgtcactcagagaactaaatcaacttttaaaatctcttgaaattgtggcttttaggatatttgattcaacaataaaataggcaaccagttaagtagcctagtttagcaaacttgagttattatgtatttaccacagattcttacactctcaagatctgttagaggaaattatcattctattctcaactttttgtcaagaaaaagaaacttacaaaactcaaacctttacttctattttgttataattcatccatccaggtagatatacaagaaaacagaggaggggagaaatggaggtaagggagaaacagaaaagaacaatttcatgactgagtttgactttgcctgtttcatgtcttcactcaaatgtcatctctcagtgaggcctcactaaattaaaaatggcagccttccaacacctaccccatactcctttatcacccttctctgattcatatttctccatagtattgatcatcatctaacatattatatgttttatttacttttattgtctttcacaaatataatgtaagttccataagagcagagattagtctatatttctagaaactaggacaatgccaggcacaaagtagatgctcaataaatattcgctgaataaatacatgatgcccaaagaggcaaagtgttttgccaaaatgtgacaaaaacagggcaagaatctgagcctctgtagtttaataattatttttctaagaatgatgatggactcaaactgaaccaatcacatattttattcaacagtaaccaaaaagcacatatgcatgaaatggctatctgaccagatgaataaactagaataaaatgatggtaaggagggattagactcaaactaaaactcattagcactaaactgaaaattcaactaattgcttacaataagcaaactttgtactgactgccaagtgttttatttgaacctttttttaaaaatgaatttactgggaaagaactttaagaattcatactttaagaaaatgaatttgatacatactataaaaaaaaagtctatgtaagaccacaaagcagtacagtcattccctggtattggtaggggattggttacagaacctgcccccaccccacaggtcgcccctacctccccaaacctccaccaggaataacaaaatcctcagatgctcagatcacttatacaatgtaaatgctatgtaaatagttgttatattgtattgttttttatttgtattttttattgttatattgttatttgttattgtttttccccccaaatattttcaatccatggttggctgaatctgcagacacaaaacccaaggatatgaaggattgactgtactcctacattactatattaacaatgtggtttatcctgcttttgacctatgaccaaggtaaggtgaatatctgtaaatgaactaatgttaaaaatggaaaaagttattgtttctggataaacttttaaaaactgggtagagagaggagataacaaaaattcctagagacaaataagaaaaaaaaaaaaacaactagtatatcactaagtccactactaagaaacaaactacttgcggagattttggaaaacctttcacttaaaatataaattagtttggaaattcagaactattagattcaactcttttgataattaattgcaagaaacacgtcatataataggtggtcatctaaaccggctttaactggtcatctaaaccggcctgcctatccttatggctattaagatcacaaaaggcattttgctagtctttaaaatttaagaaattagtatagtaaccttttcattgtgctgcaagaaaaaaatgcaaggtatactaactagatatagcactgtctgcagccaagtaacaaggcttccatataacaatgagagcaatgttcctatttataagataaaatctacaccctttattcattagcaaataattcctgaggcacttaaacaatataatttttattaaaaggataatagtataaaaagtttagatctatattcaatgtaactaaaataaacacatgacaaatttaaaatatataaaggaaagaaatacatgcattactggtcaccatatgtatgttttttaacatgttacctttacccaaaggagctacattaatggctaagtagacattacatcttagacgcacaaatacgtaactttaaaactggctcttaaggtctgcaagtagtattgccaattctttacacctaagaactcacaattaaggtaatattaataataatcccaataggacagagtatctaataatgtttaatgggcttagtaacagccaaatttaaaatctacaaataggcagctacacaaaatctgtagagaattctaagaaatctcttggagttcttaaaacaaacactaaacaaattttaaataatataatataaaaatagacatcataaaatagacattaataaattttgagaacataaaaccaagctattaaattaatttttaaaaaatcaaaatgcaagaatcggtattgttaaaaaattacagaattaatactggttaatagattttatatgtcagtaaaaataactgcaattttggaacttaattgtggagacctgttgttccaaggatatgaaagtagccatggtttcctaacaactagagtttttatattccttggactgcattcatgctagagaaagatttaaaggcagcagccaaaatgactaaacttcaacttggatgctgaagcagtggtttgatgggcttttcttggtcataactgactcataagcttaagatcataagccaaagcccccagtgggaagtatgctcaatttggtgggccttaaagccatctctggccaaacaacatcagccttatgggaggccagccatgtagaaagggagtctccccaagatctgatttcttgaggccacaacctaagagcaggtcccacagtcaaattattcacattccttggaaagagagaacaggcatcagttgtgtccatcgaagggggacactgtccaggtataccctggatattttttgaaatctctgggctgcttctgcatctgaaaaataagaaaaatagcacaatgacagacaacgaatgagaaaaagacaattatctggcctaaaacttaagacgtataagaaattaagaaagcagacaaacagacaaaagacaaacagccatataatttggaatctattattctgaaggcaagtacagcagagaaaaacaaaaattattgtaagcaaagaaaagaccatagcaacaaatgttatttttagacagcgcaaactggagaaaaaaaaatatgttaagatatgtcaacctgacacaaagataaggtggaataagaatctagtcccatttgaaagctgaaaagagctgaataatgagagctagtgtcatgaacttggctgctcaactgcctttgtgtaagaaaacatctcagaactttgaacttaggaaattccaacttgtcttgcaccaggtcacgagctccatagagcaggaacctatttcaacaagcagctttaaaaaaaaaacaaaaaaacaacaacatactttaatacttttcattcgtattaatgatacatttaaaaatgcaatagtgctaaaatccatcaaagtaaaatgcactgaataaaaattaaacttactcagaaaggtgctcagaagttgggatacaaacagaaactgaaattagaagaaaagttttacatttacaacagcatatgaaatatgatgagtgagaataatgatttagtaaagagaccatattgtggatgaccaaaaatactggaataaaagtcaaaaatctaaagtagcacagttacatatacgtacctttctgcattacaacttggcaagtatgagttttatgttgacttaagtgtgtagccatattatctaagccagaaacatcacttaggaaatcacaattaaggcacactagagtaatgcccctaaaaaaaaaagcattaaaaaaagatttttatcttttatgaaaatccacttataagtttgatgattatttttccataatttgctttttgtgccatacataactataacttcccatttttgttatataaatttgacataaactgacattattctctggtaaatgacatagccatgtccaaattatgctaccatttatttacagaaagtatttattttacacttttacctgtcataccaattgttaaaagttaggagtcagaagacctagagtcagtcttggctccacaaccaacttgtgtaacttaggcaagtcacattctatttgtcctcccacgcatctgcaaagtgaacatagcgtattcattcacttgatatttactggagctatttttatatatactgtactactaggtattgtgaatataatggtgaacaagaaatagtactgtctatgctcgaatggagcttacttagaatctggtgttttattcagttggagataaaatcagaagaaaaatgggaaggctttaaaaacagatcacgttttagccaccatcgattgtacattatgtgtcaagagttttcccatttattatttcatctgattctcactacaaccatcaaggttggtattattcttacttaacactgaactagctaaagtagttaataaaatactaaaatctgcaaacttgagttcctcatcatctcagcactgtgaactagggagtctcactctgtcacccaggcgggagtgcagtggcgtgatctcagctcactgcaacctccacctcctgggttcaagcgattctcctgcctcaggcccctgagtagctgggactacaggctcatgctaccacacctggctaatttttgtatttttactagagacggggtttcaccatgttggtcaggctggtctcgaactcctgaccttgtgatcagccccacctcggcctcccagtgctgggattacaggcgtgagccactgcgcccggcctgagtgctgtagttcttaaatgaaatgtgtaattattataaatgtttaaagaggttaggaaacaattccctagttatcaatactttatttttgagtacaggaagagtttttgtcctcactggatctaactgtttagcatttgctatttgaagtatttgaatacacttgacataaagtacattaagattctaacttaaaatgcatttagacttgtgtgatttttagctgaaaggtgttttaaaatattaagcctgtaaaaatactaaaatgcttcagataacttagccactatatatttaatttcttataagagttaagcacttgggagttggttacaccaagcatttgaagtgctatttaaaagaaaatcaattatattaaatgtacaaatgatgttaagttgcctaaagtaatttgaattgtaaacagaactcttgaaaaaaatttagtctattgaactagaatgccccgtgcctcttctaccagtagaaacaatacccatcctttaaagccaagtaggcctaatacctatccagatcactacaagaactgtaatatttttcctctctgaaataagtctcattgcacttattaaaacgcatagttatttatgttcacaccttaactcccacccaataaactgtactgtacattccctgaaggctggttccaacactgcttcatcactgtcatctttacaggacctgctactttatgtgcaagacagatacgtaataaatagttacggaatgaatagtctatttcaataagaataattacattaatcattgtcatatagaattataactatgctaagctctattcacagaaattgaacaattttcaatttgagactagccaggtttagtgaaaaaacatcccagatctttaaaaccacatagttcattgagaaactaaacacacaactgagcttgaccacaatgaggtaaaaattgaattaaactctcattcttagaatgcaataaaaccatattcactcttgtaactgtttttagtaaaggtaacatctaatgtagcttaattatttccctagattcagtaaatattttaaaagtagtactaacattttaaaaattgaatgatattttctctccctgtgagctactagtctaacatcacagatgggacctattttccacgtacatcattttcaatatatacattaatttattcaacaaatatttactgagtgcctactatgtgccaggcacagacaaaaaaaccaaaccacacacaatatagtgagagaacataggcaataagcaagtaaaataaaagtatgttagatgatctagagaaaagtaaaacataaacaggagatagggaatgctgggataaagcaaagggaagaggatacagttttaaattttgtagtcaaggaaagactcactcaatcaaagtagaggcctaaaggagacaaaagagctaaccatacaatatctgggggaaagcaaactaggcataggaaataataaatgcaaaggtcttgagacataccatcccctcttctacattttccactaatcaaaagcatcaaaataagtattcgctaaacttatctctacagatcagcttggtggaacaaagacactgacatttcaaggagcaatggcaacataaaataaacaaagaaagttcaagaaatcagaagaatatgaaacaatagcgctcagtggattctaagtgtgtggtataaccaaagataactatcaatgcctttagaaaattttatcaacagttctttcagtatagtaaaattgtataattctctttattttcaaaagaaaatattagaattataaaaatcatatactgatttcaagaattccagtggttaaaggaaatttacttcaaaactaaaaaagtgttcattcctttaagagatagcttagctatctttttaatattcaaatattgttggcgagccttatttttgttctcattttacaatgcaaacgcatcaaggtttcctctggacaccacctttccactgaaataaattcagcaagagaacaatggctaatcatacttctggtctaagaatacaatgaacacaactctctaatgtccagtagcaatcatttatattttcaaattaggtaccctaatatcaggtttaaaaaaagttatagcaaaccacaatgagataccactttatacccattagggtgactataatcaaaaagagataataaaaagtgttggcaaatatgtggagaaattggaaccctcaaacactgctggtgggaatgtaaaatagtggagctactttggaaaacagtctggtgcttcctcaaacgctcagcatggagttatcaaacagaccagcaattccaatcataagtatatactaaagagaaataaaaatacatgtccatacaaaaacatgcacacacatgttcacagtagtattattcataagggcctcaaaatgaaaacaatctaaataaataaactatgatgtacctttacaatgggttttgcagcaatttttaacaatgaaatattgatacatgctacaacatagatgaattttgaaaacattatgctaaatgaaagaagccacagaggaccacatcatgtatcattttttatatgaaatgtccagaatgggcaaatattacacagacagaaagtagactagttgttgttcagggatgggaagagctggagagaaatgggaatgaccactaatgggtacagggtttctttctggagtgataaaaatgtaccaaaactaactggtgattgctgcacaactctgtgaatatcctaaaacctataaacacataaattgtatggtatgctaattctacctcaataaagctgttgtgttaaaaaaaatttaagtcattacaatttttcaatagaaagagtaaaaaaagatcaactagttaccggagattttctgaatgcttcttaaaaatacaaaaccttttgcttggacggttactatgaaagctggagaaacaaaagagatagtaaaaattttattatacaataagtcacattaatttataactatatttcaagtccatacttaagtttctagtttgtaataaaagattataatgtaaataataaaataatgcctgtcacttccatttaattcaatattttatctgatattccattttacctattatattctaatgacactattttcctaggcatattcttagatggttagcactgtaccttaccattatattaaaaaaggaaatactgagaattaagaaaatgtaaagaacatcaaattacatattttgatttactgagttgaaaacaattctaaatttttgttaataacacgtgtgctacaatatgaagttattaatagtaattcttttttattactctccaattttaacatgtttgtgtagggggagtggggtaggatccaaatgatctgggaagtaaacagaacttgagctaaatgccactgtttaccatctgtaaattcaaacatttacagtgttccttgtaattactagtagactttttttcttcttaagagatggatctcactatgttgcccagttggaatcaaactcctgggctcaagtgatctttctgcctcagtctcctgggtagctgaaactacagagggaggccaccgagcctggctttctagtagagtgttttttattaaaaaaaaaaaaaaaaaaaaaaaggaactcatgagttaaaacaatgtttcctctaagcacagaaaagaaaactaacccaattttgtagcccatgataatagcttctatataccctttttaattccagtaaggaaagtttcctgtactagaaagccagtattagaccaaaagtgtaaatatcacctaacagcttacagttgtccctcctcaccaccgttaaccacatttcactttctgtggcttctgttacacacatacagcacaataacatattttaagagagacagactacgttcatataatttttattacagtatattgttattataattgttctattgttaattatcttactgtgtgtaatttataaataaacctttattatacatagtatgtataggaaaaaaaaagtatagtacacatagagcgtaatactatccacagtttcaggcgttcactggggggtcttggaatatataccccagcagataagggggactactgtatttcaaaatgtagtcttcccccaccaacaaccccatcccccgtgacaacccctcaacctacaaagggcagaggagctcaggaatttgctttaacaagcattttcagtgattcacacacacgctaaagtttaagaaacagcagccaacacacctgggtcaatgcttactctcagatacaaggtaattgtccccagcaccacatgtatgtatagggaaaaaaaggaaaaaaaaaatatatatatatacatatattcctacccaactatctgcagctttccttcatgcaatcacagactctgtatgtgtcactagctataatccccagaaaatatcctcagatttctaatagtcatttcttcaacctaggagtaattactattagagtttacaaatttaagatggtatcacaaaaacaaagttttgttagaagagtacattgggaagttgggaagccctgaaattatatgcaaaaacttgtatacacaactatatttcctcagagaaataagtccaagattttgtttgattactaaaacatgtgaaccaaaataagttatttttaaacgagatttaaaagctctttattctttctcttcaaacaagcaggctatttatggtttatttatctattaaatataagaggagagaaaatcttatagtatagggtcttttgatagcctctgcatttgtctacaacttataccatatcataatgttgaccattttaaatttttggttacctgaattgttttagagtttctcatctataaaaagggatttctaccacctgcttgatttctctgtatttaattccatacttatagttttgtgtatcacaggaagggaaaagtgaattcacagctcacacataaaaaggaaaaaaaaatactacccttcttcctattagctctccataaaggtaatagcaatatagaaataaatctaagaaaggttttttattacaatatagtaaaaatataatgttaaaacctaattttttaaaaaaatcccttacttgattagctgacagtatataattatcaaaactcattaagcaattctctaaaaataggtgaattttattgtgtataaattatacctcaagaaaactgaggtcaaaaacctcctctaatcatattttcttcataatcttgattccacataagtaacaaccttactttctaagaaacataaaaggaacaatttccttaaaaattttaagacattagactagaggccgatgatacaacaacaaaggcaagctgcctgccctagagtttatggttgcttggggggagtgtttgggggagaaaggggatggcacagaatgaatgcccaaaaaatatttgctaaatcaatgaatacatattcataaataattaacacaagataaaagtcaatagtgacacatacagagtttgtggttgcatgaaggaaagctgcaagacagatggggtagaagccagctaacaattaggagttcactgcagttagaagactcttactgcttcacttccaggcaaagcaaagagtaactgtgaagatatagaagaattttcaagagaataaaaggagttgaaggagttgaaaagtagttaggaatctgatatggaaaggtgttatattttccagaaaatctgaagttcattctatcaatgttaggaaaggattttaggccaaagaatgacctgaccagatttgcctacagcaaaagaaaggatgaactggaaaaaagggggaaaactgtaggcagaagacataatagtctaactagtcctatgattatcatttagtgtcaataaatttctgtaaaatttataatgaagtcaagcagacctttttaaaattcagtactctgtcgtacctactgtgtaagaaacaaatttttatactagctttctttttccttggaaattttaaaaatcatccctcaaagcctaagtgaaatttacagaaaatcttcccttatttcttgtttaaagatttcatctttacctcctccgtactttcatagtcatttgtttatcacaataacctaggtaaatttatttccccttctaaattgtgaaaattacagtcaggaactcccccaatcctaataatgacaacttagaaattaatagctatcattacttgaatatctcttaagtgcaaattgttattaagcactttaatacagtttttctaaaagtcacaataactttcttttcaagaaatgcaatctgagagtcagattaagtaatttgttcaaagttccacatgtatacagtgaaggttggattcaaatccagacttgtttgattcttcacccccagcttgccatacttcttagcaaattgtattaaataccttcctagtaggtacataataaaatacatgaacctggttgaaataataaaactctgctacaaaaaagagatactgcttatgtatgttaacttaattctcttttatgtaaagaaaaatgcttcttatacatcattttgaggaataatagcaagattatagagcaatttatgtgcatttttttcagataatttctattactacctaaaagctataagccaataaggtacaataatttaaagaactgaacctaaaaaatgctgcttaaaaaaaattaaaaattacacatttaatgatgcttttctttgaaaagatcttactccaacaatactccaactgcttcaagatttttgaacaccttcttctgagattttatttaggaccttttataattaaaacaaataatgactatcacctgcagtttgtaatgtgctaggtgatatgataaatacaaagacccccttcttctcaagaagataatacaaacacaaataaatacaataaaaggcaaaatagggccaggcacggtggctcatgcctgtaatccagcactttgggaggccaaggcgggtggatcaactgaggtcaggagtttgagaccagcctggacaacatggtgaaagcccatctctactaaaaatacaaaaattagctgggcatgttggcggcacctgtaatcacagctacttgggaggctgaggcaggagaattgcgtgaacctgggaggtggaggttgcagtgagccaagatcttgccactgcactctagcctgggtgacaggtgacagagcaagactctgtctcaaaaaaaaaaaaaaaaaaggcaaaatagatgaatagtacacaattcaaagaaagtaacggctgtggtgatcagacacttgaaaaaagaaggtaaactgagaggaaggaacagggtattctgggaactaacaaggaataccgaatagtcactgtagaaaacaaacatggggccaggtgcagagggggtgctcagctataatcattgcactttaagaggctagagtaggcagatcacttaagcccaggagcccatgaccagcctgggcaaaatggaaaaaatcccatccctacaaaaaaaaaaaattatctgagcatggtagtgcatgcctgtaagtcccagctactcaagacgctgaggtgggaggatcacctgagcccagaaggttgaggctgtagtgaactgtgatggagccactgcactccagcctgggttggagtgagaccctttctcaaaaaaaaaaaaaaaaaaggaaaaaagaaagaaaattaatatggaagaaactatactctgtggaagattaaccaacttacagggatggattggggcaggtatgagaccaaagggaaaaagaccaattgagaggctacagagttagtacgggataggaattaaaggttctcatgctttggagaaaatcaggcttctgtatatataaacctcaaacttctaacaagaatcaacactgcagagaagagttcgccattcagtgggatgcacctaatgcaatgagggaagcaagggtaccactgaggttgagaaaaagacaaaaagacctacccaaccctaagagtggcaatggaagcttttagttccatatgacactaagagctgtgtgtgatgacaatgaacaagaatttcttgtatattgcaaactaattagaagagtatattttgaatgttcccatcacaaagaaatgataaatgtagctgggcatggtggcacacacctatatggctactcaggaggctaacacaggaggatcacttcagcctaggagtttgaggttgcagtgagctttgactgcaagacctagcactctggggtgacagagtgagaccccatctcacaaaaaaagaaaaagaagaagaaatgaagaaatgataaaattggaagtgatggatatccctgggtttattacatattgtatgcttgtaacaaaatatcacatgtactccacaaatatgaagtagtctctataaaaatttttaaattaattaatttcacatggctgtcaggaacattaaacaaattaagttttaaaaagtgagtgacaacaatgtcaaatactctaaagaagtcacagaggagtaagaatgaaaaatagggagtaaatatggtgatatgttcataacagataatctttaaaagaggaatgttagttggtaggtgggggcaatactcaaaaggtaaagaaatgaatcacaataaagctggtagcaaacactttttacaaatgttaatggtaaaaaggaagacaagaaataaggaaaacaggcagttgggacaaactgtcctcttccaaaaaattttttaaatacctgaaaatgtttgtaagcagaaggaaccatatagagagaaagagatgaagatccaagttaactgaatatggtcatggtgaactgggggagaaaggacagttaatggggaagtgagacatgttagatttttaagattaatgtctgattgaaggtaacaggaaaaatacgtggggttgaaaagagttaattttaggaaaaataaaaaggatgacctacaattgactaattaataggccaagttaacaactgagaaactaaaataaaatctttagggtactgaagaaggattaaacaaatgttgcaggtaaaaataaagagatcttttttaaaaaaataagacctaatcagaattaaagtttttgaaatcagagttgactaaatcaaggaccatttgatagtctagaagtgagcacagaggaagttcaaaagagaagaggttcaaatcttaccttggcctttatgccagtgagcatgactaaagatgtaaaggattctaggacaaaaagccacaatcaaaacagatgatcctgagagtaaggttgactacaaaattaagatgggtgctactaggctggaaaaaggagtcaaagctctgaacatcatggggtaatggaaatccaaaaggaatgaacagtttataggaagagatttaaatagtactgtagtttcaagaaaaaaaaagacaatatatgaacttaaaagttgatgtgaaatgctggcactaaagaagcaagataccatgaggtcaggccaaccatgaagacatgggaaaaccgagagaagtgctgaagccaccaaaaaaggtagaagaatccttgaaagcagtagttgataatgaccagcaagtaacagagaagtcatgtgtaatctgcaagaaagtcacttataatacattaattctaattttaaacaaaaactgaacaaacttactttgaaaaagcaaactctcaggtttatatctaaacaacttttgcctacttaaaaaaaatacaaacccattctgaaggaataaagtattcccctaatgagatctaaaaatgaaaataatgcagactctgaaggcttttcctaacatagtgtaaatagtaagtactcaaataatctaagttgaatgaattaatgaaaaagaattccaaaagtggcatcatggtggaatggtgtctcattttcactgaatggatgcaagtatagatggcctgacagatggataaaaagacagttggaatacagaaagagaaacagactccactgaaaatcttaaagtctctcaaagtgactgctttaaagaggatgacgccactacagcctgggcgacacagcgagactccgtctcaaaaaaaaaaaaaaaaaaggaggatgacgctcatgagattacaagtatttatttagtaaatatatttaaaaatttaaaattctgttggaaagtaaccattattgaaacaccaatggggcaataaaaagttccatggaaaaactatttcccagccgggtgcaatggctcatgcctgtaatcccagcactttgggaggccaaggcgggcagatcacttgaggtcagcagtttgagaccagcctggccaacatggtgaaaccctgtctctactaaaaatccaaaaactagccaggcatggtggctcacacctgttgtcccagctactcaggaggcgaaggcaggggaattgcttgatcctgggaggcagaggtttcagtgagctgatgccactgcactccagcctgggcaacagagcgagactccatctcaaaaaaataaaaaagaaaaactattaccctaacaaacctattctaatttcattagcttaatttttcttacaattttagtcccataatttctagttactatgctgagaaataggaccaggcaatatcctaaaagttccttattgttagatccttttagctccttgaagagaaaaactggcttctaataggataactttgtttttgaaacagaaacttgctgaactataattttaattggcaatttacacatttaattcatcttacctcatcatatgatttacataggctttgctacagctagtgttgtatctgcaaaaactacagtggacgtacgtaggaaagtggtttgcaaaatcttttatttcggaacaacactcaatgcatttgtgaatgccccgacgataccttagggagacattaaaaaaatgataaaaatatattttaaaacaaaaataataaggaagagccttaataatgttctcttaactaaagtataagtttttatacttaagtttaaattatattgtatatcaggaataaaagattaccttaaattcctcaatgctgtattgactttactttttttattgctactagccaatgtgctttgtttcttttgcatattagagatttttggtttgtatttagatttacttccattaggcttacttgtattaggtttacttgcgttggatttgactgtattaggtttacttgtattagattttgcaggatttttagcagttatatttttagtccttggaggtgagagctgaagggtagaagcacttgcactaatggaaggtgtaggtgaagctcctgattgcagaggtccaactgaagctcgaatagtaacctacaaaaataaagagaagatttgctttaagagattaatcagtacattaatattaaaatatcatggtacaaaaatagttaaaaatcaagaattttgaaaaaagcacatataaactacaatcaggtaagtctcccatttattctaaatgttcaaactattaaatgatattaaacttgatattaagttgtaatattacatttttgtattgatatcagttatatgttaacacagttatcagtgaataattaggagttaatacaaattatatgaatatacaaagagcacattccatagctatttttatgccctgacttaactttaagaaattcacaagcatagagctcaaaatttaaatctcaagcctgaaaaataattctagaaaggcctaaattaccctttaacaactataaaagaaacagatctacagtaaatgtgatctcctctttccaggggctcagtgcccaagatttatgcttacaaatgttatgggaggagttacatcaatttattatactgcatagagggctaaataatattcagaaatttcttaaagtaaactaatacaaagttcatcatttagtattcagaatgagaaaatgtttaatttcatctgttggttgacaatgaaaaacacaagtgcctaccaacattctggttaatcatttgactataccctcctccggtatttgaggaacagtcaataaggaagtcctatgacatacatgtgcttgggtaacatacaatggcactggaccaggaatcaaaaggccttcctagccatgtgaccttgaacaaggaacttatcctctctatgcttcttcacatctataacatggggcaatacctgccttattaacctcagtggattgtggtatgaattagacaacagaatgtatgaaaaagtacactgaaagtctaattctaaggtgctataaaaacatttagtatcattatcattaatattattattattaataagggaaaaaatgagagaggactgcactgcttacattagtgttctgcatgtctagtcccaacatggaatgaatggattgcagggaaggatgctggatagcttctcttgctatcatgtcttcagagcatggctttatattgttttagttaattcaaataacagacatacccacattcaaaggaaagtacccaaagccaaaaataaatgttttggggattattcactttggattatccatgcctctgtttccctccactggagcaaatattcaagagctgactgtatataaagaagtcagagaaaacagatgtacataaggcaaaaagggaaaagtaaattacaatcatcagtatgcagtcagacatgtgtttgctcacttaaaacacaatgctatccagcagtagaacttgcttctcagagtaaactcagtaataacaactgcaacaaacatctgagaacttatggaactcaaggcactgtaccagatgctggggacacaaagataaataaaacatgattcctgatctcaagcatcttatagtttagcaactaaagtcaacatatacactttcaactgaaagctcaaaaatagcctataaaatattgaaacaacccattgacccaggaaaagttaattgagttgtactttttaaaaaggactactactctaacctaacagctatcactgaactcaaaacaatggttagaagtttttccttctacacataaaattaaaacctaaaattagagtctgagcaaaaatctgaagtcatttaaaaatacattcaatatataaagccgggcaggagttaatttctattatcatacaaaatgttaaaatacaatatattttaactcacttttgttccaggaggcaatccttctagttgtttaggttttataaatgttcgatggtgttgagtcttatgatccattttctccttgcatgtcaaaaactgcagcctgcattttgtacaacgatgtattccttttttctgtttagaaaaaaacagaaaaagggggaaaaataatttcaaaaactacaaatcctgtgtcctgaaactgctgacttaattttaatgatacctaaataatgtaaaaacttgcggtttaacatctcctatcataataatataaaatgcctcattttttaaaagtcattacattagtatttgggtttcaaaagtgttcgctactatgtaagaactgtacatgaaagttctatcaataggttctaataaaacttctattaattgtggtgagaaatctctttcgattataaacttgaagtaaacacatactttgaaaatgagatgtactacgtttttatcctagaaaaaggaaattatttctaatttttgctatttctagttggttgaaaagttggtaaaataaattaaactctctaaaaccaaataaatctaaccagacatttcaaagaaggttattttatagaagtggttacataaaccaatgctgtccaataatatctcctatgataatgaaatatttgagagctgtattgtccaacacagtagccactagccacatgtggttattgagcacctgaaatgtggccactgtgactaaggaactacatttttaatactgtttaactttaattaatttaaatctaaaaagccatatgtggctagtagctactacatcagacaatgtggatgaagaggcataaaacagaacaactgaacttactgagaaccccttgactgagtccctcctcaaacccagtcctgtcattattctacagatgggaaatgggacccaaaaaaatgctaaggcacttccccatagctagttactgacattaccagggccctgatccagtgttctttctactacagattatcaactgcaatttttaccctcattattttatatatatatatattttatatatatatatattatatatatatataatatatatatattatatatatattatatatatattatatatatatattatatatatatattatatatatataatatatatattatatatatatattatatatatataatatatatatatagtggttttagagaaaccactcttttgtagttatatgttgttttacatatatatatatatatacacatgcacacacacataattatacaacatataattataaaggaatgccttatctaaagctgtatctctgccagatacatcactatgtccattgaaatacaactgtttatttatttatttattaacttttaagctcagggaacatgtgcaggatgtgcaggtttgatacacaggtaaacgtgtatcccggaggttttttgtacagattatttcatcacccaggcattcattagttatttttcctgatcctctctctcctcccaccctctgccctctggcaggcctaagtatgtgttgttcccctctatgtgtcttgtgttctcatcatttagctcccacttataaatgagaaaacacggtatttttctgttcctgcattagtttgctaaggataatggcctccagctccatccatgtccctgcaaaggacatgatctcattcctttctttggctgcatagtattccatggtgtatatgtaccacatttttttcatccagtccaccactgatgggcatctaggctgattgcatgtctttgctattgtgaatagtgctacaaagaacatatgtgtgcatatgtcttaacagaacgatttatattcttttgggtatatacccagcaatgggattgctgggtggaatgctatttctgtctctaggtcttcaaggaattgccacactctcttccacaatggttaatttacactcccaccaacagtataaaagcactcctttgctccataaccttgctagcatctattatttttttatcttttaataatagccattctgacaggtgtgagatggtatctcactgtagttttgatttgcattccctaatgatcagtgatgttgagttttttttcatatcattgttggccgcatgtatgtcttcttttgagacgtgtccatatcctttgcccgctttctaatggggttggtttctttcttgtaaatctgcttaaattccttatagatgtagatattagacctttgtcagatgcatagtttgcaaaaattttctcccattctgtaagttgtctgcttactttgttgacagtttcttttgctgtgcagaagctctttaattagatctcatgtgtcaatttttgcttttgttgcaattgcttttggtgtcttcatcatgaaatctttgcctttgcctatgcctatgtcctgaatggtattgcctaggtttcttctagggtttttatagttttaggttttacatttaagtctttaatccatcttgggttaattttggtgtatgatgtaaggaaggggtccagtttcagttttctgcctatggccagccagtttcccaatgaccatttattgaataggggaatcctttccccatagcttgtttttgtcaggtttgtcgaagatcagatggttgtaggtgtgcggttttatttctgggttctctatactattccattgttctatgcatctgttcttgttccagtaccaagctgttttggttactatagccctgtagtatagtttgaaatcaggtagtgtgattcctccagctttgttctttttgcttaggattgacttggctattcgggctatttttcgttccatatgaattttaaaatggcttttcctagttttgtgaagaatgtccatggtagtttaatgggaatagcactgaatctataaattactttgggcagtatggccattttcatgatattgattcttcctatccatgagcatggaatgtttttccatttgtttgtgtcatctctgatttctctgagcagtgatctgtttaatagttctcactgcagagatcattcacttcccttgttaattgtattcctaggtatttcattctttttctggccattgtgaaggggagttcattcatgatttggttcttggcttgcctgttattggtatatagaaaagctagtgatttttgcacattgactttgtaccttgggactttgctgaagttgcttatcagcttaagaagcttttgggctgagatgatggggtttctagatataggatcatgtcatcagcaaacaaagatagtttgacttcctctcttcctatttgaatgtgcattgtttctttcttttgcctgattgccctggccagaacttccagtactatgttgaataggagtggtgagagagggcatccttgtcttgtgctggttttcaaggggaatgcttccagcttttgcccattcagtatgatactggctgtgggtttgtcatatatggctcttattattttgaggtatgttccctcagtacctagtttattgagagtttttaacatgaagagatactgacttttatcaaaagccttttctgcatctattgagataatcatgcgatttttgtctttagttctgtttgtgatgagtcacatttattgatttgcatatgtcgaaccaaccttccaacctagggataaagcctacttgatcatggtgaataaactttttgatgtgctgctggattcagtttgccagtattttggtgaagatttttgcatcgaggttcatcaaggatattggcctgaagttttgtgtgtgtggttttttttgtgtgtgtttgtttgtttgtttgtttttggcacaaccaattatttataaaaatcaagtgaagtaatatataaggaagtacctagcacagttactggcatacagcaagcacttcataaatgaaagttctttataaaattcaaagcaatatataaatatgtgttacaattctattaatagctggatcttaagttttttttttcttaacacaaggtctcactctgtcatccaggctggaatgctgtggtgcagtcttggctcactacagccttgacctcctaggctcttaagactattttacaagtgtgatacattggattacatcacaggtacaggcaatttaaacaaattcacttatatgtgctcaaggaagaagagaaaaaccaaaaaatagataccaaaacaatacagcaggtaaaaagttcaccagagttgagttcccagaaatcttttctctatctataaccactcagtaggttacatcatccagtttcatggtttttaaataccatctatccaaatgcctacgtaacattactgcttgatgtctaatacgcttctcaaatcaacctgaacaaaattgaactcgagatttccttcctatatccctgtccccctcctacaaaaaaaaatctgttccttattcagtcttccccatatctcagtatatgaaaactccattcttgcaactgctcaagacaaaaaatttaatctctttctcttacatctactgtcaaacacattagtaaaacctctcagctctaacttcaaaaccattcataatctttccacttctcattacctcgttcaacgattgctaccatactggcccaagccacttacctggactactataaaaactttctatcttctccccctaatatcctttcttctctatggacttttctttccatagctgccagtaataaaaacatggcacatctttttatatgcttaaaaatgtctagtgcctttccaaagtcttggctgtggcttacaaagctccacatgaattggcctgcattctattgctataacctcatctcctattattcttcctcctattaatttactctgctccagccacactggcctccttgctattctttgagcatcccaggtatacactcacctcactgcctatataatgtcacctctccgaggtaattcacatggcttactcctttatatccttcagagaggcccatgtttgaacattctttatacaacgtccttttttgaccactcctgtactcctaccacctccccaatctttagcactcctcatcttccacattttctcccacagtacttattgccagcatatacattctaacacacacatacacaaatatattatctttctctactataatgtaaattccagagggcacaaacttggttttgttcaatgctatatgatacctaaagcagcccctagcacatactaaggcactcagtaaatatttcttaaatgaatagtgaggcagaaagcaagagattaacagagaaaatgcatgtgagtagcatgtacaatttagttcaaaatatctgccttttcattcaatgaacatttgcccagagtcctaaggtagaatacattaatctaccagttccttagttggactcaagtcttacacatctcttttatgtatgcatgcatctcaatgcactaagggtgatgaagatactttttttttataacattatgttcaacaaaagaaacagtgatctattccaagaataaataaatatctgtattaaattttttataagtatactatattgtttgggagacttgagagatttacaggtaattcttactatatgtaatttctacctttagacccaatgccaatgtgaaatccaactctggtagagcagtaaaagcttggatgctaagtcaaattttgactctgcctttattagacaatgtgacattaggcaagttactttctctaaagctctgtttcctcatctataaaactgaaataataatatacatctagtggttgagaggattaaacaagaaaatgcatgtaaagtaccagctgctgccataaggtaagtaattagtgtatgttaactgcttgttttattaaagctctaatgagcatatttaacacatctggaatttctatcaatatttcttaaaagtcacacaaactgggttattaactctaaaatcactaaagacataataatataatctttaaaaaaagttacaactgagttcttcaaagacaataaaatgaggcatggagtcaactattctgattgtctaatactttggtaataatgttatctcaactacaagtttataatcccactcagctatggttttccagtcttgtaaatcattacacaaattgtaaataccttcaaagatgcccaatgatccttactaatagactgccccctctttactgctggctatctacctcccaggcactccaaacaaaaaagaaaattggcagccatggcaagttaaaacatacaactcagggcatgacaacttgcttataaatcacacaggcacatagcaggtccccaaatctctaccatagttactattcttcccacatctctatctcactctatagtttgacaaagcacctgggaaagattatgtttaaaaaccccatcgtgaactagagctactgctttatacctcattctccctttcaaaattaaagtccaaagatgaaatacggggtatcaagaatagtgtttcccaaattctgttcataaagaaatgcactaagggtgatgaagatacttttttttttttataacactatgttcaacaaaacaaacagtgatctattccaagaataaataaatatctgtattaaattttttataagtatactacattgtttgggagacttgagagatttacaggtaattcttactatatgtaatttactatatgtaattggggaaaccttagaatagatcttgccagaaactctcaaggatgtgtggcatcctagtcacaacacatatgatcccaaattgatctggaaattctactttcatgatcttctccaattaaaaacagcaagtcaatttcatgacttaactaacaactgaaaatgacagcaaagtgagcaccaatgctgaataaattggcatgtcaatttaatcaataataagagaatgtattgagctttgtagtgagttgacaaaatttgattacatgatcagattcggtaaatccattggtttctaattttggcaaaggcactgttgttctttcaagcacgcaagaacaggattagtattgcatcaaaatttttagcccaaataaaagatggtttaattgcttcaggaaaagagccaataagcataatatcagaattcaagggaggggtacaagcactaatattgagttccaaaattatatagcaaaactggtggaagccatccagggaacaagtgatgatctaaatatagttctctgccagagttcatatactgatcagtaagtgtcattactattcccatggtcacacaactataaaagacaactccaggtcaatgacaacatgtcttctcataatgataaggggttagaaagttgaaataaagtttgaagagcaaaacgaaaaataagattataaatcctcagtcttttcttcctcagttcaaactcattattccctttgtcctgataactcccttcaaaatcattctcatatctacctttagaccctgaaatattcaatcttttggatattccactcaactttttctttttctgtcaatcctcagcttcctatttctagctatctttcagaattttcattatttatgacccacaccatcaccagaaaggaagtaaggaaaagaagtggaattttcacaagcaattcaacttgaagtgtaaattaatagtgtcatttggaacaactctgcttctcttgcagaacaaatctaaagattctccaagtcataatcagttttttcactaagacaacataataaacaaataagaactggtaaatctcacctgatgcttcatataatgatgcatatatggtgttgcaattttaataactttgaggcaaaacgggcatagcaagttcttagtgttttcatgggatgttctaaaatgagtttctacatcagaaaatgatgatgatctataattacaaacctaaaaaaagaaagaaggcttagtttaacttgaaaatttaaaactgatatgcaattacaaaggaacaatgatggataatttgtcaggagaacattatgtactactaatctagctctgatgcctttgcaaccaagaatctcactaaggcaacaccaaaagaccatctttgagacattaaacgtagctttcaaagttaagggatacatcccaaaacaaaactagatctccttctctttatcagatctttttatctatcaccttctgtcttgacttgaagtttcaagctttagcacctcttgctctataaaatgtttttctgctacatgaaacagcattctcctttagattgttaatggcctccaggtttatggcaatggcaatttatcttttccttgctttcctcttccttcaaattcttcttctttggaaaaatacttttgccaaagcatttggtagggttctttgtatctaacagcactttgtatttcccttgtatgactacattcttccctatgtagcacagtaagtccatatgtttgtttttctacatacaacaggactcatctttgtccagtacagagataagcaaacaaaagcctgtggaccaaacccagcttgctgcctatccctcatataatgcataagttatgccaagttatgcataagtttgctgaccgctggtctaataggcttaaattttataaccaaaacaacaaacaaaccaaacacttaaaaaaacaataaaatgtatgtgtacctggcagacatatggcatttcaccaggtttatgattgtccttcatatgttgtaaaagaacatgttctgtttcaaatgacaattcacagattttacaaatagctaaatgtgggagagaaacagtataataatatttaagatattaatataaaaattaattttatacatctatatcaacaacaataacagtagcagtagggacagttgtgaagagttaaacagcttgttaactatgtgcaaagaacagttctaagcactcacattacctcacctacattaactcaactcctattaacaaccctataagaaaggtatttctgttatccgcattattcaagtattaagtaacgtggctaaaatcttgtagctatattaagaggcagatctgagatttaaaaccaagctatcttgctccaacatctgtaattttctttctttttttttttttttttggagacagtatcttgctctgtcacccaggctggagtgcaatggcgcaatctcggcttactgcaacctccgtttcctgggttcaagtgattctcctgcctcagcttcccaaggagctgggattacaggcatgcaccaccatgcccggctaatttttgtatttttagtagagacggggttttgccatgttggccaggctggtctcaaactcctggcctcaagtgatctgcccacattggcctcccaaagtgctgactgggattacaggcatgagccactgcaccccgcctgtgatttttaactaaaacagtagttctttttcctattaaagtttaaatgaagagcaatgatttaatattttaaaactaggatactaggctcctaatttagtccccaacatataatgcatagtttatgtcaaggcaattaccatactgaattatttgcaagaggcactttaatattagtaactaattttatttaaaagtttatcacagttaaaacttggcctttcaattttgccctcaaattccaaagtctagttctcattctcatttttctaacaggcttcttaaggttttctcacaatttatattagcgaaatcaataatatggaatatttaaatgtattggtaacttactagaaaattcatggggcgtatgtgtactttcgatgtgacactgcaactgaaatggtgtgggaaactgacggtagcagtgctggcaggtggtatggttttcccagctctcactgctctgcttctcaagttccaaatggtgtttcatgtggttcataaacctataaatggttgtcaacaggtgcaaaacttgagatttaaaaacaaaaaggaaatctcacaaacaagaatctgaacctaaatcttaaaaatatagatgtattactcaaactctcaaaagtcttaaagttgcctaggaaagtatgcacttttaaataatcactttctttaagtggctaagtaaacatctttttacctttgctttaaaataattcattcatgtaattaatctgaaagatcaacaatttgatataactcttaatcattatttcagattatttaaaaaatttttttagataaaagaacaggcttctgatccatacttgaaatcctatttacattttaaaattaaatactaaaagaaaggaaactctatatccatacttggaatcctatttacattttaaaataaaacactaaaataaaggaaaccctatcaccaaaggcagctacagagtcaggaggaaatcttttaaggccttgaaaatatacaatagattccagctacttaaatgacaaattactagtatttttacttgtatcttggtttctaaatgcatgtaatagcagttttgatgcctacaattacaagaaccttttgttttatttaatgatactggtttactgttagcacagactgttcatcttaacttgcagacagtgccctttgtaggcaacatacatttttcagttttacattctgctacttcagcttccctaataggcttctatgagcaggaattatgaccttcaatggcagagggtgcaatataaatggtaatacatttaaaagagcttactaaagctttttgctgaatttgagagtaaagttattcaacaaaaacaataatttttagactaggtcaactgttaacaattattcactttgaatccctaaaagaaattatcttgaaactaagtgataatgtcatcaatctagatagcaatcatcatgaagattataatatatacctcttttcacaaatttacagcactattctctttagagtgggctatggtacaccttgaaatatcttttcctcctttggttttaacaacagctctacaaatgcttacaaaaaatcctggtcgttgttaaatatttacgtttagagtaaagatcatgagccattaaactttcagctcacagctttcagcacttaaagtctattaacataaaatgttcccttaaccaattcgctttttcccaattattatatgagttcccatcaactcatacttctcaaaccaatagaaatgagggaaacagcaaaacctcttgcaaggatgttcacagaacaagataaatctaactatttttagtgacactcaatgtaggaaagaaactccataccacaatatattgacatggcagagaagagaaatgaaatgttgagctatcaatttcttattattctctataaatatcaagttgccttcccagtttttactgttgaagtaaaatattatataatacatttaacttctttgttcacgaggtgtttaccattaaggttacatttaataaatgatcagtatttttaaaaatactcaattcctggatattatcagatataattttcttaaaatctgtaaatattatgaaagcctaaacatacgtagctagtcttcataaacataaccaaaaaaatgaatttttcattttctttttattttgagaccatctcgttctgttgcccaggctggagtgcagacgcatgattacagctcactgctgcctcaatctcccagactcaagcgatcctcccacctcagccccacaagtagctgggactacaggtgcacgtcaccacgcccggcaaacttttgtattttttgtagagatgaggtttcactgtgttctccaggctggtctggaactcctttgctaaagcgatcatcctgcctcagcctcccaaagtgctgggattacaggcgtgaaccaccatgcccagccccattttcatgtttgctattaaatgggctaatcttaaaggaaaggccaaaaaaatactgctgaaataacataacctcatatttcagtacaagacattaagtcaatgaaccacactgctctgcattttaccatatttactaacatgatttcccgatgttggcatgacatcagaaataggtggtagagttctactgcaacactgtttcaacgttttatctcaaaatacactttcccttttgttaaactactgcaaccattagctattgatggcccttaaagtttgataagaggaggtaaagaaataagaaaattcatataaaataagtgaaaaaactttgaaaattataaagcactatcataaagaaaccattaataactgttataggtgtatatcacagtgtatttcaggatttttatgtatgcttctttttggacccaaggactcacaggaaaacaaataaatgctgaactcagaagtaactacagctgctttgaaatgctaattacagatgacagttaccaagaataaacacaaaaggcatacatatatgtatatgctgtacacacatgcacaaacacaatgcagattaccttgaaatgcaccaaaaatcagatagttctaagaaggatgaagagatacataataaagcaagtatagtaaaatgttaatggtagaatcaaggtggttaagtgtacaagggtccaatgtgaaattttcaaaactctgcttaatatctgaaaatttttatagtaaagtgataggaaaaaaccttatctaatataaatatcaggctacataatcaacaaataatttcactcaatttcttattacttttctcttgttactaatttatacagaatagtttcaaagattacaactgaacgattatgaagtacaaatttctaatatttaaagcattcatatattccactgggaattaaatccccaaatttctaaagctgttaaattttaaaatcaaaacagacatgcttcctagaactgatacatctctaaaactgataatttttcctgcaagattaatgttctaaaaactataaatataaattgaaaaatttgagcattacatagaggagctcaacctgaacaaacacagagtggttcttcttgtaatgtgaagaaatataaaattcaaaggcaattagaaaataaaaaatgtctaataaaaattcaaaaatcacgactaaaacagaaaaaagaagttcattttgtcttaagttaaaataaacagtcttttcttaagctatgtgaaagaaatataactaactggatccaagagtcaaactccacaacacaagaaaggacagagcttttcaacaagagaatccgcctttattctcagtagaaagtgttaaaatcacttacctagaatggcatagaaaacacaaaataaaagtataacatttttatttgcagcatttcaattttcaatagaaataaaaacaagtatttacatacctaatgttattttttagaattttcaagcaactgaagcatttaaaggttgtgtgagtcttctgttcctcctggacatctccttcatgttttccataataaaagtcattaactaacatgatcaattttcctttctctgaatcaatagttgtgtttttatttactgtacttgaaaattctgttttagccagtcccaaaaagttatttatcatgtctggacaacaatactgaaagagaaaaaaaaaaaaaaaaaacaagccttacttattctttaaaaaaaccacataccaaaaagtgattgtgtgtttacacctaaggccagaccattaaaactatgcttgtaatatatctagaaaaatagtcaccaaaaatttgtggtgcatgtacatagtctaaaaattcaaataataaacacctattatcttcatgtaaaaattcaaaaagatttgagaaaccctaaaaccaagacatggccatagctctaacagctttacccttgcaatttgcctttttagatgtaaatatttaataataatctgttccttaactaaaaatcattcatctcatgtccacgtcaagatgtatagaaaggaaatgtttatatgccttgatgtatatatttaattatcaagtgatatataaaatttcataaagcctggttgaggaaaaattaaaatatacaaaaattatataatatagaataggctccttaattagaaatgtggataatcttctgtcccaaatgtaaaattatcaaataacattgcaaagttagtctatgaacattaaagattaccctaaaatagctataaattatgatacccataatagatgataaattacttgctgtttttctatttttttaacagaaaagtaggataggatcagattttttaaataaacatataaactttgttcacagagtaccttttaaacaatgtttcatatctctataaaagagctgaataataaaccattgacaaccaaaaatggacaacaacttgtagtgaattagggtgaaggatttagtcattgagaacggcaaagtatccttgcttatccaaaaaaacaaataagcaccttaagagatgagaaccaagcttagatttaaggttttataggaggatagagcaagctacggaggggcatagctgagctgtggtacaatatcaactggtcatcttttattcagccctggtaccttttagttttattaatagatcttcactgcaactccttatttatcccttatttttgtgggttaaagattctgcaaatattaaatatgtactttaatgccatatactatagtttgacaaatatcaggcaccatctatctatcattcttatctttactcctcccagtacacagaccatgttctgttgctttgttagtgccctaaaaatttaggtgggtttttcagagcaaaggaggtgagatcctatttttatagttaaatagggcttctcatgtgaacatccaacatcagtcaacattttcctcttttcctcctgagagtcatccaaaagctacacaaccaaattccacaaattggtttatcattgaaactaagggtcagataaaagccacagactccataatatacgaaagcactattcaaagaagccaacatcgggcagatggcatttagctagaagtaaaccagagaagtaaaggggacccagtggtaacagatcttaaagggtcagtaaaaatacacatcttaaaggtgaaacacatattctgaatcacaagggtatatcctctgtttgcaaaaacaggtgcagaagctgaggcaagaaggatggcagcagaagtaccccagacctgattcagtacagagaagcagaaaggcggtgctacataaagaatcagacacacaagtcacaattgcaggaagccttctgcccagcaaaaagctgtttaaaccagctagcaagctgtgagactatcctggcaacctatgcttcctcctaaaaggaacttgtataaaacagctggcccaagaaaatccaacttgttaaacactataggcactcacatctaaacaaaaataccatgtaataaaagaaggcaaataacagaaaaatgtaaaattctaacaaaaacatcagaattatgctgccgtggagcagttgcagatgaaaacagtagccacaaattttaaaaacataatgaagcaactgcctctatttggaagaccacaaagcaagaaaagatgccaagacaacaagatatttagaaggaaaaaaaagagtggcaaaatcaagggtgaaagtataggaaaaaaataaaatcagagacatgaagacaaattaggaaggaatacagtggtgagtagacattgcaagggtgaaagtattggaaaaaaataaaatcagagacatgaagacaaattaggaaggaatacagtggtgagtagacattgcaaataaaataaaggaaacatattagtaggagaaaagtccatttaaaaaaattaaggattagaaaaaaaaagacatatgtcagggaaagaagataaaacaaattcatattggagatgaaattgtatggaataaatattttaaaatacaattcaaataaactgtgctaaatccaaatatacaggttgaaagaacaaggtgtatgccagagaggactcacccaaaattcccaacaccaagttatatcattataaaattatcagtcttcaaaacataaagaatgtagacaaccaaaaagctacagactgccaaacaagaagatcaaaccacttataaaaggcaaaataattcagcttgtcccagattcctcaaaagcaacactgaatactagaaaacgggagctataccaacaaaatcctgatagtgggattcaatttactttatattagatcaaactgtctttacagaatggactacagtcaaattgctttgaacatgaacgacctcacagaaagatgttttcagactcctcctaaatgaaattactacagaatgaacttcagccaaacagaaaacgaaataaaccatgacaaaaacactgatgatgaacagtggattatatttactgtagaaaaagatcaaaacaaatatgacataaggtaaaaaaacaaaacaaaacaaaacaaaacaaacaaaaatgtaatgtcatatgccctgacaatggaaaaacaatacaatgaacaaataaaaattgggagaggataaaaggacaaagagtacaaggtgaagagttcatagattgcctcacagttcataaaggaatatcagttagagccaccaaataaagtaatataggtatagacattttgacagcaaaggtaaacaaatgctcagacaatattgactaaaatcaagtagcaaaaaagaagggaaagatgggtgggttaaaaacaggaagtttcatgctactttaatccttcctcatagaaaagaacagtagagaattgctaaaggaatagaagactagtggagttatacattaaaattagaaacataatcaggagaacaaaactacaactctcttagaaacctaagctacacacacataaagcaaccacattgtgaaaggcttttaaaaaagagagaaagaaaaattttaacagaactaagaccaaataaatctatcatattggtaaatctaaacccactattaaaagaagagattttcatataggatcacaaaagaaaaatcaactttgctaaaagcaaaaggcacacctaaaacaaagtaattcagaagagttgaaaataaaagactaaacaaagaatacaccaggtaaatggaaaccataacaggggttgtgagtctaacatcaaagtagaatttgggctaaaaggcactaaccattaaaaccaagaaaaggatattttattaaaatgctaaaggatacattcacaatacagttatttattttatttttgagacagtctcactctgttacccaggctggagggcagtggtgccatctcggctcactgcaacctccgcctcccaggttcaagcgattctctcgcctcagcctcccaagcagtgggactacaggcgtgtgtcaccatgcctggctaagttcttgtatttttagtagagatggggtttcactatgttggccaggctggtctcgaactcctgacctcaggtgatctgctggcctcggcctcccaaagtgctgggattacaggtgtgagccatgactcccggcctcataatatagttataaaagctagattcttctatatcataaacaacagcaacaactttgaaacaaaattgcaatatatgaaagaaaatactggtaatgaaagctgtggactgaaatgtggtgtttcccaatccaggacagatcaagtggactaaatggaagtgaagacacagaaatataaatataattaataagctatatttggttgataaatatcgaattccataccccaaaggagaagtaatatacctattttcaatcttccacataatattgaataccccctatactttacaaaacaaaaaggatttgtgaaaacttgggctttaccattaaagaaactgagttttgaaagctagttacgccagttaattggttatacaacaatgagaaaaaataatcttaaagaattttctaaggattaatgaaataatgtatttaaagcttagtactgtgtctgacacatagtctcagataagtatatttttctaattattgtagaatatttgatattttaaatatttttccattgaaagaaaacattatatgctagttggcaaaaaaatcattcacaaataatgtaaaaatcacattcttttcaaaatgaaagttattataacactaaaactttagctgatacataaaaatatataaactagaaaataaaaagtccccacagatttaaactttcccttcctagatttggagactattctttcaagatttccttatgatataaacacatacactgttcatattatcttcaacttagttcagttgtaagaaatacaatttcttacaatgacagagatactttccttatttaaaatgtcataatgttctattatattaatatgaaaattctatgaagttctggttgtttctactgtaagtaattacaaaccatgaagtaacacataaaagccacattttggagaatgttgccattctctccagatgcagagatatatataacatgccacaatttctgtacaaaatagaaaataagaacactcatgtttacttgtacatccagaaagaaacccagggagcattcaaaacaaactaataaaaaattattttctttgagtcatactaggaaccaggtaaaaaaagacacagagataagattcttcacatgtatatctttgcaggctttttaattttgaatcatgtgactgtattgctacctacttaaaaaattaaacagataaagaatgtagtctttgttttcttcatctataatgcaaaacacaaaaaacatcagaaatctcatcaaaacattacacagaagaggaaaattgaaagtacttctacaggataattctcctataagaccaaaacacaacgtgcagttatccagggctatactctgagagtaaggacagaccaaatatggctctgtacgtatataagaagactgtatttataacttttttaagttcccttattttttctaccttttttgtaaaatgctgaatttcaataaaaatatgtcaatctctgaaacagcaaaaacttttcctaagttacttctttgccattgcacccctctccttccttcttttccttatataatctacactgccttttttctgatctcttttctcccttcctgtcatttatactgggcatgcaaggggagtacagaccatctctacacaaacacagcaggatactataatatctactaaaatactttaaatgttacctaaatctcatacttcactagtactttgaacatttcttaaaacctaaattcaggggcttcttgtaccaataaaaagctcaaattctgtaatcccagcactttaggaggttgaggcgggcggatcacgaggtcaggagatcgagaccatcctggctaacacgatgaaaccccatctctactaaaaatacaaaaattagccgggcgtggtggcgggcgcctgtagtcccagctacttgggaggctgaggcaggagaatggcgtgaacctgggaggtggagcttgcagtccccagagatctgccactgcactccagcatgggtgacagagcgagactccgtctcaaaaaaaaaaaaaaaaaaaaagctcaaattaatttacacaattatatgaactatattctggactgagttaaaacaattatttcatatgaaatgcttcaacatttggagtttatacctgagtgttaaaaactaaaatgtaaaactcagattttcattgtgtaatgtgacatgtacatgttaacatggacacaaaaataaggtaacggaatttttaacttatatgcaaaagtaaatacgtaataaaatgcctgttttataagacatttgaagagtatgacctaataaataaaataatcggattaatacattatttttatttaaaattaaaatacaataagcatacattataatatatacaaatttaagttttaaaatttgaggatttagaaggaatttgagaatctatataatcattatgaatgtaaatttttatttaaattaaatggaaataccaatgagattatttctggacaaaccattaattactgtaatcatcagtatttttagaaatgtgcaaactttttacaaattaaattttgaaagagttttaccttcatgtgatttttcaaaggatccaaaagattgaaatgaatgttgcactttggacaagctcttggaaaaggtgttccatttttagactgatttgatgaggtatttgtacctaaaataaattcagaacatttatgactcaaaattcatcactttttaaccttaaataaccactaataatacttttaaaatttatagccacttcaaaaatgtatgtataaatactataacttctttttatgtaccacatttcatatttaccttttgctagcatagcctgggaagaagtcactgaaggagatttaactgaaggtaatacagctgaggaatttgctccagaaacactttcgctgggtttaggcttctttggattaacattatttacttcagaagtagaaggacgttttgataaaaatgaactttcactcatacctacaataatttaaatagtgagaaaaatattttttaaaattagaatattatttacatctgagtaaaaatattttggagctaaattaaaggtaatataattgaattatcatatcatgacaataatgataaaacttgatatgatccaaactcaagggtgtaaagaaattgcacatatatttatcatggactacatacatttaaataattaaaaaaataatccctctatgaaagaaaattctaaatatggcttcaaataaagaaatatataaatagctatcacaaagggagccagaccaatattccaagccaaaaaaaaaagtatactatgaataagttctgacaaatgaattatctttagatgcttaagtgcattgagtacactagagtttgtaaaaaaacaacaattacctgtttcaaaaatttagagatactcttaagatgcttttttcaatttaacaacttaaaatgtctaatggaaatttagttctttcctacctaacaaactgaagagtaggtaagagcggtctactcatggctttgagtggtattacccattcatcgctacgcagaaagtggaaataactaatcttgaatgataacacttcattcatttatatgaaaggacacataggccaggcacggtggctcacgcctgtaatcccagcactttgggaggctgaggcagacagatcacgaggtcaggagatagagaccagcctggcaaacatggtgaaaccccatctctactaaaaatacaaaaaattagcctggcgtggtgacgggcacctgtagtcccagctactcgggaggctgaggcaggagaatggcatgaacctgggaggcggtgcttgcagtgagccgagatcgcgccactgcactccagcctgggcaacagagcaagactctgtctcaaaaaaaataaaaaaacaaaggacacataatggaagtagtgagtataatgattttcacacataatggaagtagtaagtataatgattttcacactatgttccccagaaattaatgggtttgttttagagaatatattgagcatgtttaacagaggaactcttttttcttttatttaaattttgcataaaatttttatataaggatttcattcctaaaaatactttcccatttgaaaaccattttgttaaggctgaaggattttagttttatttaatgcattctcaagagaaatgaggatatccaggctataaaaaggctcggaaaagtttttttttgaaaataacatacaactgtactttgtaaaagagattctaaatctgtacatcatattttaatcctcacaattgtacattaaaagtagaaatggtacggtaactatattagaagtattccaggttttaaagtcagataagttcaaatccacaccttgtcactctctagttatgttaatgttactctctagttatgttaactagttaacttgtcactctctagttatgttaacttgtcactctctagtctagttatgttagcttaatttctctaagcctcagtttgcttttttataaaataagttacaagtttacagagctgctttaaggaccaaataagataatgtacttaaggcacccaacaaaacatttggtacacagaaagcactcagtaataaattacagatattatcattactaacaaaatattttatatttaacttacctcagaggggaaaaatataataatagattaacctgtcagctttttaataagggcaaacattacagcaaaataagagtattatactacttggcttctctctttcatccttttcagataacataaaaatgatttttttccatcttcaaaatactcgattactgatagatatactgtaggtacattggaaaaattctgtataatcacattcacattcttgtgagatgtttaagttacctgaaaaaccaatgaatgctggaattctgaattaagcatctgattatataggaggctggacagtagaaacagactgctttaagaatttttaaaacaagaaatctcaagattaaataaaatcactctgtatttgttttaaattttgatgctttaacttatttctctgctgtgtttggcttgtgttgctccctaccctcaacagctctctctctgctggtaaaaatcctattctcattcaagatttagctcaaatccagttttctccaaacccccataatctccctagatggtagtgtgttaatcatgttactgaacatgtggcacatatcattcataattatcattcagaataactgtattgtcaagtcttttaaagcttataatgtattctcacatttcacttggatttggacataaaaaatccctaagtagagcaagaattaaagttacatgtccaaatgaatggttccagatgtgaagaatgaatgcattctacaaaaaaaattaaaatctcccttttaacaatatgagaaaaccaaagtggttaggtaacttaatagagactacaaaaatcttaagaatagaggatcaaatcatcccacttactgctcaggctaaagtcccactcactgaagtagaacacttatacagaaagaataggagtcattatttctctttattcccaagaagtttcaagaatttagactttttctatgaataaatctacatgctttatgaaaccagacttaagacaactatttttttctccctgtttcttttggttcttacctatttcacaaaccagattgttactaaatacgtaagtgacacccagagaggtgaatatcaaatcaagtattaaaaaattggaaaaacagtttaagtttataataaaagtattactattaaaaaaaaactgggagagggtttggtaaattctccgcactgatttgctagtaaatctaaaaattccaaaaaatcatgtatacgtctgtttagtcaaatatttgaatagatacaaattgctaagatacaaagagtaactgccttgattacagggaattttcaattagataaaattattttatagtacactaatttattttagattaatgaagaactttgttacagtatacaatcaaagaactttaaatgttcctcaacagggaaagttcactaatccttcaatgtacatttcatgagtacttactatgtacaaatcactatttatttattgttgggagtttataatagcactttataatcatattgaactatcacgctgaaacaattagaatagaaagacattaaactaattaagaaatcaactatagccatatatttttcacactagtgtccatagaaactaattaatacttttttaaacagagtattcaggctacctgagaagttctctaactcacagaaattattttaatatttctcagctatggttagctccaagtgagaattagttcaaagttggttagcttacttaataggaagaaataaaatattctgtcattaaataggattttacagaaaattacccacataaggtattcaagtactagtgacgttccaccttacaatatatgaaaaacttcacacaagggtagggacttcaaaacagaaagtcaatctcatatgcatattcatcaagtttctttctataacctttatgaaaaaaatactaaaaccaacctgccatagaaagtgttggtcccccttggtaatgtgataatcctgtatcctgggtcaagtcaaacagtaactctgatgacttattagacacaactcgtgatgagtttgttatataaccctgttaaatagttcaaaggaaaaataatacatttattcaacagttataattatttcaatataattatatattatgtaattttatataattatataagaattttatttcatagacatttataaaagtaaattgtatgcccaatattctaaggaaaccctttgataactcaattattaataagttaaaaacacaaagataattgctactttgccaaaattatcatctactgaaactgaaagcaagctattacttagagctggtttactgctgactagaaaactaaaatggggggcatattcttagttcaacttcttcaaggtaaaagaaacataaatcaacttatatatcagtaagattgatacactttagatgacttctaaagattcagtatccccattaaaggacaaaaaatagaacttagcaaaatctttgggcaaaagcaaggagaaaaaaaaaaccatatttacatgaccaaaaaaattaaaagcttctatgcttctaaaaacctcacatctgagatatcagggcaaacaaacggaatcaatctgcagtattgtgcatcagtgttaaggatgaatatatcacataatgtgaattttgaaatcatctttattggagaaatgtataagctatgtgtcagaaagagaaaaaatgggccccacacactttccatcatcccatagaaagccacgctaggccaggaatcttctgtcttatcaggcaaatatgaaagcaaaccggtcagtagagtgaacaaataagaatgccaggcagacagggtttagaacagaagttgtttatgggaataattggggccagctgtcctgctcctggaggcctcgggactcaaaggaagttttagcccttccatcaggagaaagggtggtccaaactaaaaggaagatcttaagaagagaggagtgaaaagtatgagatgaatgataatgggctcaagtataaagcagtataaagttatatatgagcatacatacatggtgtacataattatgaaaaatatggtcaatataatttagggacatacactccgatattattatacattaaatataatgacacatacacacacacacacacacacacacacacacacacacacacacacaagtatactccaataccattaatacttctaaaagatactcattgtggacggtaagctctcagagtgacttttggaccattctacatgtcataatacataacaagcggattaacaatgattaaaaattaaaggaaaaaaggctatcactttaggaaaaatatgggcaaaggacataaactgagagaattcagaagtcaaatactaatgaacaacatatacgaaataccttttttccaaattaccagccaaagaaatgcaaataaaaacaacagcaacatttaactaatgaattggcatgttaccataatatctactacaaaataaattaattagccactactcttaaaagtgtcaagttcatggaagacaaagaaagaatgaataactagaaaatacgaggaaattaaaaagaagtaactgcaagtatcctgaataggatactgggcaggaaaaagaacattaatgggaaaactgatgaaattccagtaaagtctatagttgggttaatgttaattacccagttgtgataagatgttaaaataaagggaaactgggtaaggggtatatgggaactgtttgtactattttttctgtgtctaatattagtttgagttaaaaagcaatgataacattcattattggcaaagtagagcttatattttagtataatttttctgcataaaagctttggcagtagctactgaaggctttaaaaggttcacttcctttgtgtgtgtgtgtgtgtgtgtgtgaaatggagtttcacttttgttgcccaggctggagtgtgatggcctgatctccgctcactgcaacctctgcctcctgggttcaactgactctcctgtctcagcctcctgagtagctgggactacaggctcatgccaccacacccaggtaattttcatatttttagtagagacagggtttcatcagattggtcaggctggtcttgaacttctgacctcaggtgatccacctgccttggcctcccaaagtgctgggattacaggggtaagccactatgcccagccggttcacccccttttatctaattattccatttttaagaatttatggtaatgaaataaaaatgtttaagggaaaattagttataacagaaaaacaattataacctgtatgtctaacaatggagaaatgattaaactgataaaactattgtgcaaaaattaactttttttttttttttgagacggagtctcactctgtcaccaggctggagtgcagtggtgtgatcttggctcactgcaacctccacctcctgggttcaagcaattctcctgcctcagcctcccgagtagccgggactacaggtgcacaccaccatgcccagctaattttcgtatttttaatagagacagggttttaccatgttggccaggatggtctacatctcttgaccttgtgatctgcccactttagcctcccaaagtgctgggattacaggtgtgaggcactgcacccggccaaattaacatttttttaggaaatgttccaagtagaatgttcagtgaaaaaagagaaatatgtatttgcaaatactatagggtcctgatacactcttctcacttttctaaactctgtccccaaatacatattacttcataagagaaacataaaagttttattattataaattaaggaatattcaagttttaagaattttgctttattactaacttttctattgacatgggtttgttaagaagttacggaaacaagctattgatgtaactcaaactaatcctagaatttgaggcctagtaggcagatgtaggtatttgggcctcaacatgtagtattttctttttatcatgccctatgatttaacagtaataaaacataatcttacttcaaagtaaacattttctccaaatatttgtgaaaaaatggaaaagttacttctgagtttcaagttactcacctttcaaactgaaataataatcacaattgtttgttttaaacgtacttgctcttcatggtacacgtatcatatcatgcagctatcacaacaatactaataaggacctaatattattcctcattttataaataggtaaactaaggttaggtggggtcgagtaaggctcccagtacagccccacttgttgctgatggagctggaaatagaatccaggtctgactgattacaaagcccatgcacttaagctatatcacattgactttctgggtcataataatatatcccatccctgccaacctgaaagcgatgttgagataccacattccatgaaaaagtaaaaacacacacacaaaatatgacataaaataaaaaactactatagtttattaaaatgacttccaaaattcagagaaaagtcacttaaacaggattctcaattcattccagaatactcctctgtcattcttaactttgactgcacagtagaatcacacttgaagagtttttaagcagctatcatttctgggttccacccagaccaactggcaaaacctctcattttttaaaagaacccaagtactgggaaccatcagctgaggtgctttgatttaaaaactatgcccaaaacattctgagtcagaaaggaatctaattcctaactcttataacaccaaacgtacaaactcttgcttttattttttttccccatcctcggtcaaacgttggaaagatttttacctaacgaactattaaataatgttttgtttttctatttttttccctcaaatgccaaacagcttataataagcataaaagaaaccactaagttaatttgattccaactaatagcaaagaatttttacattctgggtacctttcccgctataccttcaggaacacctattacttttttttttttgagatggagtctcactctgtcacccaggctggagtgcagtggcaggatcttagctcactgcaacctccgcctcccaggttcaagtgattctcctgcctcagcctcccaagtagctgggattacaggcgcccaccaccatgcccagctaacttttttatttttagtagagacagggttttgccctgttggccaggctggtctcaaactcctgacctcaggtgatccactcgcctcggcctcccaaagtgctgggactacaggcgtgagccaccacgcccagccacctgttacattttttaaaacattagaaatagcctgtagaaccttagatgattgaagatagagactcagcagtctcccttattgttcttattatttaaacaatatacatttttaggaaaatgtactactatttttctgagacagtggtgccctaactctttggcttcagaatcatcttatgcacttaaaaattgttgaacccaaaaagactttttgttcacattggttatatctatcaatattttccatattagaaattaaaacagagaatattttataatatttatttattcattttaaaataacaaactcattacaaattaacataaataacattttaatgaaaaatgacttgcaaacgcaaaaaaaactagtgaaaagtggcattgtttcacatctttgcaaagctcttaaatatctagcttaatcaaaaattgttttagtctcttatctgcttctgccttcagtctactatgacatgttgttttggttgaggagtattattaaattctgcctcacaggaatatataactggaaaagggagtgttttaatagggttttaattaactgtggatatactactttgatactataccaaaactgaacagttggtactttcttaaaggtttgttgcagtgtgaaatctgaaaccgtatcccagaacacccgttccattaaaatcattggtctatcttagcttttaaatgtatgttttacccatgcatacttttgtagtatatatactagttatgtggaaaatactagtttcactgaattacacaggtcttccaaatggtgacatagttcattacacaatattttaaaaatcattatttatgaacaccaccacccatcagaaaactcttattcaaaagctgccaagatcacggtggcaaatgagttttccaaaattctaatttttgcttaaaagttcaaattttaccattggtaagaaatattactatcaattatttttgctgaagtgacagatttgaggaaatgtttgccaaacaatcaagattgactaagcgtgtgtggcagacagactctaaagtggcctccatgtaaatgtcattacccataatccccaggtcctggtattcaggtcctgtgtaattccctcccattgagtgtgggcaggacctctgacttgcttttaaccaatagaacacaacaaaggtgacaggatatatatgatttttgtgtacgtgattatgttacctaagactgtaagggcatcttgctaaggactcactctcacctgctagctttgaggaagcaagcagccttattgggaagacctacgtggcaaggagccagccaaaagccaacaagatacagagattctcagtccaacatcccttaaggaactgaatgctaccaacaaccatgtgaacttggaagcaaatacttccccaacagaatttcagatgaaactgcaacttcaggcaccacatcttgaatgcagccttgtgagatccttaagcagaaaacccacctaagccatgacctgattcctgacccacagaaattgtgagatcatgagataaagagtgtatgttgttttaagctgtgtaagtttgtggtaatattgatacacagaaataaatatcatttcaaatgctggcaaaatcttatttaaactattaatttataaaataaatctatccttcaaatatcgtacaaaagtaacatttacttcaggccaacacaaataaataaataacaaatatctaaatagtgatatgtaaaataacaaggctgtgggctctcctatagttatttaatagaaatgagattggaaacaatgtatgtatatcatacaggaaagaagcaaatatagctcacacctctcactcaatcaaaatcactaaattctttaataactaactttattattcctaaaatataaataaaaaataatgcacatttttcagcatcactatacacatgttcattttttggttttagatattaatctatacccagttcaaactgtggaaactgaactaacatgactgaaataaaatagtgttatattttgttctttagactcttttttcccttcctgagattttgatatgtacttggagagttttgagtcaatatttatttgatttgttttcttttctggagtgatattgtaaatactttaaagatttgtcactcattctttcatgtaacaacaaaaaaaaatcaggtagtttacctcacaattcaatcacacaagtgcttttcctcaagacaactatcatacttcagacacagaggtactttatgcacactacccatgtcatcacacagaatattttaaaaaacacacattcaagtgtagagagttaataaaactaataacattttaatacttcatcagggattgggtataactgggtaatactcagttgagtaatgtagtttactgtgagtgcacggcaggtgactaatacagaaactacaagtacactttggtggcactaccttgattcacactaaggcaccagcagcttatccaccattactttagcatcaccagtgcaaatgccaacacagtggaaaaggaaaacagtctttgattataatgacaacactgttgaccctcaaacctctgaaagggtcttggggaaccccaggggattgcaaactacaatctgagaactgttcaactaaggcaattctttcatgtctaaaaaagtgtacatttatacacaacatatatgtatgtatgtgtgcatatacatataaactatgggttaggctggattgaaatcccagatccatcaactgccagctttgggatcttgaataaatctttcaacctctatgagcctcagtttcctcaactaaaaaatgaggataataatagtgtttacttcatggggatgtttaagaactaaatgaaatgaatttacctatagcatttagcacaaacacttatacatattaacagctcaatgaatgttaactattaccattttctattactttttgtaacaaaaaaagtgggagttttttgtaataggaaaaaatgtttgtttttttttaactaactgaactatgaaggaatgttttcagaataaaaagctatgatggtcacttgactgttttcccaattaagaatacctggtcccgtctgcaatcttaaatatttgtcattatgcaatatttatggctgactataattttattcacattttgatagtatagttttcattactgtacctatttaggcatactgcctgttattaacaggttgggtagttagctccttcagttattacttggggtactgcttgagctagcgaaaatatggtgacattttctgatgctaactatgcttctactggatgactacttatgacagtccagaattgtaactgggtactgttgatattgataaacaacatccaatggatccctgagctggccgtatagttttagaaacacttacaggtttagaaaaaggctgaacaataacagaactatctgaagatctagactcaggatgaaaatttattggtgaggcaggcactggatttgatgttggattcgtgtagtgttgacttgtaggcttgaatgcagcagtaatacctgtattttaaagtaacacaatatatggaaattatttgtacataatcaattttgtcaaaatacttcactttaaaattaaaatagtataataatactgtacctcgactgagtgcaccattctttagtccccttgaatatgagctggggttaactctgttcaaaatatctataaaagattatatttattttaaaatacattgtttgaatgaaatacatattaagataatagaaatcatgaattgaaaacatttaaacagatttatggaaggagtatataactaatcactgatttaagaatatagttcattttaaacacatacatctttacctactaaagaaacaaaagaaacaagataactaggttttgttttacagactaagaacaatctttctcattgtaactcaaaatccaaaattcagaaggaaatgacaaatctgactacaggtgagtcaaaacattgtgcttgcaaagaaacatcacatacttgataaaaattttccaaaaacatatttatatataacctataatttaaatgtatatctttctttgcatgatgacagggctgttacatacagtcaggttcctatgattcaaaatcaaatccttgcccaacctctacactgcattcactcgtctaaaagccttgaagttgcattacagaaaatctcatcggattatctactattagttttgagttaaaaaagaaaaactatcagagattgcagactaaagtgaaccaatagttcatcatagcattttattagttaagaggtttcaaatttaccactacaccagaagtcaatctgagcctgccatgactttgaggatcaatttaaagttcctcattcttgcatgcatgtaaactctgtaacttctagcttatcaaattatagtttggaagcatgaggatttgcctaaaattgctggttagaaaaaggtaaaaagcacccaaaaaaaaaaaaaaaaaccacccaccaaatctcataaaaatttcttttatcttcctcacagtagaaagaaaccagatcccattaagtaattctataaaataatggttcacacagaaatatggttgttttctgataaggtcaatgcagtgctctgtaattaaacactacagaagtcttattagagaaagatctactcaaagaacttgaaactgttttcattcagaaattcaggattaaatatttactcaaaccatgaaagagctattgctgtagtactatttagtgggtgtagtctatggatcacaagtttttgccctcctttcttgcagttttatataaacatttaactcatgttccatatgttaacatattttatggcttacaaataaaacaacaataaaaccatttaaattattcaccttaacactgtagaaaagaaattctgttggggttaatccccttcttgatggaattattttaaaactaatgtacagtgttctacccgaataccatgaagagtcatctacaatcagtataaattcaccttgaatcttaactgtcatgttttcaataagagtttgaattttgcaatataatatttcagtataaaacaataaccaatagaatattatgtcccactatcaccgacgatgccatcatgcctaattcattttataatccaagtggcactccacttagcattccatgagagatgaccaatgtgccccaggaaacagtattgaaaattcgattggtgaaattactctctctctgataaaactgaataaaggtgccaatccaagtttagaggtaagtgaagcaagaactaggctttcaaaaaattttggtctcttaatcacacttttaagcactaccatggtaagtaaacacacacacacacacacacacacacacacacacacacacacacacacacgctggtaaactgggtacataaaattctttggtaaattctcctggcttcaaacaaacaagtaaatgaaatggaaaaggatctattttctctttctccctgaaatttgtacattgtttctctgcactgtcatacatttttgagtggacattttaacaaatgtcatcagtatctgcacgttaatattataacaatgtcaagcccaattctctaattcaaagctaataagccacaaaggtaccaagttgttctgcccaaaagccttaaggatttaaatgtactaaatgctacatcatccaagtacagtggctgtagacagcgccattctctttcatgaatataaaaaggagttgctggaagacggatatggtcagaagctgcagcttctattggtacacaggccagagtctgtgcaatcattcaccacctatacattttgtagccacgtatagatgacattgcagtgaggactggatgtgagaagtcccgtttgagactaacaaaaactcacttagtatattctgaaattttaagcaaagcattccaaatgttttattttctcttctgggttggagaaaaatgaaaaagaataaacagataaatatgttacttaaggctaggtgcagtgactcacacctgtaattttagcacttggggagtccaaggcaggtggatcatttgagctcaggagttcgagagcagcctgggcagcatggtgagaccctgtctctacaaaaaatacaaaaattagccaggcatggtaacacatgcctgtagtgccagctacttgggaagctgaggtgggaggatcgcttgagccaaggaggttgaggctacagtgagctgtgactgcatcactgcactccagactagcgacagagtgagaccctgtctcaaaataaataaataaataaataattacttaactccattaaaaattatgatttctaatctcagaagacctccagggtcaccagctaatctcagtccatttctcttttctgacatctgatatttaatctcttacctccttcctcaagtccccaatcatgttcctctttacagtggaacatgaacatcaactacctattaaacagttcacaagtttttctactagaaataataccttataaagcttggtttcactaaaagtaaatgcttacttgaaattgctggttttgaacttgatatctcgccaacaaagattggctcatcatcatcgtcatcctcaacttcttttactttcttctgccatggttccagctcctcttcttcacattccataaacagttctgccatttttgaattacctaattttcaaaaggagagaagtaaacctcatttttgaaaataaaaataaaaacatttttgtaatacatagcattaattttaaggtgtactttaataatcttaatagcaatttctgaattgatatttgtagtcagtatgtggtaacaacagtgagaaatacagagcttactatctaaaatattaaatagtaaaatttagataaacagataatcaatgacagtagttatttaccgtagacagaaaatttggaagtcaaattcagtgaaagtgagttttagtcgtatacatagaatatgattatctctacaaaaaggattatacccactgtctttttaaaaatgtattcacaaaaggcagataaactaagaataataggcaacaggtgggagataaactggataaactaaaccagattcaagaatgccaggcaggatgggagcagtggctcacacttgtaatcccagcactttgggaagccgagacagacagattgcttgaggtcaggagtttgagaccagcctggccaacatggtgaaaccccatctctattaaaaatagaaaaaaattagccgggcatggtggcccacatctgtaatcccagctccttgggaggctgagtcaggagaatcgcttgaatctaggaggtggaggttgcagtgagctgagatcatgccactgcattccagccaggggtgacagattgagagtatgtctttaaaaaaaaaaatgccaggcacagaacacagcagggaagagatgctagaatagaatatggaaaactaattaggcttattcaattaaaggcaaagtagatatttctcacaggaagaatgtcacaaatcatttcccactctaatgttatagtatagtccatctaccaaaaaaaaggccttcccattttcctaaatgccatcaatatcatgaaacttttttctctaaactgtactattttactaattatacagagttcttcaaatctaataattaaaaatactaattttcattgacaagtcataacttagcatttgtgttttttaaatacttgaaataccagccttattgtgtgtctcagagcgattatttataccacgtcttctacctagaatatctttccttctcagttttacaatctatgtcactccagtctggagcaaagagagcagagagctgacatcaagttgaataattcaaatctttcctccactgtttctaatcatatgactctagagaagttacttgaacctattttcctcatctataacacaagtatgatatctacctaatacaagtattacatagattcaagaaaatgccacataaagcacctaaaatcaagtggatactcaacaaaatattaattccctggccctcctaactcttggttcaattataattcctcttgtaaaccattagattttactttccttcaaaatctgaactacactgataatcaatatcatgcaattcaagatttaacatatacgatctcaaactgctattttttcatgtgtcttaattttatatgtctaacgtcatataggaatacatttccccctatacattagaggggcagtaggcacatggcatataataatctatggactaggcgaagtcagaaaatgcataattttaaacaatcagggagactcgttgtatagtaataacaaaagtattatttatatccagttggtataggtataggctgaactgtgttttctcaaaattcatatgtttaagacctaaccctcaccaccatagaatgtgactatatttagagattgggtcctcagaagtaactaaattaaaataaggttagtagggtgggccctaatctagtatgactggtgtccttaatagaagaggagattaggacacagacacaagcagaaaaggagatcacaggaagatgtaaggagaagatggaggacaggcacagtggctcacacctataatcacaacactttgggaggctgaggcaggcggatcacctgaggtcagtagttcgataccagcctggccaacatggtgaaacccagtctctactaaaaatagaaaaaaaattagccaggcgtggtggcgagtaactgtagtcccagctactcaggaggctgaggcgggagaatcacttgagcccaggaagaggaggttgcaatgagccgaggtcatgccactgcactccagcctgggtgacagagtgagaatctgtctcaaaacaaactaacaaacaaacaaaaaacgagaagatggccatctacaagtcaagaagagaggcctcaaacccttcccatatggcccccagaagaaatcaatcctaacgacaccttcatcttggacttctagcctcaagaattatgagaaaaatgtccattgtgtaagccacccaatctgtggtactttgttatggcagccctagcaaactcatatagtatacaaaggtcttccttgttctttttaacagggcactgtcattgttaatatacccaggacatatttttgagaaaaaaaaaatttaagacataatagctttataatttttttagaaataatttaatttttgtctatgtacagaagaaacatgtatgattatatgtaccaaattggtaaaagtagtttcttctgataatgggggaaaacacttctattttactcacttttttatttatattacttgtttttatgtgaacatttgttactttaacaattttaagcatttttgttttttaaaaaatgtctcccaactttcatcctttctcctgaggtaaagtgatacaaaagccacatatattagtattagttgtggcagcaacacttactttttggttgaaaagggttgtcgcccatcaagctgcagagatgactttctgtaaattgtcacctaagtactgacacatgatatcagtcaatttaatgagtcactttaagtaacaccaaatattgaaacatgaaacttgggattcacaaattattggatgtaaggttaacctctaaactcaccatgtgactccagacaagccagcaagttatttctgttttccttcctataaaataaagataccaactattagggtggacttcattaaattagatgtatacatatttaatcttttctcctatacagaggtcaattatgtttgatatatctgatatacacatatagttcattttacataattggttcattcctgaataaacccaaatttaataaataaatggtgattatacttggcacttaatactcgaagaaatgtgatgatttgtaaattacaaataattttttaaagtatttagtaaaaacgagtaaacaccttacaatgtactggttttggaaatctaacttttcaaacgctgagtgacattaatctttaacgttatcttttctttgtatttcagaaatacatgtaattatttctgcaagaaaacacaattttaaacaaattttagtttatatctttctggctttttatcaaccgaaagggaacagaaaattcattggaaatatttcatcatagattaattcattcaaaaaataactactcatggccttctgtatggaaggtaatgtgctaagctcaggggaaaacaaaaatgagtaagtcacattcttaagacttcagaagtttacaatctagtatgtcaataatttatttggctttaaaaatgctgttagaataaacatttttttaaaaactatttgaattgctttattcaaactgggaatctgttttttgaatttccatgcacacgcaatagcatgaattttacaaaataaacaagcttttataaaactgagttataaagcaaaaaacgtcaacaattaaacaatggaaatctaaaacactggaatatataactaattcaaccttcactttcctctttatccttaggctgacaaaagcaagctttcctacttttcaatttctaaagtatgtaaactgaattactacaaaggaaaaattattactttaatttcagaagttattgttattaattcagttattcagagttactatcacatgagactctagcgaatcttgtgcttaactaaatatcccctagttctaaagttgtactattaaaaatcttttaactcaatttttgaatagctgtagcttgtcccactagcaacagtataatgcttatttcagataaatacgtgataatccttgcttcacattaaggacttatcaataccaggaacacggaatatttttaagattcacaattacatatcctatggactcatacataatgtttttaagttatcaggtaagtatctactggcttcagaattttcttggtaaagcacagaattctatgaaagatacctgacttcaaactatactacaaggctacagtaaccaaaacagcatggtactggtaccaaaacagagatataggccaatggaacagaacagagccctcagaaataataccacatatctataaccatctgatctttgacaaacctgacaaaaacaagaaatggggaaagcagtccctatttaataaatggtgctgggaaaactggctagccatatgtagaaagctgaaactggatcccttccttacaccttatacaaaaattaattcaagatggattaaagacttaaatgttagacctaaaaccataaaaaccctagaagaaaacctaggcaataccattcaggacctaggcatgggcaaggacttcatgtctaaaacaccaaaagcaacggcaacaaaagccaaaattgacaaatgggatctaattaaactaaagagcttctgcacagcaaaagaaactaccatcagagtgaacaggcaacctacagattgggagaaaatttttgcaatctactcatctgacaaagggctaatatccagaatctacaaagaactcaaacaaatttacaagaaaaaaacaaagaacctcatcaaaaagtgggcaaaggatatgaacagacacttctcaaaagaagacatttatgcagccaacagacacatgaaaaaatgctcatcatcactggctatcagagaaatgcaagcgaaaaccacaatgagataccatctcacaccagttagaatggcaatcattaaaaagtcaggaaacaacagatgctagagaggatgtggagaaataggaacacttttacactgttggtgggactgtaaactagttcaaccattgtggaagacagtgtggcgattcctcaaggatctagtactagaaataccatttgacccagcccttccactactgggtatatactcaaaggattataaatcatgttgctataaagacacatgcacacgtatgtttattgcggcactattcacaatagcaaagacttggaaccaacccaaatgtccatcaacgatagattggattaagaaaatgtggcacatatacaccatggaatactatgcagccataaaaaaggatgagttcatgtctttgtaggcacatggatgaagctggaatccatcattctcagcaaactatcacaaggacaaaaaaacaaacactacatgttctcactcatagatgggaattgaacaatgagaacacttggacacaggaaggggaacatcacacaccggggcctgtcgttgggtgggggtagaggggagggatagcattaggagatatacctaatgtaaatgatgagttaatgggtgcagcacaccaacatggcacatgtatacatatgtaacaaacctgcatgttgtgcacatgtaccctagaacttaaagtataataaaataaataaataaatactaaatctgctgccagagaatacatccaacaaagatgttcaatggagacatcaaaggcctcagctcagagttggctctttaagacagcccgaaaaggacgggcgcggcggctcacgcctgtaatcccaacactttgggaggccgaggcgggtggatcacctgaggtcaggagttcgagaccagcctggccaacacagagtcaaactgtctctactaaaaagtacaaaaattagctgggcgtggtggcacacgcctgtagtcccagctacttgggaagctgaggcaggagaatcgcttgaacccaagaggcagagggaggttgcagtgagctgagactgcaccactgtactccagcctgggcaagagagcaagactctgtctctcgaaaaaataaaataaaatagccaggaaaaaaaaaaaagaggactctcaacttcaactactaactcaggtacagattacatgcccatatttaatatactgtttgcatgggggaaaaatgaattccaagtaactgacttaaaataaattccattcatttatggatactgcccacataaataattataattcctattttataaatttttggtttcagtttttatctaaaattaaactgtatcttattttttctataaaaaaaattagaaatcaatggaaatgtgggtctaagtgttttaactatctgaaattttcactttcatccattgatagatatcacccgatgtactgctgccgtgttaaataatattaatactgcatgtgatcaagtacagagcacatactatggacacaggtgtgctatatactagatatagtcctctttactttctgataagaaaaaaattaagcaatttcacaaactacaactgtagtatctgcacatttaaaaaaagaatatcgcactagaaaccaggagaaccaagtcatagtaccagcatggccacaaccttctgccaagtcatcttcaattctagctctcaggcttatagttcaactgaaagattctggcttaattcagctcaaaatctattgtatactttaaacatttagtaaccatgaagagtaaaacatggtgaagaatgaatgccaaattcaaattctgactcaatcacttattaccaatatgatgttggacaagttagttaacctagtgccttgctttactgctttttatacatacatttaccatttacatatacataaaaaataaaaatagacttatgtcattggattatagtgaagattaaatgagataatatatgtaaaacacatctcagtgcctggcacatggaaaccactcaacgatgtttaactatttttaactctgagataaatcccattttaaagaactcgaggccaggcatggtggctcacacctataattccagcactttgggaggccgaggcaggtggatcacttgaggtcaggagttcaagaacagcctggccaacatggtgaaaccgggactctactaaaaataaaaaaattagccgggcatggtggagcatgcctgtaatccaagctactcgggaggctgaagaagaatggctttaaccaggaggcagaggttgcagtagtgagctgagatcgtgccactgcactccagtctgggtgacacagcaagactcagtctcaaaaaaacaaaaaaaagaactgatcccaattctgttatactggaatttacgtgctatcagctaagcatttagaaatcattttgttttatggtcatgcatcacttaacaacagggataagttctgacaaatgtatcattagatgattttgtagttgtgagaacatcgtagagtctacagtacttacacaaacctagatggtattgcctactacacatccaagctatatggtatagcctattgctcctaggctataaacctgtatagcatgttactgtactgaataccgcaggcaattataacacaaatcactaggtaataggaatttttcagtccattataatcttacaggaccaccgtattatataatgcagtctgtccttgacctaaacatcattatgtggtacatgaccttcattacagtgaaatttctcatgatgaaattttagctttatatcttccagactgtggctgtcaaatctatcctaccacattttcatctttttaaaaaagcatttctaaactaattaaaatatacaccaaaaaaaattttaaccctcatataaacataacacactgttaaattacatactactaatctaatagaataagtatccaattcaaaagtaccaacatataaaaattaacatttagataaggtatctttacaccatttctattaagaaaaaaacgttcaggctgggcatagtggctcatgcctctaattccagcactttgggaggccaaggttggaggatgacttgagctcagcctgggcaatatggcaaaaccccatctccacaaaaaatacaagaaaattactgggagtggtggcacatgcccctggtcccagctataagaggttgaggctgcagtgagccgagactgggccactgcactccagcctgggtgacagtgtgagaccctcataccaaaaaaaaaaaaaaaaaaaaaggaaagaaagaaaagaaaaaacactcattctacatgtatcttagtattttattttctaaaaaataaataaataaatagctggtaattaaaacacaaaagtgattatgaggaacatggtgaatggcttttttttttttttttctgaggtggagtcttgctctgttgctcaggctggagagcagtggcaccatctcagctcactgcaacctccaccttccaggttcaagtgattctcctgcctcagcctcccgagtagctgggattataggtgcgcaccatcatgcccaactaattttgtatttttggtagagatggggtttcaccatgttggccaggctggtcttgaactcctgaactcaagtgatctgcccgccttggcctcccaaagtgctggcattacaggtgtgagccaccatgcccggtcaaatggttaacttctacatctcccccaatcccataaattcaagatataaaatcaatgaaataatccaaaaaatcacattataaagttaatctttctttttgtctccccaccatacaaatgttttaattggggattgcattactaaccaagaagttggcaacaccaaaacaagatatgatcaacttaatagatacaaaaaactatttcaaatagtgaaaatttatactcaaaataagtattgcacataaaaatgaagttcaactaactcataaagttagctcaagataatgttctatctataaaaaaactaacaatttacttatatacttaaaacgagtttttcagtggaatcatttagatgacactggcttattggttcagtaaagtttgatctttcatttttttactctcagaaattttccaagaaatcaggcatttaagtcattctacttaaatcagctttgtttatattctatttcattttataagcaattctttagtctttatgtcactaatggcatactgaaatggaggactatcattttagaattccaatctcagatgaatagagcttaaaggatacaaagtgaattctcaactatgaataacaatctaatatttcaaaccctgattttgtgatccctcaagcacttccaactatctcaataaagtattcaaaaattaattttatttaatgttcaccaccttacaatcctaagaaatattttgagtaaaaagagcaatttttaaaactcctgttgtacatccccttactatccattgcctgttgattccattatggaaaattggaaattactgtaacaggattagaaaagcagtgaatgatgatacctactttggcactataagacaaatctgtgtgatagaaaatgtaaatcataagcgataaacaataatataattaaaggagagacctatgattaaaatgatttaataaaatttaggtatttagctatgaaattttataaggaaattagcttactatattttttatttacaacctttaagcagatgaaatttcaaatcaatacttccttttgtgcctcaagtatttcttacaaatgttttagtgttagaaaactaagtatctttttcagaatcagtccagttgttactgttaaaaaccagtcttactcttgaaaagggcacattcccaccacacaaactttattactaaaaacacctgatcagcagctaaaacactgtagacaaaatacgggatgattatagaatcttaagagactgtagaagataaatctcacccaatttctgaaagattctaatttttatgaagaatattgtctcccgataataagcactctaaggaagaaaagatctttaaaaagggaatatatggatacaccatagtttttatttttaaaataaaccaaaaatatctaatgtcatttttaaaagactatatatttgagaatcttaacagtgaacaggcaaagagaagggaaaaggttggaattcagtcttgaaagaagtggccttcaaaggcgatcaggactagaatagggaaaatccaggtcctggaagaggctgctctttccaagaataaaaagatagagcaatgaggccagctttccctgcccatctcctaacttatacaaaaaacttcattctctgaaggtaacttatcaaagaattagcacgttaattctctgaaattaagataaatccagatggattccttgaagccaaaacaattctccaagttagtgagctcagtcaagactttgaaaggacaataaaatacttgataatattaatgattaagaatttgaaaaataatatacttattttctttctaatgcaagatgcaaatctcaacacttttttcataggatatgaaaaggatcctatctcaaaaagttacctattagggggattatgatgaatacataaatatcttataaaagaggatatggttgctataattataaaaactaaaagtggtacagcagaggttcttgataacgtgttgggggcaccatagaaataaaaaagttagcaaaattttgtgaatactcaatttctggaaagataagacagtgcatcaaattctcataacagcctatgaaccaaaaagttaagagtttctaggttaggagtttgaataaaagcaatcacattagccaggggttaggaaataccctatcatggaagaaacatatgcattaatccttaaagtaaaaatgttttcattagcactttttttaaaaaataaaacatgtttactgaaaatggttcaaacatacagtgtatataaagtacaaagtaagaatcctattccctctcctgccctattcccaatcccactcactagagtttggtgtgtgtgatgcaacagatgatagtgattgaagatagagttgtggttaagggataagaagggtattccagtgccttgaatgacttaactaagggcaatatttatagcaatgatttgaataaaagctatactgtgtgcagattcaatttatgcatgagtagagagtataatacatgtaaactagcagaatgaggctttacccagtctgtccctggatctaaaaacaaatgaaggaatatgttaattaaataaataaatggaatgaagctttaaaagatctcaataagagaatgaatggtagtaacagttttgtatttgcccaaaaaaaaaattaacaaaaatataaattgaagatgtactgctgaagatgtaccagaagatctacatgacagaaggtcatttattccagaagtgcacatttggccctccctatccgtggttccacaaccacagattcaaccaaccatggactgaaatattcagaaacaaaaccaataaacagtaacaaaagaatgataaaaaatgcacctttaaaaaatatataacaactatttacatagcatttactttgtattaggtatcataagtaatctagagatgatttaaagtatatgagagcatgtgtataggttatatccaagtactacaccatgttatataagggacttgagcaccctcaaattctgctatccactggggtcttggaaccaatccctcatgaatactaagggacagctgtactgattgaacatttactgtgtgtcgggtaggaatacaataatgaacaaaaattaatacatacttactgcactcatgaaacttgtggtctagagatagggacaaacacccatacaaagagatgtaaaatgacaatggtaagtgctatgaaggttatgaacctggaattatagtcagcataatcaaaattggctttgctaaaaaaagaaaagtgataattaagttgttatttgaagaaagggttggagttaactaggcaaacaggagaaggaagggaggattccatgaagaaggaactgaatgtgcaaaagacctatggcagaagataagccagcaaatatgaaaagctgcaaagaaaccattgtgactgaaaaaaaaaaaaaaaagcaaggagttacatgggaagagataagacatagagatagacaagagttaaacaatgaagcacctatggactgtgttaagaaattctgtccttatcctaagaacaatgaaaaaccactgagggattttaagtggggactgatgtcagatttgtgacacagtgtcaaaataacagaatttgagtattaaatcagagagaagactattttaccctattctatactaatcaacacccccacttgaaatactacatattggccatgattctttcaactataagtaacaaaaacccaactcaaactggcttatgcaaaaggatatttattggctcatttgtagaaataactacaggcataattcacacaatatcatgtgaatctggtttctttctccattcctgggcttcacttcctctgtattgattctatcctcataaaggatctccattgaggatgactataacagctccagtctaaccatcttcaatattgaaacccaggacaatgacaagaggcccagctatgattggagttggttggcttggctaaaattacatgcccttccctaacccaatcactaagggaatgctaaggcattgtgataggtttgggcttacatcacatgctctccctggtaccagagggagagtcttaatcaaaaagcacaagaataaagattggaggaagaatggttttccaaaggaaaaccaagtaagggtaaatagatgctgggtggcaaaaataacagatgtccactacaaggaattcagaactagagctttgtctaggtcaagttgaaaggactaaagttatttaacctaaaaaacctgagactatagggtgggagaagtaaaagctatttatggagattttaaagtttgtcatgagaaagaaggaaagaaggtgacttgaactttgtgtggctcaagtaataataacaacaacagtaatatttacttgttttgagcaaactagagaattgctagtattgagctttaacatcacttcattccttacattctactatgttatcgccattataaattatacaatatgataaatatataattataaaataattgtaattagtatacattaacattagctaacattaaatgcatatattatttcacctaatcctcaaaaactcctatgaggtagacactatcatcatcccctgtttacagctgtggaaatttagttatacagggtaagtatctcgcccaaagtaacaaaacttagtagaggagcaaggattcaaatccaggcacttctaaggctgaatatttcagacacaactctatttgcctccaccaggaatactggaatatttggaataccaaattacagggaggcagacttcatctcaatataagaacaaaacaattagcagttaaaatatcaaaaacgaagatgaactctaggtgagaaagatcatcaaagaaaaatatgaaaaatttaaacattatgtgactgaaaatgttcactttcaagatcccttcaagaacccttccaaccctaaaatatttccttctagtggaggtatgtaaatttctgcctagactgaaagatacggaagatttttcattatttcagtaaaaaaaaaaattctaattagaaatgttgaattatgaaacttcatttttgaattagcaataaaatatctgataatcaacctgttatatccaaatatttctaagacccttcaagtacaatataatgaatgaagcagttaggttgaagctcaacactgagaacaaaagtcttgagttaattcaaaacaagtatattctttaaaaaaaagtaacagccaacaatcttaaattaatttcattttaataaagatgtttgagggcttaaatcaaaactcccaatgaaatcaactgcttcacagacacagattcagatcaaacacctcaaatattatagcatcatgataaatcaactttttagaattttaacatttttgtaaatgcaaaattcttttaatataatattaatacatagaaaggctatgcttcaacagactgcttaaatctacaatgaatctaaatcagtacagttattaaaagctttaatacgaaagaaaaattttcacacagggtacagggaatatcttcctcttcaaaacttcctcttcatccaactaaaatctcctgcaaatctgatctaggttgcaaaccacttgctctagttactgctacccactttgtcagtcaaaactgagctgagcacagcagggcagctacagcattatctactccacagtgctttgctaaaagcaagtatccacctcaagaccccaaaaaccctcccaatagccaaatcaaattaccttttcttcatttgcattttccttgtttatcttgcagctattttaacaccatttcttgaaatatcatgctcagtaattttctatacaccaatagtcctgtgtactcacctactcctttttaactctttagagattctccagatcacttcctccttaaataatgtaaaaacaggttttccacaaagtttagacctcagtcccacagaaactgttccctaacagcagatctaatagatcccatagtctcagctatcaattctcaacagcagcctataagatcagaaaatattcacctctgctacagtctgaatgtttgtctctcaaacctcaggttgaaatttgatccccaatgttgcaggtagggtaatgagaggtgtttgggtggaagagacaaatccctcaccaatggcttggtgctgtcctcacggtaatgagtgagttttcagtctattagttcccacaagaaatggttgtttaaaaaaaaaaacaaaaaacaaaaaaccaaaaaaaaagcctggcacctccctcctctttcgcttcctctctttcaccttataaatcgctacccacacagactcccttttgttttctgccatgagtggatgcagcctgaggccctcaccagaagccaagcagatgctggtaccacgatacttgcagaagcatgagccaaataaaccttttttctttataaaatgcccaaactcaggtatttatttataagaacacagacagagaaagacaccctgacatctcatctaagtcccagtccttcctcttttactactgaaaactactatctagatatttaaacgcacctcaaattcagtacatgcacacctcggagatattgagggctctgttccagaccaccacaataaagtgaatattgcaataaagcaagtcacacgcattgtttggtttctcagtgaatataaaagttaggtttacaactatagtgtagtctaaatgtacaatagcattgtctctaaaaaacaacatatataccttaataaaaactactttattgctaaaaaaaaaaaaaaaaaaaaaaagataaagctcatttgggccttcagtgagtcataatctttttgctggaggaaggtcctgcctccatgttgatggctgctgactaatcagggtagtggctggctgaaggttggggtggctgtggcaatttcttaaaataagacaatgaagcttggcacatccatcgacttttccttttacaaaaggtttcttggtagcatacgatgctgtttgatagcatttgatccacagtagaactcctttccaagttggagtcaatcctctcaatccttgctggtgctttatcaactaagctggtgtaatactctaaatcctttgctgtcatttcaacaatgtttacagcatcttcaccaggaataggttccatctcaaaaaaactactcatccataagaaacaactcctcattcattcaagttttataatgagattacagcacttagtcacatcttcaggctccacttctaaatccggctctcttgctactcccatcacatctgcagttacttcctccactgaaaccttgaaactctcaaagtcatccatgagggctggaaccaacttcttccaaacttctgttaatgttgatattttgacctcctccatcaatcacaaatgatcttaattggatctagaatggtgactcctttccagaaggttttcaattcactttacccagatccatcagagaaatcataatctacagcagttacacccttacaaaatgttatttcttaaatattaagacttgaactgaaagttgaaatgactccttgacccatgggcagcagaatggatgttgtgttagcaaacatgaaaacaacattaatcttcttgtacacttccatcagagctcttgggtgactagatgcactatcaatgagcagtaatattttgaaaggaaaatttttttctgagcagtaggtttcaataacaggcttaaattttctgtaattcatgttgtaaaccacgtttacatctggttcagtaaaccagatgtgctgtcatccaggatttgtggttccatttttaaagcataggcagagtagatttagcattttttttgggggggggggggacagagtctcgctccattgaccagccttgagtgcagtggcaccatctaaactcactgcaacttctgccacccaggttcaagtgattcttgtgcctcagcctcccgaataactgggactacaggcatgcaccaccacgcctggctaatttttatatttttagtagagacgggggtttcaccatgttagccaggctggtctcgaactcctggctcctgacatcaagtgatccacccatctccacctcccaaagtgttgcgattacaggcatgagccaccacatctggcagatttagcacaattcttaagggccctaggattttcacaatggtaaatgagtactggcttcaacttaaaagtcaccagcttcattagcccttaaccagagagtcagcctgtccttcaaaatttgaaagccaggcatgacttctcctttctagctatgaaagtcctagatggtatcttcttccaataaatagaagtctatttaatctatatagaaaatctattgtttagtgtagccgccctcataaattatcttaggtagatctcatggataacttgctgaaacttctgcatcagtacctgctgcttcatcttatacttttatgttatggagacagtgtctctccttaaacctcatgaactcatctctgttagcttcaagcttttcttctgcaccatcttcactctcacagccttcatagatctgaagagagtagggtcttgacctcgagcctttggcttaagggaatgttgtggcgggtttgatcttctagccagaccattacaacttcctccatcttagcgataatgctgttccactttcttatcattcatgtgttcagtggagtagcactttcaactttcttcaagaatgtttccttcgcaatcacaacttgactgtttgggacaagaggcctagtatttggcctacctctgctttcaacacgccttcctcactaagcttaataatttctagttctttttatttaaagtgagagatgtgcaaatcttccttatacttgaacacttacaggccattataaagttattaattggcctaatttcaatattgctatgtctcagggaataaggaagcccatggagaggaaactagggaagagctggctggtggagcagtcaaaacacacacattattatataagtttaccattttacatgagtgcagtttgcagtgccccaaaacaattacaatagtaacattaaagatcactgatcagaaatcaccataacaaatataataatttaaagtctgaaatattgcaaaaattacaaaaatgtgacagagacaagaagtgctcacgctgttggaaaaatggctgagatagacttgctcaacaaagttgccacaaaccttcaacttgtaaaaatgcaatatctgcaaaccacaacaagtgaagtagaataaagcaaggtatgactatatttccaaaactgaccatatcttcccctgaaaaattatgtctacagcattattcataatagccaaaaaagcaggaacaacccaaatgttcaactaataaataaaatgtggtgtatcaagaatggcaatcattaaaaagtcaggaaacaacaggtgctggagaggatgtggagaaataggaacacttttacactgttggtggggctgtaaactagttcaaccattgtggaagtcagtgtggcgattcctcaaggatctagaactagacataccatttgacccagccatcccattactgggtatatacccaaaggactataaatcatgctgctataaagacacatgcacacgtctgtttattgcggcattattcacaatagcaaagacttggaaccaacccaaatgtccaacaatgatagactggattaagaaaatgtggcacatatacaccatggaatactatgcagccataaaaaatgatgagttcatgtcctttgtagggacatggatgaaattggaaaccatcattctcagtaaactatcgcaagaacagaaaaccaaacaccgcatattctcactcataggtgggaaatgaacaatgagatcacatggacacaggaaggggaacatcacactctggggactattgtggggtggggggaggggggagggatagcactgggagatacacctactgctagatgacgagttagtgggtgcagcacaccagcatggcacatgtatacgtatgtaactaacctgcacaatgtgcacatgtaccctaaaacttaaagtataataataaaaaaataaataaataaataatcaaagtgaaaaaaatgtggtgtatcaatacaatgtagcattatttagcaattttttaaaatgaagtactgatacatgctacaacatgaaactttgaaagtgaaagaagtcagtcacacagtttgattctatttatatctaatattcagaataatgggtaacaggtttccttttgaggagctgaaaatattatggaattagtgttgacagttgtacaacactatgaatgtactaaatgccagtgaaccgtatatttttaaatggtgaaattatatgaatcttaccttaaattataaaagttagttttacttttgcatttccctttttctactaaactgccatccttctgatcttgaatccctggaggtttttttcaatgtctccctcttttaattatatctagtcaattccccaaccctatagacttccttcaaaatatttcccacaccatccttgcctctccatccactcaatacttgaccacgcccatagaacctcacacctaaagtgaaatagatttactttataagattcactttatatagttgctcttcagcttgtgatggggtaatgattaaacccatcattagctgaaaatatcgtaagttgaaaatgcattcaatacacctaacctaccgaacatcacagcttagtctaacttaccttaaacgtgctcagaaccctttacattagcctgtggttgggcaaaatcatctgacaacacagtatactgtatgttatcagttgtttaccctcatgatcatgtggctgactggtagctgcaacttgctgttgctgcctagtatcacaatatggtatcataccacatatcactagcccggaaaaagatcaaaattcaaaacttgaagtacagtttctactaaatgtatattgctgtcacaccatcataaagtcaaaaaaacttaagttaaaccatcttaagctggggactgtctgtacttggtctctcagcatccagatttttgctttcatctcttcaataaagagcccccaaattaacaatttactaaaataatgctttcattctgtcatttaccaattccaaattgtttaataactttccaacctaagcagagctcggttaggttatcctagtgttaaaagcttccaggtgcagtgaggtgcagaacaggtcaaatgctctaaggaggcaacacttctaacagttgttgtcactgcctgcctgtaaggctcacctgcattgtatagcccaaatagaagagaacatgtaattctgagataaaaaggctgacggtgaagtgagggaaaaccaaggcatcgtatcttataaaatgaatacacaatatctggcacccagtgttattccaatgaataaaatgaactttttctaagacttgatttcctcatctgtaaaggatgataacaccgccttttgcaaagaagtatttgttctgatgatggaatacggtaactgtgaacatactttataatctctaaaacactacaataaaagaaatcaaagaatagaaagacatctgttgtgtataacttctcaaatgaacagacactacaatgtagtgtcactgaagtagtgccaattttcttatttacctttttctattcaataacgttgtcagatctattttttttctcatggaatgtaagaaagctatttccatgttgcattttggttatgaaggcctttctagcagcagtcagcaatcctgtatagctgagagtcagataatcttaaaccttgaataggaaaagcagagcaagtaaaaaaagcaagagatacgacagagattaggattatacctaaaacccccaggcctctctcaagcccctccaggcttagcttcttagatttgccaaaggtaacccacaaaataaggaacgcacaggagtgaagcctagaagcaaagggcaaattagttcatagactgatcatctttgctttggttactagccctagtcaaaatgcgtatcaactcaaaggcattcagttaataatgttaaaaaaaaaaatcccaaacctgatcaaaaaaagatgtgtggttgactaaactttaaggatggaatctttgcctgggagtccagaaaccccaaacctgagaaatttttttcaatatgtattcatttacttaaagatgataataatgaaagcagcacatattaatatatttttacaaaaaaagtgtatttctcaaaacaaaaaatttaaagagtggtattgttttacatttttgctacatttttgcatacctcattgtcttaataaagacagctggattctcttacgaccttctgcattcaacctgttgcactacactcttctgttgaagaaaatacagcttcacaggaaaagtatgtggtaaagggaggacctagtagaatccttcaaagagtctcaagcccaagaccacatttagagaactactgtactagataaacacaagtcaaagccctttttaaaaaagaaagctaaattactatgctagctggtcaaaaatttgtaagttacataccaatccaaaaagtaaagcaataattttaaactgttggggaatattcaggtgattaaaaaaaaaaactaagtatttatcgaacattaattatgtgtaaggcattgtgtttacaaacacaaagaaacaaggcatacatcatcccaaaaattactttgtcttcatcctgttatataaaaccagaaaaacaggaatgtttgcaatgaaaatgactgaaatattttttggtgtaatccatttaagcaaaaagcctaaatacaacgttggcctgatgtgccagggttccaattaataattttttattatgaagggtctctgaaggtaaagcttggaagaaaggtttaagaaaaaaaaactggtaacaacaaaaaaactttagaacagaaacctcaaggaacaactttctaggtactgcctgtattcattagagatgtattaaagtacaacaggctaaaaaaaaaaacctattatggaagtagaagaggcaggtaggtttaatgtgtgtattggagaggggtggaactctaactgtccaaattaaccattaaagtccagtatactatcagagtccaaaggaaactagttttttactttctttcttgagcagttctttttagaaagactgacattattcacattgtttcctagagatctttaaacaaagaagggaaaatttacttactactttaaaatagattaaaactcattatatcttataattattatgtgggtctataacagaatccttttatcaatctaaaatacattatgggatgttagtggctttatttttcctacatcttgaaatattttgctaactccatcattctaggtattatttcaccattgttcatcaattaatcccaactatgctaaaaaaataataggactgcctaaaagaataatacaacagtgaaataaatcatgactaatgcattagccttaattgttctcatttattttccagttttcttatagttttgcaaaaatattgcatcaattttcaaagacatatggaaaactgaagacatttttgtagtctatgtcagagagggaaaacaattcctctatcacctttggttcagtatctcatggcctgtgaattaaactatgaaaagacagattcacaagagaagaagcatacaatttttattaatattgacatgcacaggagttcacagaaaagaagtgaaactcaaacaagtggttagacgtagaggcttttatactattttaacccccccaaaaaagggaacttggaatttcagggacaataaaccatgggaaagtgactagaaaaaatgggagaactaatggaaaataacggttattttagtaaaatttgtttatacaaactcatctctgccttgactctcaatctcaagggaaaagagttgctcttccctccctgttataagaaggaaactggctgggcgtggtggctcatgcctgtaatcccagcactttgggaggtgggtcacctgaggtcaggagttcgagaccagcctggccaacatggcaaaaccccgtctctactaaaaatacaaaattagtcaggcatggtggcgcacgcctgtagttccagctactcgggaggctgaggcaggagaatcacttgaacccgggaagtggaggctgcagtgagctgagatcacgccattgcattccagcctggacaacaagagcaagacacggtctcaaaaagaaaaaaaagaaaaaagatagaaattaatgccctgctactactaggcaaataaggggagggcacagaactcttccagcatctactgactctcaattgccttcaactcaaaataatcctcatgcgtaagtggcagattctgatccccttcatctgtttctagttttcactgaatacaattaagaactcagacttcattttctgcccaaaatggaagagaagaaaattaacagaggaaggcatttcacaactattagacgaaccagaagattaacacaaagatagacagcagcactttagactcttaatgatggtagtgaaaatgactttataagggaaatctcagactgagtccttggatgagttactttagataaattccctcaaacttaatcaatgagagaataacgtatttctaaaaacaaaaaggaaatacggcattctcatccagtgggaagaacttcatcacacaatatttttacattaagaatatggaccatgctgttctgctcaaagaaaatgtgacagtctttcatcctttacaagtgtgtgctaaaattttacttaatacatttttttttttttaagagacagggtctcactctgtcacccaggctggagtgcagtgacacaattgcagctcactgcaacccagacctgaagcgatcctcccacctcagcctcccaagtacctgggaccacaggcacatgccactacacccggctaattttttattttttgtagagacaaggtcttcttatgttgcccaggctagtctcaaactcctaggctcaagcaatcctgccttggcctcccaaagtgctgggattacaggcataagccaccacacccggccttgatacaacgcttaagtgcccaagtattgaatgcaggggtatgcaaaggtgactggaaggaaatagaaaatatagacattttaaaaaattcattggattgatcattctagttagttgctcataaatctgaaattgaaaaatcttgcaattgtggagcaaagaagatggccgtcctgtcttcaacaaaattatgaaccatcaaaggtttcaaaaattcttccagtattgcattttgatgatgtacatgcaaaaagacaacccagaaggaatgacaagcaagaacctatcagggaagcatttgaaatttagaatcagtatttataagacaaatagttccagggtcttgtatgaaagttgctaagtacagacagtctccaacttaagatggttcaacttacaacaattttcaactttataatggtgtgaaagtgcattcattacttccagtactcatacaaccattctgtttttcactttcagtacagtactcaataaattacatgagatactcaacactttattattaaaaaataagctttgagttagatgatgttgcccaactgtagactaatataaatgttctgtgcatatttgaggtaggctaagccaagctacgatgttcagtatgttaggtgtattaaatgcattttcaactcatgatactttcaactaatgacgggtttatcaaggatgtaacctatcgtaattcaaggagcatctatagttaattccattcagatgatgttgcccatttcaggtagaaataccttcaaaaggtgaaaaacatgaaatgaaaatctgagcaacaggtgacaatgaaatatgataagcttggacaatgcagatctacacagagattgggaaaaggcatgaaagtagaatcaagattgatatatacgaaatgacagaaaaatttcaaaattctgtcagacatataacttgtgacaaattttttacaaatttagacttggctgaatatcacacagcatcaaactctccttagttggcactgttaggaagaacagcattgaacttctgtgaattttcacaaatggaaaagcaaaagaagtcaactgcacaaaatctggatttcgaatataattcatgattcttattgtcctaaggaaaactatacctactcttctcagctcagtgcattctcaaccatcaatgaattttaaaatccttgcataaattaatctgaagtgatctgtattacaaaaagactacagaagtgacacattcaaaaagtgggtcagaaacaatacttggaagagaatgatttgaagatggcttatgactgatattagttcagagtatactttcattgtacgggaaaagcttcagttacaaaactggaagttaccaagaagaaattcctcatgcaactaggaaaataacttgcagaaaataggaagggaatgttgtcttaccctctaaccacaatgatttctgcacagatctgaaaatgggaagaaagaaagatgttctttgtacagatacagaaactcaaaaagaaaaaaatgtgtgttacaatgagaatgtttatgcaaagcgttcaaatgtgatgtatatttgttgtaggagtgttatgtaattaaatgcatgaaatagattttttattttttatttttctaagtacatacaaagatatctgctgtattgaaattcttattaaaagctccaataagttgttttacattatgctttatttttactcctataaattatacataataacgtaaaatgcaaaaaaaaccagtcccttttgacccagatgatagtgataattgtacacttttcctcgtatactgagggttaagagaatccttaaaattgctctggagaaataaatcaaaattctaaacatacaatttttgatataaggcactgattaaatcaagtcattatttaaatcactatttaaagcaatctgaaaattcaaagtttttaattcctttctaaagcaagaaaaaaactattcaggatttatatatttaattagtgaatatgtcgtaagtattcctcatcttccaaaacttgcttttggaataacaaagtatgttgtcaatagaaatatccaatttcctgtcacctaaaactacagttgacttttcatttgtgaaaactgctatttcagtgagccaatgctgattaatagaacactggaatgaaaaaggactggattagtagcctaactggacagatgttccagttgaagcacttgcaatcctccaacatcaaactacttcagaacttttctatttaccatagcttactatggctaaaatggtcctaagcaaactttcaaagaaggcaaagctttctgacatctactttctgcctcctctctcctagtctccctaggctctgatgccaacacatagaagcattccaagttccctaaagtagatgggttagtatttcctccagaattgtctccacttcttcttcttcctaacttccaaagccatacctaaacgactgctcccaactgtgtttatcagattactgcaggtaaattcctaccaactactaatgccaaaatatcacaccacaaatgacttgctaattgcagaaggaaatgcttacaatggaaagatagcttgtcaccaccttatctaagagatcaaatttaggattattaataagacaagcctactttatgtgcctttggatgttgtatgcaatgaagcatactgcatggcttatgaagtattcctgtcaaaaaaatattaaacctaaatatattcaagcctttagacccaaatccaagtttagagaaaacagagaggatagggggaacaaatttaaacactatcaggaggaactatcactaaaacatggaatatgggttattctgaaagactacagaccaggtctcttcaaaaggtcaatttcgcccagtgctgtggctcacatctgtaatcccagcactttgggaggccgaggcaggtggatcacttgaacccaggagtttgacaccagcctaggtaacacggcaaaaccccatctctacaaaaaatacaaaaattagctgagtgtggtggcgtgctcctgggttcccagctactcaggaggccgaggtgggaggatggcttgagcccaggaaggaggtcaaggatgcagcgagccaagactgctccacagcgctccatcctgggacacagagcaagtacctatctcaaaaaaaaaaaaaaaaaaaaaagactgaaaaggaattttgaagaaatggggggaaatgtgaatatatactacaccacgttagattttaaggaatattcttcactttcttaagtgtgattgcggtattgttacacagaaaaatggccttgatctcttacaaaatacatactgacacacatacagcatttagggctgaactgtcatatccgtaatgcactttgaaacgttcagaaaacagaatgtgagataagtggaaaaatgcaaatatggcaaaaaggtagcgttaaaactaagtgttcaaatgggctatttaactttccaatattttcgaaaaaaatagcaagttgcaaagttaagaaattaactcgagaataaaaatataaaagccaggctagatggtgcacacctgtaatcccagctacggaggctgaggtgagaggtcagcttgagcccaggagtctgagaccagcctgggcaacataacaaccgcatttcaaaagtaaagtataaaaatatcaacgaaagggcaactgagtaatgtttcttaaaatctttaagtgagcctccttgcctattctcatctacctcattcccacaaaaatggtatatactagagttgagcaccggagaaggagtcagaagacctaaggttctattaatataattggccttggctcttcctagtcagtgacctcattaaagtcctctccctgaggctctgtttcctcgcctgcaaaatgattccagcaacccagaccacttcaaaaggggctaagagatacaaatcaggggttatcaatgaaaggcacaaaagcaagacacaattacaacagtatttgtagtgatgttaaaacatcagaggcacacagccctaacaatggtataagcaaaccagtgccttccctggttaagtttctgcgtggagacagctggagttggcacagcagtcccccaaagcaggacaccttacagatgctaagaggcagcttttgtgctttaaaactgtccttctagcgttccattttatgtttcatggcactaaaaaagacaaattctgtccaaacctgaaaataaagccaaatatttaagatgacagatttttttttttttaacaaatcttcgcaaacaaaggcctttggccaaaggtctcccgtgcttgcagaagcgggttcaccttgacgtttttcctctccagcagatttctccttaaaagcgttaaaacttgcgataagttgggaggaattccttccatcgctggagcaggctaaaacctcagagtgagatcattctttccgtctcagtaagtgaaccttgcaaagctcagaaaattttgtctccaactccacgtttctcctcagggcccttcttctgtagacaataacgggaattctatggcagaggaggggaggtctctttgacaaaaatgagggtgcaaacgtggaacgaccggtcatctgggcaaaatgaggggccctgtgcctgcaaatcccgaatcccctttggtctcctttcctacgactgaagagacacgggggtgggctgtggtgtgaggaccatgggtcttggccaaacatcggcacaaaatgtaccaaagggagttgcctccagagagaaaagccaaaaccaggctggggacaaacaggcgcacacgcctgggagaggaggtggcggaggagcagaaggcgaaggcctgcgcggcccaggcctgcagcagccgaggcggctgccgcgtcgcgccgggatacctcctcccccgcctgggccgacgcaagatggcggtccggccgccgccgcgcagccggtctcctcccccgcgctctgggcgctcccgacgacccgcgccggcctcaagacccccagtccagcgcccccggagtgaggcggcgcaggccgcgcgggagggcctctgcctgctgcagcgcagggcgggcgggggcgggggggcgcttaccgtgagcggagcggatcggcctgactggagccctgaggaggaggagaaagaggaggaggaaaaggaggagcacgaaaaactacactgcggcgacggcggcggctcccattgcggagctggcagccgagccgtggaaaggggggggctctcgtgcagccggcgcgctgcctcatgggtaggctccgggtcagcctccccgtgtccgagctccctgtcttctcgccgacgcgggaggcgggcaccggcatgtgcgccgcgtcgcgggccctcgaagacccacgcgccccgccacgcgccggtccggggcgagggccagggccctgcctccatgtgggtgcgagctgctggctggtgtggccgggaggcagccccaaaatccggactgctcggaatttgcaggcgaggagccgtgcgttccgggccctccgcgtgtgtaacgacccccagtccgttggcttggaaagtgaaaaggtcatgggatacagccgccgttcgaaagaagcaaggggcctgtgggtcgaagactaaaccaggagagaaaaaggaatcgtccgtttctttaaataacgagctgattttaccaagtctgttttaaatgtgtggttttgcttgcgttccctgtcgaggtcaaatacgaagagacgaatctgtacatttagcgttttatttgggacacaggaattgcaagttcaggttatttacacatacagggtggtcttcagtatgtcagaagaacaaagaggagttagggggttttattttttaaaaaaagttatctattgtttttctagaaagttcgttgacatttagtaaagttttgggtagctggttagttctgactggtgagggaaggggcttggtaaagcttgccctacagctgcagcaggttctttgagaagctaaaacctgaagataaaacctgtttcaggttacagcaggcggtttcagcagccaggcttgctgagaattccattcttagagcaatgttatgtgccctgagggcttcccccagcactggcttctccattcttttagttggctatgacaagagtgacccaattagaatgattaacttgcacactctaattcctaactctgccatctgcatattaacctgtaatagcattttttaaagtttgacaacgagaagtataagaaatttacaagaagaacacttgccaagatactgcttgcgtaaatacttgctaaaggttgtattctgatctgtaaggaaagtttcctaaactgattgtcttctcaagagcaatggcattactggtgcagcttgtgagtgaccaagacttgaaatcttgcctgttaggatccataacagacaccctgttcaatcactgaatcttgctaattcatcttcctattcgaattcagtttcttctctctcatctggctttccccagtttttctcaagtgtttatcattactgtagtctccatattgattactgcccccaaattaatcttccccaaagaccacctggatcactcctacagatctggtgtacttggaggtaaccatgacctatccttctcccacatgggcctgggatcatctacccagctttcccttttctgctggccctgaaaaataaaccttacaggaaaagacagaaaatagtcaaaacagcaaacatggaaagtttaaaaattccaaaatcttggaacattcttaagacatcgtttttcaaatgtccctaaaggttagcaaagcatgctacagtgtcaggtgaaattacaacaaatttaaagatctcggttggctttattgcaattctagattcaggcaccacttcattcagtaaaacagaataggtgttcccatgaatggagcagatgtggttggctttatagacagaaaatgggctgaagaaagaagaaacaacaaaaaacaagttggtcttttcaaagttactttccttgtaaggtggggcactgagacagaataatagaaagaaaactgattggttaataccaggttactccagattaatattgtaagaacaacagcagccaggtgtggtggtgtgtacctgtagtcccagctactgaggaggctgaggcaagaggattccttcagtccaggagttcaaggctgcaatgagccatgatcctgccactgcagtccagcctgagcaacagatcaagacgttgtctcaaaaacaaacaaaaacgacttaaaacagggaacttcattatcatggggattgaaggtttaaactggcctgtttgggaaattaggctgttatctctctcctgatttctcagaaggccacataacaactcagtttcagttttgtgagcatgggtaactccatgttggtttttagtctagtctgctggggcttagtgcaggagtttggtccaaaataatggcatcctcataaaaaggaatgaaataatggcagttgcagcaacctggatgtaattggaggccattgttctaagtgaagtaactcaggaatggaaaaccaaacattgtatgttctcgtaagtgggagctatgttataaggatgcaaagacatagtaatgatagagtggactttggggactccggggagagcgtgagaggggagtgaggaataaaagactatacattgggtagagtgtatactgctcgggtgatgggtgctccataatctcagaaatcaccactaaagaacgtattcatgtaacgagacaccacctgttctccaaaaacctatgaaaataaaaagtaaaaataataaaatgatggcatcctattatttttatttataacaggatgaaagagaagattgcactctgtattctagagtctagtcctcactttgtagagacaaaagctcaatgttgccagtctccagaactaatttgaatcctgggggatgattcataccaaccaaacttactgagacacatgtgtaagccaaaattgcaattattttttgttgttgttcatgaaaaacacaactgccatggagaccaaaaagctggttaatgtattttcattcaaaggaacatttacgtgagaggccaaattacaaaagatgactcatgagaatagaatcagcacacaggaagttatttggatgattctgacatcgtccttcaaacttctgacatcatacgcccttggcctctagaacgccgttcttttggttctcctgacttacggtctgagctttcccaccattttttatgagcttctctgacttacattctcagcctgttctacatgttacacacttgctatagatatcctcacagtactcattctccttaagtgagattatgctccacatccttacctgaattattgcagtgaatatgggtgatctcccagctttcattccacaattactttgtgttcatccatgcaatttggacagacgtaatacaccgcacagcaggtccaagaattgtccaactggccaaaagttatcagagttaccctcaccctttgaactagtttttgtttcagaggccaatcagagggaagcctaggatttttgttttattgcagagaatacagaagttcttttttttctctgaatggtatggcattcaaatgtaaatactggaagagctacattctccctcttttttttttctttgctactaagtagagccaactgaaaataaagccaacacgtgaaggaggaatagctgggagaatcaatcatagggaaaggaagccaatccctgagagaatcataaaccttcaaataaaacatcaccggaacccatactgcctctagacttttctggtttatgagctaataaatcacctttgttgtttaagctgaagggatccagaataagccattgtggcataaaaattattttgagctgaatatgtttatgttcctgaaatcccttatctacctaaaagcagagcctttcaaaagaacccaaaagaactcaattgttataaattccctccagggagcaaccaaggaagattgagtcaccgtcagagactatgagaatgtcaccacatctaaacagacattgtcaaaacaactatgatatctcccatctattctccaaagggcccatttatctttcccaaaagtcatttccgtaagttccctttctgctccttccccttctaagaagtcatttgttttcccataagtgcttttctccccctccccttcagggaagtatatcagtctctaagccccaaattctaaccaccctctggagtcaacacttccttgtgatctccttacgtacatatgtgattaaaatctgtcttctcttgtcctttgtcagtttattcacaggcccccaattatagaacctcaaaaagtagaagaaaagtttttcctcccccacaaggccaatttgagttgaattttctcttacctgcaactgaaatcatcgttaagtgtgacagagataatgatacatattcaccatcttattttcctctttgcacccaggaaacctatgtttcccagcttccttaccttttatattgggctgtgtaactaattctggacagtggaatgtaaacagaagcagtgaccctcccatgcaagcctgaccttaaaacttccagtaatttatagttcctatttgtttttcacacaccagtcagctagatacagaaaactctgagaagctgggggatggcagcaacattatatagaaggactctgggtttcttaaaaattgcatcaacacactgatcctcactggactgattggagcaaaaaataaacctttattgggttaagaccctgagatttgagggtggtttgttgcaatagctcaaatcactaactctgattaataatagtgatggcctacaatgataaaaactaaaatgtgtgtcattagcttagcacagcaatcaggtgggaatcgaggaaatagatgtaggagggtggacagctgaaggttcactttaggcagtggctaaactcttgcttacaatatctcacaaggcagattagtatctacataacttgtagagctaagggaagagttcagaaagcaatattaatggtagaggttggtgatttttgatatttttagcaagatgttatcagaaggagattagcatagaacagaattaaccagtttattgttgggggcgaaggaaatttttcacatctgaaggtttgagtctgctgaaattaccaacaacagagagaataacaggagaaaaggcatacaaaggtattcacatggtactgtgcacaggagtcatacaaaacataagactcaaagaagggccagacagttgacactcaaataccctcttcatagcagagaagaaaatagaagacataagcaattttgaggggtagcaaatgattttcagaagacgtgaatgagctcaaagaacagacaatggtctgggacaaagttttctgagctctgagggaggtggcaacaagttgaaggaaggtgaggggcaatagaacaccaatagaataggtgttcccatgaatggaacagatgtggttcactttatagacagataaaggactgaagaaagaagaaacaacaaaaaacaagttggtcatttcaaagttactttccttgtaaggtggggcactgagacagaataatagaaagaaaactgattggttaatatcaggttacttcaggttactattgtaagaagagcagcagccaggtgtggtggtatgtacctgtagtcccagctactgaggaggctgaggcgggagtattccttcagtccaggagttcaaggctgcagtgagccatgatcctgccactacattccagcctgagcaacggaaatgaacaaagacggtcttcttatgcagataaagtctcccaggtaatctcagttgccctgagaagaatagaggaacagtctgtctgggcatgatgatgacttttagtcttttctcttctccttatggttaatcttcactggttatttgatgagattcctagggaggaggctttagaacaattgcatttctttggaaatgcaatttcttttgaaaaaagttttcttctgaaagataagggaacttccagggagagcctctccctgtgtttgggggttgcgaggacagaagaagtttagaaagtcctttattctgaggcaacttctaagcgtttccaagtttctttaattcagaagtgctcagcacaccccaaagccccatactttgaggtatcgttctctgagccctaacattacaaacagaaatgaaaggtaatagagagagtccaccactgggggactttgcagggttggaaaacactacttcttctacattccaaacagagatgtgactttcaaaggctttgagcaaggaagcaccagtacaaagtgactttcacttaggaaaagatcagattacatatgtttcagatagcacctattatttcagatagcctcaaagtaacggccattaaattgaaaaagaaaaatttagtcaaaaaagcagagaaataggcagcttttagaactatgcctccagaataaatactattgatgcttcagtatttaaaggtaggtgatattcatctaccttttttgagtgttcccattacctgaagtttcactgtgcttctgttttcaacagctgggatctgcaactctttttcacaggactgtccttaggcttttggaactactttgcatgctttcacaaggactggaagtccctgggaaattatatccctcaagggcagttcttaaccaatgactgataaatgcaggagtatggaagctttagctccccctgtcttgggtaggaacaatttagacaaataacttacactccagaatttccctgtaggatcaagctgaatataccctctgtagggttttacctacagctgtatccttggcttgtgggcaagttaaactactatttattccagttccacagccacccttcttgctttgtgatgctgggagctaggactctacaaaacaaatttgtgccttgccagttgctggtaggctctgccaatagggggaactaaagagggactggaagactggaggaagaagaagggctttgctccttcctgtttgcctgttttttcttcctgtcttcatgaatccagcaacttttcatcactccagcagtgaccattcaatcctgtaacagaggctcctagcaccatatattgaattagggtatcctttccttagtgtgtatttttgttgactttgtcaaaggtcaattggtggtaggtatgtggctttatttctgggctctctatactgttccattgatctatgtgtctgtttttacattaccatgctgttttggttactataacctcatagtatattttgacatcagataatgtgatgcctccagctttgctctttttgcttggagctttggctcttcaggattttttttttttaattccataatttttttttttttcttgagacagagtccaagtctgtcacccaggctggagtgcagtggcacaatcacagctcactgcagcctcaacatccaggactcaagtgatccttccacctcagcttcccaagtagctgcactacagacacatgccaccacactcagctaagttttttcaaattctttctagaggtgggttctcgctatgttgcccaggctgttctcaaactcctgggatcaagcaatctgcacctcgacctcccaaactgttgggattataggcatgagctaccatgcctggcattggttctataagaatttgaagattgttttttctaattctgtgaaaaatgacattagtaatttgatgagttgcattgaattcatagattgctttaggcagtatggtcattttagtgatactgtttcttccaatccatgggttgtttttctatttgtgtcatatacaatttccttcaccaatgttttataattcttgtggagatatttcacctccttggttaaatgtattcctaggtatcttatgtttttttcttttgcagctattgtaaatgggattgagttcttgattcggttctcagcttgattgttattggtgtatagaaatgctactgatttttgtatgttgattttacatcttgaaactttactgaagtcgtttgtcaaatctagcagtcttttggaggagtctttaggagtttctaaatataaggtcatgttatcagcaaacaaagataatttgactttctcttttccaattcagatgccttttatttctttctcttggctgattggactagctagtatttccagtactatattgaataggagtggtgaaagtgggcatcctcgtgtgttccagttcttaagaggaatgcttttaacttttcagtaaaatgttggctgtgggttttcatatgtggcttttattattttgaaatatgttccctctgtgctcacaacgttacaacatttttattgtcttttacaaaagtaatggtctgcagtggattggaattttttttaattggtcctttctgacagatagtttgagaagctccattttttttttttttttttttgagatgtatttttgctcttgtcacccaggctggagtgcaatggcgcaatctcggctcagtgcaacctccgcctcccgggttcaagcaattctccttcctcagcctcccgagtacctgagattacaggtgtgtgccaccacacccggctaacttttgtatttttagtagagacggggtttcaccatgttcgccaggctggtctcaaactcctgacctcaggtaatccaccggatttggtctcccaaagtgctgggattacaggcatgagccactgcgcccaggtggagaagctccattctaacattacttctagcctgacccctaaaacttgttaacattctcccagctttttttgttcttgggtcagtcagatgcagaggatcgaccagagtattctgagctctagaagacatgggagctactgcaaagaagtaacctgaggtttctgaacggttgatggaatagaaatatctcccccaccaaaatcagaggattgctctgaaccatgaggtgcatagaaaataaaccttattatcttaagccagtaagaatttttggtaatttgttttagtacctagtgttagttatccaaatacaatgtcattgaattttcctgtgatactgacttttatctatgtggccatgatttctgaatttatactttcaaaccacatccctctccaaagcatcagagccatatatcttatcacaaacttgaaaactccttgtaactatcccacaggacctaaaagctcaacatttctagaactaattatgcttctttctctttttctttctgtattccattttgttgaatcatgtcaccactccttcagttatccaactctgaaaactgagagtaaacctcatcttctctttctctaacccactataaccaagtgaccctgtaccatgttctgaagcgtctaccttctttgtatttccccaacacttactttactctcaattcctagttattctataatatctcgcttgaattactacaaaaatattttattgtatattcttgcaattaattccttccagtgtcacaggaacaacttttcagaaagcaaatataagtgtgtaatatccatacttcaaatatatattaaccattttcatagtccttgagataaacttcatacataaaattacatacatggtgcgttagacactatggattgcccactttaatgtccctccattctcctaataggagatgatggaaatctaaaaaaaattaaaataaaaaaataaacaaacaaaaaaaccctaaattccccatacagtagtgccaccggagcaccagatgtagtagattctgccaatttgatgtgctaccaccaggtttggaagataaaaatgaggtagaagtgatattctgttgttgttgctattggcaagcaaagttatgaagatgttggtgttaagaggcaattacagtagttaaacttggagtcctgatatccattcaccagcttcatggatgtaagaggcaactgatgcagcctcaatggtaacagcagcagtggcttcctgaatcctagatctcagctatgaagttatagcagccccttgatttctattcttccatcttttctgccaatgttatatttccccgaattaaatacttttctatatgaaatacctattttctctttctcctacattataacttgaccaattaacattacataacatacaaggcttggccaggcaccatggctcacatctgtaatcctaacactttgggaggccgaggcgggtggatcacctgatgtcaagagttcgaaaccagcctgggcaacatggtgaaacctcgtctctactaaaaatacaaaaattagctgggcatggtggtgggtgcctgtaatcccagctactcaggaggctgatgcaggagaatcacttgaacccaggaggcagagttttcagtgggccaagattgcaccattgtactccagcctgggccacagagcaaacactccgtctcaaaaaaacaaaaagtggctttcatgatgtatctcctatttctttcaccaacaatttcatgacacttttccatgaccgctccgtacacatccatccccatacgttgtatttaagctgtgctaaactattgcacatccacaagtgtgccattttctcatgactctttctatttcaaaggccatttttaccctttgtcaactctctaactcctccttattctttaagagtcaacttgaacctaatctatctactctgggaagattttcctgatacctctgcctccatctgtgtgcttgtaatggaaattcctcattcttactttttgccacacggcatctgagtcccctacctatgtttgagatgttgctattatgagatggaggcttccgtctctttaaaaactgaaaaagccaaatgcttgctttcccacatcccttgtaatcagggcgtgcatgtgatctaggatctgccaatcaaatatatatgtcccagattttgaattagaagctaatggcatgaaaaagagcatttttttgcagaactctgacaatgtatagcaacaaagaaggcagctaaaatcaatttttagaggcaatagtgccagtagttatagcaacagagttgtattagtggtgtgggtagttatagtgggagtgtctgtgctactggcaataacagtggtgtcctctccagcctagttttgtgtgattttggaagttgtacctggttgcatagtctctgggactggtttttagacctttcaagagactttatgtactaaccaatagctccttaataaattccttttctgcttaaatactccaaaatctgtttctactggttataaccaagagctttgagttatataatcccgctctgctttttccaattgcactgtgtatgtgtgagtttggattattgttcagcaaatatttgctcctatagactccaattatagtttctttcctgccctattgacattagtcttgatcatatgttttgggttttggccaatgggatgtcagcatctgtaattcagtggtttgacatatgctgtgtgcttgagcttgccctcctattccagttatgagaagagtatttccctggttgctgctgattattcagcctagtccctgagtgagacacatggaacagaccacataccccaggcaccttctggtccaaagacgaggaacatatggagctgacctaaacccaagctgtatcctggagcccaaaacccaggggttggagtcttacctatctagcccacagacttatgacctagagaatacaattgctattttaaatcactgcattcttatgcagtattgtgtccatagctgactaatacagtatgtaattattattaatagttacagccatagccagcctgtattataattattggtttattggtctgttgctctctactagactgtaagtttgttgtgagtggagactgtgtcttattggtctttacattttaatgcttattacaaaacctacaccaagactccgtgaatgtttgacaaatgcataaacaaatgaaggaataaatggcaagcattctttgcatttttcgatctattgcaccactataggagccgtgtaggacaatatgtctgtattaaaatatttcttctgctgccaaagtatggtaaaattgattagattgaggtggattgaattatagcatagcaatacattcatcttttcctgagactattctctttttatcttgtgtgaagttttgggcactcctcaatcaggtaaaaacacaggaccagctcataataaatatgctcaatgaatttcattttaacttgctttccagaattccttagttactgatttacacacagacccttctgcttctttatagatagttggttacttctattatgtacagagtctactagttttactctcaaatattagattaatttctttgctatcaatttgggcttatctttagtatctcattattgctttcatgtaccaaatacctaacccatagctgagacataataaaagtttgttaaatcaatttggcatttgttatattaatagtctccagagtatgtaaaattttgatgcaatcattttgactagggtacattttggtacagactaaaatagaaactcttatactttttttttcttattttgtcataatgtgcaaaatgactgttttcagcccattcctgagcctcctgcaattactgacatcctcagctagggtgaagatcagaaatgtgatgaagctcaggaatgaagtgagtataaggaatgaggtataaacaataaaaattaatttatattttgtcataaccgtggccattttgatgagtctgtaactacagcaaagtgactatgtcagaaacagaattgaaagctatgcgtacatcctgtctccctacgtttaagccctaaagcagtagtagtaaggtactggaccataaatagatatgttgtctataatgcagaaagtcaatcaatttcttgggaaagcaaaactgcttgaattaaaaccagaaaataatttctctattgggtcattacaggcaagattctatgtatggtatgtcttaatccagaggtagattttcttgtatccagaaaaatgaatgaattgcaaatccttccaatggccctctttcagctgagcttttaaaatacagtgaacagctctgaatttgagattaactctcctgagaaatacctagaaaacatctattcatcgtcactaattaagtacagagccttatgttttaataattagcagagctgggggggtagcattgacattttctggcaaagattaaaacataaaaaaagctacatggatagaaagtcactccacctggtacttggagttgtgccaaagaaataaagtactaggaataaggatgagattgtcttcagaaagtaatgtgtgtcccctctgaattacagacaaatgagttactgatgtttcagagttccacatcataaaacatggcagcaataattttagtatggaaaatgttaaataccattaccaccctttaacaataaaatttgtatactaaaatatctgtagagcatcaagatgttaatttcttattatagaatggcccacctgaaacttgcctgctttttgaacttaatattggcccaagatggctacagttgaaatttatcaagtatgaaagtggaattttaaatgacatattaaataagcaacacataaatgaagcttcaaatttgtagatgatgagtggaatagtgtttttaaaatggaatagcctgtgttgcaaacatttgagatctatagtgagatggacaagtcatctgaaatgagtttcttcattagttctggaacatccctagtcattatttcttaaagtgtttcctctgctcctttctctccttcctcttcttttataactctgatttaaaaatgttagattcccccactctcctccatgtctcctaacttttcttatatattttcttttttgtctatttatgctacattctgcataatttcttaatatatatgtcttctaatttgctgttatatttatccactgatttttttttaggagacagagtctcactacgttgcccagactggactcaagctctagggctcaggcaatcctcccacctcagcctcccaaatagctgagattacaggcacataccaccaagcccagcctgtccactgatttttaattttttcattttttatatttatttctatacaataccattggttcttttcaaatgtggtcacttgttagagtattttgatgttttaaattgtaaataggctctgtctgataattcatgtatctgctaaatttcgtgtgtatattttttctcatgagatcttttctgtttgtgtgtgtgtatgtgcatgtgcacatgtgtgttttactgtacactgattagtgtccctaaaatattatgtaaaggaattcttcgaggcctaggatgaaggttaccttctttcagtgaggattttcctctaccagtcagaaccacattatccaacttcatggtttcatgttccctgactatccaaaccagctctgtaattcttggtggggcacaacttttcagggaggagttctctccttttcttttttcatctgttcttctcagtgttaaggcaacattcacctctacccctgggagtatgggagtgtagtataactatctgagattgggtaatttataaaggaaagaaatgttttttgctttttgtttttttttgagacagagtcttgctctgtcacccaggctggagtgcagtggcgtgatctcggctcactgcaaccttcacctcctgggttcaagcgattctcctgcctcagcctcccaagtagctaggactataggctcctgccaccatgcccagctaatttttgtatttttagtagagacagagttttactatgttggtcaggctggtctcgaactcctgacctcgtgatctgccctcctcggactcccaaagtgctgggattacaggcatgagccaccgcacccagccagaattgtacggaggctgggaagtccgagattgagggactgcatctggtgagggcctttttgctggttgggactctttgcagagtcctcaggcactatagggtatcacatggtaaaggggtttatgataggtggccctactggctttttaaaataacagatctactctagtgataactaactcattcccaagataactcattaatttattaatctgttaacctactaacgcattaatccatgaatggactaatacattcaggagggctctgcctgttaaaggcccacttcttaaaagtgtttccttgaggattaagtttcaacatgagttgaaaccatagcagtatatttcaggttttcttttactctgagggtgacacccctttggggtgctagctcagttagggaggggtcatcttgtaggatcccctccttggataggccctgggtacatctgctaaaaccaaggttcaaatctgtccagatcaacaagttccctcagagaaaaggcatcttcagtgcattcgtgctcagcttatctctccagattccagtgttttcttagattttggcccgtaattccttactaccttgacagttctacaatgcttctgagaaaaaaattaatattttttccaacatttttagttttttcagcaggaggattcagaatagaaataaaatacataactttaaaatgaagagaggagataaaagggaatgaagaaaaattgatcacggaagacaaaaaagaaacacaaactaaaagcatggtaaataaaaaaaaaaactaaaatagaaatgaatccaagttgcaaaatgattcattcagtatgataccatttatataaaatttgttaaaacataaaataaaatcacatagaatgtattaaaatattcatgataatgaacataccaacttcagtagaaatgctagttcaacagaaaggaaaggatgaaagggaagaaatggagaactttattgtattcattttgtttatctaaaaggagagagtgaggctgggtgtggtggctcaggcctgtaatcccagcattttgggaggccaaggcaggtggatcacttgagcttatgggttcaaaaccagcctgggcaacatggcaaaaccccatctctaccaaaaatacaaaaaattagccaggcatggtggcacgtgcctgtagtcccagctactcaggagactgaggtgggaagattgcttaagcctgggagatggaggctgcagtgagcagtgatcatcccactgcactctagcctgggtgacagagtgagaccctatcttggaaaaaaaaagaaagagagagagagtgagctgaagcaaatatggcaaaatgctaatgtctgtaaatactggtagtgggtacatacgtgtctgttacattattgtttgtatttttcagtatgtttgaaatgtttcctaatttaaaatattttaaataaaacttgattcagtgtgttaaaagtttaaaggagaaagtcatatgatcaacttagtagatgccaaaattatttaataaaattcaacatccatccctaaggggattgggaagcaaccttagtaaaatagcaatcgaatgaatgttctgtataatttttattggctctggagaaatgctaagagagcactaggagattcagacttcaacttttccattttaaacaaacttgtgaaaacaaagttgtgaaactcttggcaaatacaatagttcaagagaaggagcagaatggctaagttacatgcaagtccaggactagggtgaaaccagagaagaacctaggatgcaatttaaaggagacagtctcctcagtcatctcactccagtcctgggccacatggcaggtgttatgtttaactttttaagaaactgctgcatccttaccaatacttagtatgatcaatctttttaaattttagacattctaataaatgcatatatggcttaaaattttgcttgttcctaatgactaatgatactgagcattttttcatgtatttatttgccatccatatatcttctttggtaaagtgtgtgttcaaatgttttacccattttttattggatatttttaaatatttagattttgagaaatctctatatattatgaatacaagtcttttatctaatatatgacttgaaattattatttctggtctgtggcttgtcttttctttctcagaacggtgtctttcaaagagcaaaagcccttaactttttggtataatttatcatattttttaatgactcacactttgggtgatgatgtgtctttacataagccaaaatcacaaatattttctcctgctttcttctagaaatattatagttttaggttttagatgtaagtctatgatctattttgaatgaatttttgaatatgtttgtatatggtgcaagatatgaattgaggatatttatttatatacttattgaatatggatatccaattattccagaatcatttgctgataacctttctccattgcaatgcctttgaatctttgtcaaaaatcaattgatcatatatatgtaggtccatttgtggattctccactctgtgtggttgatctgtctgtctatatttttaccaatatcatactctcctgattaaaatagctttatttatcatactctgttgactaaaatagctttactaaaagttttgaaatcaggtagtgttggccttccaatttttttcttttttgcaaagttgttctggctcttctaggtccagggtattttcatatgaatgaaaaaatcagactgttaatttggtcaataaaagtctgctgggattttgaatgagattacatggaatctatagatcaatttgggagacaattggcatcttaacaacattgagctttcatttccataaatgtggtttattttttcctttatttgggtcattaatttctagtagcaatattttagtctttttagtggacaggtcttacccatgcaatgtcagatttttttatatgtatttcatgttttcgatgccactgtaaatagtaatttcttaaatttcagtttcaattgtttgttgctaatatgtagaaataaaattgtttttttaaaaaaatttaccttgtaacctgtaaccttgctaaagtcacttactagctctaccagcttttttgtagagtccatgggatattctacatacatgatcatatggtctgcaaatacagttttagtttttccttcccaatatggatgcctttctttcatttttttacattattgtactaatggtgaatagaagcagtgaccgtgtacatttttcttttttctttttttttttttttttttgacatggagtctagcactgtcgcccaggctggagtgcagtggtgcaatcttggctcactgcaacctccctctcccaggttcaagtgattctcctgcctcagcctcccgagcagctcggattacaggtgcccgccaccacacccagctaattttttgtatttttttagtagagacggggtttcaccatgttggccaggctggtcttgaactcctgacctcgtgattcacccacttcggcctcacaaagtgctgggattacaggcgtgagccactttgcctggtgacagtgtacattcttctatggcttctgatctcagaagatagaaacaaaacatttagctttttatctatagggttttttgtcaatgtcctttatcaggatgagtagatttccttctatttctcatttgctgagagtttttatcatgagtggatgctagattttgtcaaatgttcttattgcaactattgagattatcattttttcttttttagtctgtcaaaatagtgaattacattgactgattttcaaatgttaagtcagcctggtattcctgagatagaccttttttggttctttttatatactgttggatttgatttgttaaatttttaaaaatatgtttacatcaaactttatgagggggattggtctgtggttttcctttcttaataatatctttgactgattttggggatcacggtaattccggcctcacagaatgagttggaagtagttcctcctgtttaattttttagaagtgtttatgtggaactggtattattttctaccccaaatatttggtagaattcaccaatgaaggcatctgggcctggatatttttttgtgggtaagtttttaaatacaaattcaatcttttaatagatatgtagatatttgtgttatctatttcttcttggataagctttggcagctcatttcttcttattactgaatacctcattgcatggatgtaccacaatttatttattcacctactgaaggacatcttggttgcttccagttttttgcaattacgaagaaagctgctataaacattcatatgtgggtttttgtgtggacacaagtttttaaatcatttggataaatacctagggcactaagaggctgatttacttgcccaaggccatataattatggagcaacacagacagaacttgaacttgaacaacctgacccagagtttatacacctaaccactatgcaaaactgcctttcaacatttgatacaagtcaggcaaactcactaaaggaagagtctgcaaatgagggggcttgagtcagatcttggatgaagactaacagttgataaatagaagtagaaagaaactttcaatgtagggtatggtgaaatgctacttagaaaagcatagtgtgggataatggtgatggttgcacaacaatgggaatgtactattaagttattccactgaattataaacttaaaaatagttaaaatgataaatgtcattatgtgtattttaccgtagttttctaaaaagtgtgtatgttgggttttgggtgcaggagtaaattattctgattaaagttttattagggaaacaaaaggagatgaatatgtaaatttagaataaaatcagtatgaactgttaattatattctacagtctaggagaatctgaaaattttgcaaggtggaatggacatgaaatctacaatttcaaagtgttaacctgtgctatataaaaaatgtatagaagtctcatacaacatagattatgacaagggacaaggctggagagaacaggttctctgttgttaagagaatgaactcaattcaatctagatgcatttatatatgcattatttcatttcctctaacaacagctttataaggtggatattactgtctgttatctatttcttcttggataagctttggcagtttgtatctttcaaggaatctgtccatttcatctaagttgtcagatttattggcataaagttgttcacaatattctttttatccttttaatatctgactaatatctttttaatatcttgactaatctatagtcaaggaagctaagacttatgcacatttgtattacgtaaaagtgcagtaattaaaaaccagatctcttaatttcaaatccagtgggattcaaaatgggtagctgaaattgaaataacatggactgaagaatcatacagacctttgaatcctggttctgtcttattagctatgtggctttgagaagattatttagcttgtctgagcctcaattttctcatctgctaaagtgtgatgaaaatagccatctcctatgaattaaattctacatacataaagtgctaagtacatagcacccaagaagtgttcaataattgttaatccactttcttcctcctaaatctctgacgtttatctgacatttattttgtagaatatatgtgaatcaagttatttgttgattggtgatatttaaaacttcttatttgtaaatttaggctttcctgcattgacaaatgataaattttcacacattaatctctttctggctagaagaaaagcacattttactaattaaaggcaaaaagttccaaagaaaaattatgaacatggtttggaaactcatgtacatatttatttaacaccatttcatatctttaagaaggcttttggaaacttatttagaaaactgaaagtccttgaataccaagtagtttaacaggaattttttaatgagttaagtgtaaatgaatcaaaaacacatgaattctattttctgtaaataacacatggttttgaaactgaaaacatacttgggaaaaaaatgtgtcctgtgtattattaaattaaaactctttaaaaatggtgctccccaaaatgaggcaagcttcatttaaattctagagtgctatgggttgaagttctcttggagagatcacagcatattttatatgtttgattttgagataagattactttaggatagtgtccaaggctccatctgatgagatgttttaggtatttccattttcacaaggggtagaattaatcttttttttttctggacaaaagagaaagcaattgtgttcatcaacataaaatgttcacatggaagtaaccctaggacctcagacatgagagtattggggtgggaatgagtggagaagtattggtgaaatgtagcgccacaatttcccaggatgaataatttattctgtcagaaaggcaggagaactaatcagctaaattttcatcaacatattaaagcttttcactaacattgccaagtaatatgtgtctccaaatattttagatacactgtgcctatgatttcctctctctctctctttcgctctctagctctgtctctgtttttattagaaggagacagctaccacatctgggatccagatgaggcaatcataattttaatattactgttcttctggttggaatcatccaattccttcctctggtattcagaagaatttccactgatttgaagtaggagacattgccttttattatttgctgtccttctctcctttcagatggtaaaactgactacattttgttaaatgtacaaactacatttgtggaaactgactgcatttgtgaaataaaaacatgcagataaaattgctttggaataaaacatatgtttgtgcagtgaaatgggccctaagatatgaccaaacagacattgattaaaaggaccagagcactggcagaagaatagacatacagatcaatgaaatagaattgacaatccagaaatagaccctcacatttacagtcaactgagttttaacaagtgtgccaagacaattcaatggggaaagaatagtctttttaaaaaaaaaaaatggtgttggaacaattggatatctacatgtgaaagaataaagttagacccctaccttatgccatatacaaaatttaagtaaaaatggatcaaagatctaaatgaatcaaagaccaactcaaatgaatcaaagctaaactataaaactcttagaagtagaagaaaacataggcatctgcatgacctgtaatttagcaatagctcttagatgtgatgccaaaagcacaagcaacaaaagaaaaaaataatgtagacctaatcgatatttaaaactttgtgcttcaaagcataccatccagaaagtgaaaagacaatccatagaatgggggaaaagtttgcaaatcatatttctgataaaggacttctatctaaaataataaagaactattacaactcaataataaaaagacaaataacccaacttaaaaatgggcataggatttgaatagacatttctacaaagaagatatacaaatggccaatagaacataaaaaggaaatcgatgccattagtcatcagggaattgcaaatcaaaaccacaagatactttgtacccacaaaaattaaaaataaaacattttttaaaatgataaaaaattaaaataaaaatttaaaaaaccacaatatacttcattactactaggatggtgataataagaaatgcagataataaacaagttttgacaaaggtgtggggacattaaaactttcatgcactgcttgtggcaatgcaaaatggtgcagcttctttgaaaaacaatttggttattcctcaaagtttaaagatacagttactacaggacccatcaattccaccactgggtactgtatataaccaagataaaagaaaacacatgtctgcacaaacacttaaacatgaatgtacatggcagcattattttgatagccaaatgtggaaagacccaaatgcccatcaactgatgaatggataaataaaatgtgatagatccatacaatggaatattatttggcaataaaaagaaacgaagtaccattgtccctcaatatctgcaagcgattggttccagtaccccctgaagataccaaaatccatggatgctcaagttctttatataaaatagcgtagtatttgcatataagctacacacatcctctcttatactttaaatcatctgtagattatttataatacaatgtaaatgctatgtaaataattatactgtattttttatttttagtatctttattgttatttttccaactattttcaatctcctattgttttaattcatacatgcggaaccatggatatggtaggccctctatactgatagatgctataacatgaatgaaccttgaaaacattatgctaaataaatgaagccagtcacagaagaacacatattttatgattccatttacatgaaatgtctagaagaggcaagcccacagagccagaaagtagattaaccattgcttacttaggagctgggagagtggagaaaaatggggcaagagcagttgactgctaaaggatatgggctttcttgttggaatgatgaaatattctaaaactgatggtgttatagatgcgtaactttgtgaatatactaaaaactatggaattgaacattataaatgggtgaattgtgaggtgtatgaatactatatcagcaaggattttaccaaaaaagggaccagtaacagttgataaatagtaatgtgtgggccaggcacggtggctcaagcctgtaatcccagcacttcgggaggctaaagggggcgaatcacttaggccaggagtttgagagcagcctggccagcatggtgaaaccccgtccctaccaaaaatacaaaaattagccgggtctggtggcaggtgcctgtaatcccagctactcgggaggctgaggcacaagaatcgctggaacccagaaggtggagattgtgataagccgagaatgtaccactacactccagcccaggtgacagagagagactctgtcaaaaaaaaaaaaagaaaagaaaagaaaagaaggaaagaaggaaggaaggaaggaaggaaggttagttatgtgattttttaacccttaaagtattttagataacttacacttgaactactatgttgaacttcaggttaagaagtaagagaaggaggatgaatggtctctaacagtatgaatataattcctttctgtttcttctatttattttctagtcgtttctcaatgcacttattaaaatataaaactaactttaacactggttatataataattgatctgacatatatttccttctacctagcatgtgtcatgccttgtttttggtactggacatgcagaagtcagaacaaactccctgatgtcagcttatattctagtgaggagactagagtggagttggcagaaaggaagtccactttgaggaagtgatatttgcacagagacccggataatatgaaagctctggaggaagagagtatcaggtagaagagaatgccgaagaataaaggccccaaattgggaggaagcttagtaaatattagagcagtggttttccaacttgagctaacaccagcatcaactggagggcttgttaaaacagactgctggctccacacacagagcaactgaatcagtaggtctgggatggtgcccaaaaatatgcatttctagcaaggtaatgctgatcctgatggtctggggaaccatgctttgaggagtactgtcttagaggaacaagagaaaaactaggtaaatttgagtaacagagaatggtaggcagtagtgtgctgaaggcagcttatactagctcacgagagctgaaactgtacatctctttccaaccttgcaatcagtgatgttaccttggtagctgatatcaggcatggtaggaatactcatactttggaaattgacaaatgctacaaatcaaggatcctgctgctggtggtagggatgaggtcaaagaagtagggagatgccagaattggaagtcttatattctataatgaggaatgtggatttaagtataaggataatgggaagccttgaagagttgtgagcaaaggagaaacattatctgactcctgttttaaaaggaatatcctggctgctaaccggaatatagattataggggacatgattgtacccaccaagttcaatctctccttcttgggtgcaattagctgctcagctaaagctacatttctcagccttccttgcagttgcatgtgggtatgtgcctaagtataagccctacaggaatggaatgtgagtaaaatgatttgtgaaatttctgagtcactggataaagaataaattccttgccctgaatgtcttttcccttcctgaaagccacaactcagacacagcagagaccttgtgttgatatgcaaatgatgacagtacccaaggagataagaagcaaggactcagaaggagccctggtcttggggttttgaagagcaaagctcccatcaacctatcaacctgtgagagataaagcaatgtatttaagcaataagccattgtatcattgggtctctgttaccatagcttaatcttaccctaacagcaggagaggttagtaaaggcagggacatgacttaggagaccattgtaataaatccatcaacagatgatggtggcttgaattaggttccatgccagctgggcctatttgctctcagacccattcttctcccttcctttgctctgcttagctagctggtccctgcattctgcattttccaggtccatttcatccggcttctggctggctttaggcactgtttggagatggaagagcccaaataagaagcaagttcatttctttctttccttctctctttcttctccttctcctcctcctccttctccttctccttcgtcttctccttctccttctttttcttctttgtcttcttcttcgtcttcttcttcctcctctctctctctctctctctctcatgtgtgtgtcccaatcaagcagcactgctggcagggacccaatgactcttgcttctgctattcccactgtggttaatctctaggtaaccttgccatcccctctagcttctcgcttcttgtatcatcgtgtaactaattccgtgcattaaatctcctctgttttaaatagtgtctgtattcttggtttagcctggactggtacagaggaggtaatggattagtgagaaatattggaataaggacatattttgaaggtggaaaagacagaattgatgaggcattggatatgtggtatgaggaaagtgcttaaagctcaaaacagcccatttccttgcaacttccccaataaagtgcttctcggtcttaccagtctcagattgcaccatcatttacctagtagctcaaaacaaaaatctgcagcttatactttattcattgtattcttcatcaaatccatttataaagcttgatcccaacttttgggatatgtgggaacttgtctggaattataagaatccaggtacacctcatcataacttatcaaaaagctcagactggaaacagagccaaattcagacactactgatagtttcaaaaactccagtgaacttcacaaagactgtactttgagaaagaaaccagattctgtatgtaggctagacaggctggccactggaccattgccaagacaacttcagggggtgtggggaagtacaacaatccaggttttactacatcaattgggaaaccagagcatttttaggtaagctgaaacatgggagctcaaacatgcttgaaggatcctaagaaagtggaaagggattaccagttacaaggcctgaggctcagaaaacatctgttttcttttatttgagactactgaagacaaagataatctctgggaaaagaaaggcttcccagtttattagctgtgtgacctagaacaatgttgttatccttccaggctttagtttgctactctattagaaacaggcaaagcattacctaccttgcaggattgttgtattaaatcatgtgataggccttcgaacatggtgcatagcatgcattcatattaatttttctgttcttcccttcctcttctcccatgtggataacattgtagaatagattaactataacttgctgtgacttagtttactctcagttaataactattgatctgctacacatgtggtccccagagcaaatgtaggctgtggtttgattcacaattaagataaaatgttttcactgcagaaattcattgccggcttatttaagtttgtggagaaaatgtttgtgggtaatagagtagggtgcaaaagttttggtaagaaaggcaaaacattgtcattatttgtgttacatgcaagattagcagttgcaaatgtaaggaccatggcctcataaagggctcctcttcaatgaacactattgtttgattctcttcacttccttgtttgtattaaaaagtggcaatgacctattgcataccgtaggcagtttgtatttagttgcttcgtaataagttttcttaatacattttgtaaacttgattttaaaatattccttattttaaaaatcgtaactcccaatttatgaagccattctagacaaagtctaattgaaaaatataactcaggattatgaggacagagtcagttttgttttatttattctattttttgacatttaaaaaatgtatcataataaacaggcattaatttttcttctgaaaagaaattaagttccaaaataccatagtgcctgtattgattactttaaattctctctgctcaacagttggcctgctctttctctgctctcaacagttgatagccaaattggaataaaaaattaaaattactgtactaacttccccacataagtgggtataattgttaattttatatgtcaacttggctatccatgctatccacatatttggatattcacatatttggacatctagactggggggtcaaacaccagtctagttgccactttgaatgtatttttaagatggcatttaaatcagtagattttgagtaaagcacgttacctttcataatgtgggttggcctcatccagtcagttgaaggccttaagagaaaaagtggatcccaaggaagagggaattctgccttcagtctgcctttggactcaagctgcaacaccaacccttccctaggtctccagcctgccggcctgccctgcagatttcagacttgccggccccaacaaccacatctgccagttccttaaaataaatctctctctctctctctctctctctctctctctctctctctctgtatatctatattgatattggtcttaataggtgtttgtgaccggagcctgttgtagggtggggtgaggggggagggatagcattaggagatatacctaatgtaaatgacgagttaatgggtgcagcacaccaacatggcacatgtatacatatgtaacaaacctgcacgttgtgcacatgtaccctagaacttaaagtataataataaaaaaaaataggtgtgtgtgggggtgtggggctgtgtatatctgtatcgatattgagaccaatatcaatataaatatgcacacacacacacacacacaaacacacacacacacacatcctactattgattttgtttctccagagaacctgactagtaatacagtgaggaaacacttaactgggcattaaagtagccaaaatactttgctagataaaacatttttagagcttgtaagaattcctgttgtattgttaagttttcattgatactccatatcaaaatgccatcagatttttttccctatgactgttagaaatgtgactgatataagaatctcactttccttttttcatttttttaacggattaagctagacataattcacataaccatataggtcacccatttaaagtatataattccatgatttttagtgtattcacagagctgtacggccatcaccacaatcaattttagaacatttttatcactccaacaagaaatctcatatcctttagcagtcactcccatcctgctgccctctgcccagccctaggtaaccactaagctattttctgtctccctagatttgcctattctgacattttatataaactgaagcatacagttcagtaagcagtcttttatgactggcttctttcactttacataatgttttcaaggttcatccatgtcatagcatgtattggtattacatttctctttcttgctaaataatattccatttatggagatacatattttatttatccactccagttgatggatacttggattgtttatacctttttggctattatcattttcctttttcttgatcttagtactaaaatgtaaaatgactaaaagggaagaaaaaaaaaagtactagatcctggaaaaattctcaattaagtgaatgatcactgaataaataagttataagaacacaatatttattataggcgcaatttttattaactaatcatttccaaaaccataactattaataaaatggcttgcaaaatatgttcttattgcaagtatttgtgcctaagtgcttctgtttatgagacaagaaattcaaatagctgtcttggcagtatcactccagttgtataagccaaaggattaagagtacttttaagaaggagtaacaatgtgttctgcttggctttggaaatgatggtaaatttatacataatgtatggatgattatattatacccatatgaggctgtcaatcaaaacaggatttctgtcagatgatagtttccaattcacaaagcttatttttttacattagaatctttgctggattcagatcatattgaacatccacatttctctgtcactttatttttaaaaatccatttctaaaaatgaaatgactggataattatgactttgagcaacaactatccatgccagcctggtacaggaaagcttaattctaatcctaacatcactcttcatataaaataagagctgttgatattgcaaaatcccagggtggagcttcttttaatttcccttaaactagctggtctggccagtattccttcacaggatataaacagaacagtagctaagcttccatagagcagaggtatgctctaggaagaacaataaggtcaactggacttagtgtggaatgaaaggcttaaaaattccataaaataaggaacgaatgtaggcattacttataggcattttaaaagtttttgccttctcaccagaagtacttacctaccaaattttacatttagtttccctacaggtatggttatataattttactaatataactattagtaaaataatgtgagtagcaacttgacttgcaagctacatcagattgttaagagagtaatgtttatcttggatgtttcttaatttccatttcctctgtttcctttctcaatgttccttcctctagaaacagtttttttaaagtaatttccacaaagatgtcaatgaaaacttgcttattttcaaagaaatataggcattttaaaagaggccctaataacacaaaacagtaaattattactgatgagatttcacatattgtacatagatcagaggtacatttcagggccttcctgaatgtgggtcagcagggtcttcacagtggagcaagcccctgctatacactcatagatgttcaagtttttgttgttgttattgttgttgttttggttttggtttttggtggtttttttttttttttttttttttttaataccgagtctcactctgtcgcccaggctacaatgcagtggcatgatcttggctcactatgacctctgcctcccaagtttaagcaattccctgagtagctgggattacaggcttgcaccaacgcacccagctaatttttgtatttttggtagagacagggtttctctatattggccaagccggtctcgaactcctgacctcaggtgatccgcccacctcggcctcccaaagtgctgggattacaggcgtgagctacagtgcccagctaaagtcaagtttttcgtatgcaaatatgtttagttggaagaaagtggagggtcatttttttttttttttgagagatggggttcttgctatgttgctcaggctagtctcaaactcctggactcaagctatcctcctacctcagcctctggattcgctgggactacaggtatgcaccaccatgcccagctgcaagggctatgcttagatcacaatcacagtattggctagtaacagctgttttccttcaaatctgaaacttgtaggaaagatggagtgatagaaaatatatcgatggttatgacaatagactcagagaacataaaggtgtcgcatgcgacatacacaactaggaataagccagtgccggcctccttttgcgaggctgctgcttcttggtctgccctctcatcatcatgcttgtgattgcaattgtcagctgggtcttcttggttcaaatataaataatcttacctgaaatttctctaacttgaaggtttataaaaacgataatacatttatttgagaatcacttatcctaagctatggaagaagaattaaatacagatttccagtttgaatataatgaagtaaaaattggcatttcccccttttgctctaggaaatcacccaaaagaagaatgagaaacagaaacacaagctaggatgcatatgaaactttaagccacaaataggtagaagggctgccaaaagcaatgaagaacaaacaggatgtgggaggaagcagaaggagatgcctgtaaatgcaaatccctgagacaactggcactaccccaagatgtggagtactcccaagatgcagagctctaatcctcatgtgtcctaacaggggaggtggggtggtgacagaagcatccatgaccatttgattctgagaagtagaggtggtaggactgaacagactcatgtgataaagccatattttaagaaacaatctgttgatgaggcagaggattgaaaaaaagagcctggtgtgagtcgtagagctgcctatctttgtcagttggggagaggtaatagttaaatggactctcacactttgctggggtccctaaggagagctgctagccttggacacggctccagcatctccatcatatgaaccatttacaagtagctagtcaagaaaagccctttcatccaaaatgagaaatcaagaataaaccatccagaatgaatgcacatatatattcattacatatatgcgtgtatatatacacacattatatatatttattatatatgtgtatatatacattatatatattcattttatatgtgtgtatatgtatacattatatatatgtatgatgagaacacaccacgcacacacacacacggagaaaaggaacagaaaaaaataaatataggtgaactctgatcacagaagtatttccatggagcagatgaaagtttcgagcaaatattttgccatggatttaacagttaatgaagaaatctatgtataaaataagagcccatatgtacatacaatggagtattactcagctttaaaaaggaaggaaactggccgggcgcggtggctcacgcctgtaatcccagcactttgggaggctgaggcgggcggatcacgaggtcaggagatcgagaccatcctggctaacatggtgaaaccccgtctctactaaaaatacaaaaaaaattagccgggcgtggtagcgggcgcctgtagtcccagctactcgggaggctgaggcaggagaatggcgtgaacccgggaggcgcagcttgcagtgagccaagacagcgccactgcagcccagcctgggcgaaagagcaagactctgtctcaaaaaaaaaaaaaaaaaaaaaaaaggaaggaaactgacacatgctacaatgtggatgaatcttgaagacattgtgctgtgtgaaataaaccagccacaagaaatacaaatactatatgatcccacttatatgagatacctggagatatgagataccttatatgatatatcaaattcatagagacaaaaagtaaatttgtggttaccaggggctttggggaaggaagaatgagaattagcatttaatgggtacagagtttcaacaggaggagaccaaaaagttttgaacatggatagcaatgatagttgcacagcagggtgaatgtgcataatgccacagaaatgtacactttaaaatggttaaaatcctaagttttatgctatgtaattttaccaatgttttaaaaagacaagaacatacagcagatatacaagactcaggaagtagccgggtgtggtggcacatgcctgtggtcctagctactctggaggctgaggcaggaggatcgcttcagcctagaagtttgagactacagcgagctatgattgtgccactgcactgcagcctgggtgacagaacaagactctgtctctcaaaaaaaaaaagactcaggaaaatggagagaccaggaaagtggcttaaaaatagaaatggagtcaaaatcagaagtagcacagtggagactagatactgatgagaatacagaaagaaacatagaagttagcaataagaaaagcaagcaaaattaacgaaagtaaatagaatttaaaacaattagagatagataaaatgtaaataagtagggaagacaggcaaaggaaatccaatatacagttattcaaaatctctatgtaatgaattagaaaaagtatttgaaatactgtggaagaaaatgttcattttgaaagggcatctcaggtctcaggaaaaattgatgcataatggccaacactgagacatatcctaatacaactgctgaactttgaagataaaaaaatgaatcctttgaacaatcagacaaaaacaatgagtcatctatgcagggtaaaaacaaaacaagctgacataagatgtctctacagtaatattcaattctagaagacaatagggaaatgccccaaaatcttcatgaaaaaaagtatgatcgcaaaattttatatcatccaaattattattcaaatgataaaggcaaagaaatttttaatatccatgaactctgtggaaacagttggaaaacatttgcaattcatatcacaaagtcccaacttttttatctataagaattaaaaaaaaataaaactagagacaaaccaataacccagaagataaatgagcaaagaatgtgaatggtttacatgaaaggaaataaaaaggactctcaaatatatatgaaaagatgctcaattgcattcatagtgagaaatgcaaattaaaattaaactggccagatccagtggctcaaacctgtaatcccagcactttgggaggcccaggagggtggatcacctgaggtcaggagtttgagaccagcgtggacaacatggtgaaaacccatctgtactaaaagtacaaaaattagccaggcgtggtggtgggcacctgtaatcccagctactcgggaggctgaggcaggagaatcacttgaacttggaaggcggaggctgcagtgagccaagatcatgccactgcactccagcctgggcaacagagtaagactccatctcaaaaaataaaaataaaaataaaataaactgaaatattacaattaacccatcaaattggaaaacataacaaagcttggcaacactgcataaataagagtgtgtgagagaggcattttgtttgtttgtttgtttgagacggagtctggctctcttacccaggctggagtgcagtggcgggatctcggctcactgcaagctctgcctcctgggttcacgccattctcctgcctcagcctcccgagtagctgggactacaggcgcccgccaccacgcccggctaattttttgtatttttagtagagacggggtttcaccacgttagccaggatgatctcgatctcctgatcgcgtgatccaccttcctcggcctcccaaagtgctgggattacaggcgtgagccaccgcacccagccaaaagaggcattttcatatattgctgttagaaacataaattgtacaacctctatgtaggattatttggcaacatttgtcaaaattacaaacacatatactctttgaatcagtaattctacctctaggaatttatcctgcagattagttacatatgtgcaaaatgacatacgttctagaaaagtctttgaagcattctttgtaatagcaaaagattgcaaataaatatccatcaagatgaagttgatcaaataaattataatgcatccattctatggaatatcatgctgctgaaaaaagaagggtaaatgttttactgatatgtagtaagttccaagtatagtttagtgaaaaaaaaaagcaagcttcaaagtatatagaatgctatcatttgcatgaaaggcaaaactgtatgtttatatttgctcatattgcattgaaggatatataagattttggtaatattagttgcctgtgaggagggaaagtaggtcgctgtattggaattgaagagaatgtgttgctgtatactcttgagcagtcagaattttgaaatgttaattcattacctattcataagtaaataaataagcaagcaatgtgtgattctgttgtttacatgtaatatattttctgcagaatctgtgaattcccttagcctggagtggctaaaggaaatgcccttaccctaggctgcctcctcttttttcaacctatttctgggctatctcccactctctttggagtcctaccctattcatagttcctaccctattcatagttccctgatcgcctgagtcagaatgctgcttcttagcagcaacgcttttaagacaaatttcaaataattctcatggttattcacatgcaaacacccataaatttatgaacagaaatcttcataaccctctgactatatttgttttttaactgcattcatcttaaggagggttccttttagttgttttagagtctgccaaattaggaaagcttcccttctctgggataactcatagtttacttctttggtaacaattagacagaaattcagaattctaaaaaatagaaaacaactccagtacagccacctaattcccctccttaccagcaactaatattacctaccagtcaaaggtgattaatatgctcttttattgtctatcaaatccattgtccaaacaataattatatttagccatgatcttttcagctgtttgcttgaaagtggaaaacttcaattatccaagcaatcctgggctctaagtttatgtagcttgttcataactggaggtgaacagtagatggaatataagaaaccttcaggtaatccctgcagggtatttctagaatattcctctagcaaagctggggatatcctgaccccctacaaagtatatatgtttgacttttttacatatatatatatatatatacacacacacacacatatacatgtatgtatatacacacacgtatatatatgtaatctttcctgaggtagagattgtagcttcctaatgaaatttacttataatctcctgatgccctattaagcctccaccaatagcaaagtcccgttagaccagtctatgctaaagcctatttgatattaaaacacaaggaaaggtcttcgcctaagtagattaaggagacataaatcaagcaagtcagatttctaaacaagggaactttaaacatggaatttgcaaatgctattcattcgtgccccatgcaaacatgcaaatattggttagtgaacttcggcctaccaggctttgaaacaatggttataacattagtattcctctttccatgattgctgccagaggaatttcagaccccgtttggggattttcacagttattccctcttaataccctccaatatcctttctctcaaatgccacttggaactttctaagtggaatggtttctttgcctctgtgtggcaagtttctgctctgtgcatttcatatctcttctctggcacttttccctttcatcttaccttctggctaaaagagtaacttctagctcaaatttaattaataaatttaaaattttaatttgaggaaggctatgttttatagtgtaaccttattaaacaccatctatttcactgggctgtagccatctcagtttttctgattaaattgcttaaggtctgcttatgttctctgcaatgtggtctgttctttgagtcatattgttgtccaccttgatttagtgccattgtccctgcatgtccatgtattcattttgtttaccgtttaccaaaaaaaaagttacagccgggggcggtggcttttgtctgtaatcccagcactttaggaggctgaggtggatggatcacctgaggtcaggagttcgtgaccagcctgaccaacatggcgaaaccccacctctactaaaaatacaaaaattagctgggtgtggtggtgcacacctgtaatcccagctacatgggaggctcaggcaggagaatcacttgaaccagggaggtggaggttgcaatgagccaagatcgcacctttgcactccagcctgggcaacaagagtgaaactccatctgcaaaaaaacaaaaacaaaaaagttacttatcattgtccttaaaatttaactcagtcgggatgagataaagtgggtgatgttcctctcatccctgcaggcacatatggaaagctcatcacttttatgaccactccaaggtactagaaagacctgtgttattttaaccataaatatgatctcagttcagaaagttgaatacccatatccataaataatcacaattctgaacttcatttaatgtctttacctgcttttgatacagggaatgggacacacatgctgtgattgtttctggttactgatatgacaaattaccacaacttagtggcttaaaaccacacaaatttattatctcataattctttaggtcagaaatgtgactgtttcttctcctttcttatattctagagggtgtcttcattccttggctcatggcccccttcctccatcttcaaagccagtaacatcacgtctctctgacccttctgtcacaacatctctgaccacagccgggaaagcctctccacatttaaggatttaggtgatttgactggacccaccttgataatccaggataatccctcttctccaggtctgtaacctaatcatctacaaagtccctacaccactcatccaagcccgcatcatctctcacctgtatctcacctggattatggcaatagccttctatctggtctcactcttctacttttgcccactgtagtaattatcctcacagcaaaatcagaagttttgttctgaacatttcaagttttgagacctattagacaattaagaggatttcaagtagttgtcttgtatacagatggatcttcaattctgaagctcaaagaaagctttcaactggagatgtaaattttggagacattgccatacagatggcacttaaaactatggggctggaagacataaccaaaggagtaagtctacatacagaagaagctgaggacctagtcctggggcatttcaacatttagagatttcaacaaggaggtgttagcaaagaatcctagtctatctgtgaaatgaaggaaaacgagaactgtgctacagtctgagactcttccttcccagttatccttccttccccttctcctttcccaggtatcaggcctggatgatagtctaaaggcactccccaggtactcctccaccctccctttatcctccacagatatttccccaataaatttcttacccatctaattccatcttggtatctgcttttcagagtacccaaactaacacagagtaggttaaataaagagcaggaggaaggccagtcatgatcgctcatgcctgtaatcccagcactttgggaggccaaaataggaagatcccttaggctaggagttcaagaccagcctgggcaacataatgagaacccatctctacaaaaaaaaaaaatttaataggcaggtgtggtgctgtgctcctgtagtcacagctactccagaggctgagatgggaggatcccttgagccaggagttcgaggctgcagtgatccaagatcacaacactgcactccagctaggttggcagagtgagaccctgtctctagaaaagaaaaatgttttgaataataatttgaaaaataaagagcaggaggaaataaacattataaagaggagcagacaaattacacctggtgggggaacagaaggtctaggtttgttgttgtgaagtcttacagatgtgagctattacagcatggttgtatgttgaccagaattacccaatagagaaagacaaactaatggtgtgggagacagagagggcagttccaggaacaaaatgcttgagtaaacaaaaagggaagggatccagcacacacagacagagatcaggcagctgccagtatcttctgctctatacctcctccatagttcatttcgcacttcaaagccagaaagaggctttccagggcaattccctaacacacattatttcatttgatcctcacaactatcccaagaattggcaagcattagcattctacgcataacaaatgagaaaactaatgttcacagcgcttaagtaaatttccagtttctatgattaggaaagagtagagctgagagttaaaacaatttccttttattccaatggcagtattgcttttattactacaccttgttgcttccaagaaaaggcaagaggttgagtaaacggtataaagactgagtagactgggaatgattgcactagacttgggtgtcagtgtgggggagaattggagctcatatttaggagtcctgggctattcaataaacactgccacaggcaaaaatagaaagtcaggaattccatctgactgatgtatcattctgaagatgttagctggccaatacaaagtccaagcgtatggcgacaaggcagatgatgggatacttcagaccagaacaagaaggttcaaagctgaaagtagaattcctgagtccctagagcagtgctgtaggcatttgtatagggtgcctggcattggctgtagtttagaaaggaatcattaagggtactgagcttacagggatacaggtatactaaaattccataatagctttaaggttcctgtaatgggagaccataagaatgcactcaaaaaagaataatgagagcacattggggtggaggatggggtgggaaggttgtgatagacacaggtgactaatttctcttgatatataatgatgcttgggatgggaaaagattcccctctctatctaaggaaacatatttgattggtctaatgaggtagaacgagtgtcatttctataagttctttagtcggggaagagtggacaaaaggaggcttaattattaataggtcctaaggatcaggaaggaacagatcatttattttttcctgaattccttgatcacagtactgaataatacacccttcctgacttgtttaagctttcaactgcttaatttttgtgttcttattccaaatgttttctttttacaaaaagatactttctgttgttttcattatgggaatacacatagcaatagttctcacttcacgttacgcagccttcctgtacataaaagctagccaaccaattctatgagttcatctctccctctctacccttctcccgttttcctctcctcttctaataggaaaagaatattcctgataagaagctctagaatgtgagtgttggccccatatttttcttcataaactatcttcctcatgaaaggaggatcagtcaccaatgatatgtagtggagagaaagagaagaactctgaatatccaccacagaagagcaaaaccacattgacagttatagataggaaacaactgagaggaagctaaactgtgcaacctagaagtctatcgctttggctgactttctattggtgctccatgtttcaaaaccctgcgcagtatgtatgaagggtgatcaagtggggggaaccaaagtaaacagaatacatatgcaaataagtagcatttagtcagattgttcactgatcatttaaatattttctctctcagacctggtccctgctccctaagtgtaattgaagcccctccaccctctgaacaggaaggaatcttctactcatacaggcaatctctaccttttgacaatctatattttgctactgcattcatcgtaggattcttccactttagatttagtgcaatttacacccattgtctcaattcgttcagtactaaatgaattatttttcattattcaacccccttgtgctctgaactaagcttttacctaaattataagctacacaagaggagagtattattcatctccacagtctcccactgaagagggtcgcttcaaaatgttgtatggatggatatgtggctgagtggatggatgagtgaactactcttcccttatcttccttctctacctattgattccttacctcaaatgttctctctttcatgaagccattcttgattttatttatttgaacacttaagggctttatctcctaagacactttttctaccttaaatttttgttttgccatcttgtgttttcttatttctttttttttttttttttttttttttagacagagtcatgctctgttgcccaggctggaaagcactgacacaatcttggctcaccgcaacctccacctctgaggttcaagcaattctcctgtctcagcctcctgagtagctgggattacaggcatgcaccaccacgttcagctgatttttttgtatttttagtagagacggggtttcaccacgttggccaagctggtctcgaactcctgacctcagttgatctgcctgtgtgagcctcccaaagtactgggattacagatgtgagccaccacgcccagcttatcttgtgatttatacttgttttagtcttccacagagagagactttctcatttgtttttatatctcctgctgctcttagcacagagcttatacactgtagatgatcaacaaatatttttgaagtaatttaatctagagtaatttgagactcaaaatatttctgcaaggcaggcagcgctggtattcttgtcctcattgatgacttgcccactgtcacctacctggccaaaaagctggccagaacacaaaagcaggaaaggagaaccagtttttgccagcaccatttcctgtttcagtatggtttaaacagacccaaacagattcagtatgcttttaaacagcccttaaaaagaacatgctgggtcacaaaaatgaaaaacttctgcatttagaaagagggtaaagtctgtaaagatatttccctgctttgattttttccttaaggaagccatatgttaagttttccttttaaccagtatgcatacatcaccatacaccatcttacccagatgtcttatgtgtttaaagtctgttcttaagtttctgtgtcaccattgcccacctagtcaaggtctcaactgccttatgattacacaattactacagtcccttaattgcttctaccaccttatgggtccctctaccttccagtcaattctctacaatgctgacagatttttataaaagatcattgtttacatacccaccaacccccatctcatcttttttttaatgaccatcttctgatttcagaataaaatcaaactcttctcggactcagaatatgattccaaaaagtatggcaccttggcatgttaagtactttgaactgaaggaaattggaaaggtctcagtgttacaggaaaggggtcccgatccagaccccaagagatggttcttggatctcacacaagaaagaattcagagcaagtctgcagtgcaaagcaaaagcaagtttattaagtaagtaaagtggtgaaagaacagctactccatagacagtgtagggcattcgcgaaactaagaggaggaatgcattcaccctaggtacaatgcttgtacgcataggataaaaaaagattaggtggctctggttcgaaagcctcttacatcagtatcaaggtccgtctgaccttctcctgtcttcttgtgtcccactcctctttctccacctaagagagtcatagaaaccagaattcctgttccccaaggtgagtcacccctcttccctaaagcaaaccagaaaacctggaacgggcagctcacacctgtaatcccagcacttctgaaggccaaagagaggatagctcgaggccaggagttcaagaccagtcagggcaacatgtaagaccccgtgtctataaaacaatgaaaaattagctaagcatggtggtacttgcctgtagtcctacctatctgggaggctggggtgaaaggattgcttgagcctagcagttcaaggctgcagtgagctatggtcacaacactgcacgccagcctgggcaacacagtgagaccccatctcaaaaacaaacaaataaaaatctggaaaggtcactcttttccctctcccttgaaaaccctcattctggaggggtcctgctccatactgaataaggaagatttctacacagagaggccaagaagaatctgaatatacaggccttgctggttttcccatcctccctccattagcattagatcaaacccttttgtccaatcacatttctacatggctgtgcattctttatcatacctaagcataaaaacagagctgggcatggtggctcatgcctgtaattctttgggaggccaaggcttgaggtcaggagtttgacaccagccagaccaacatggtgaaaccgcacctctactaaaaatacaaacattagccaggcatggtggcacacacctgtaatcccagctacttgggaggctgaggcatgaaaaatgcttgaacctgggaggcagaggttgcagcgagccgagatcacgccacagcacttcagcctgggcgacagaccaagagtccgtctcaaaaaaaacaaaaacaaaaacaaatacaaaacaaaaaacaaaaaaaaaagtttttcctgggtcttccttgagtcttcatttttaaggtttcctgtgtcacataaaacttccattacataaatttgttatgcttttctcttgttaacttgtttttgttataggggtgttggccgtgacctttatgatggataaggaaaaggatcataccttcccaccccatgctcttcagcctgaaattcagtcttcttacagcctagtcaccagtcttatttccaaccttttcttgtactactcctcagaggatccttccattctccaagttcagactccccatacataacacctgtgttccttcccatcttagtcaagtgatttcgactagttaaaatgtcttcccttcaccttacaatactttcttcaaagaacagctcaaaagctacctccactctgaagttttattatacatgtcaaccttcaataatctttctttccctctgtcaaccttcaataatctttctttccctcaaattcctttagcacttactataagctacttgactatctttcaagatacatacactcactgaccccaaatctttactctcctaagaagacctagaaaggtttatatcctcattccctttgctaattatgattttatctttttcttttatacatagttgaatccacaaacattttttatgctctacatgtaccaagtctctgcagggaaaaattatgtttcttaagcaaaaatctgtaggggccaagggaaagtttccttccaccctctgaaggtttgctgaaaatgaactgacaatcaacagattaacaggagaaaagacatacagatgtatttaatatgcttagcacagggaaattgtaggagaatgattagccaataacccaatgagatccagatgtttatacaccttcataagggaaggggagatggcaggtgtagcaattttgaggagtagtaaatagttttttaaggggaatgaatggacccaatctttagtcaatgtttagcaaataattctctttgggaactgaacggcacccaagaacagacagtagtttgagacaaagtttgtctgggctctaggtgtgatgtgtgattttcagtctcttcctcttctctggttaagtttcagagtagggtaacaaagtcgattgggttccttttagagggcctggtttctaggtggattaggaactttggaaagcagcctcatcctgtgctctgggtcttgtgctttatttctcagggtttggtccttgctccacttaaaggttaaccttgctgttttcaaatcagtttctggaatgacctggagttgcatctcttagggtcaccctcaccagtacattcctggctgaagacagggatagtttgtttttgttttgtttttgtgtggtcattttatattattcattgcctacagagcatctttatgaatttaaaggaatgtttgtggggttgagcattttagaaggcactacttttccgtttgtgggaaaagttgtgaacaaatgagctttctatttcagggcaatgaactgattcttaattttttttagctgctgaaatatttaaaatgcatggttttatttactgctcttctaccataatatataacaacgaggataaggagaaatatagagggataaaataaacttacttaaacttttgaaagtataatgctgaaattgtgagcctactgtcactcatgtttgaaattagggcaaaggtaaagtagagaacaaaaagtaatgacaagcaaggtgcaattatttggactttttatcattcatttacttattgagcacctgatactgaaaggtgacagcatgctggtgtccctcgcagccctcgctcgctctcggcacctcctcggcctgggtgcccactctggccgtgcttgaagcccttcagcccaccgctgcaccgtgggagcccttctctgggctggccgaggccggagccggctccctgggcttgcggggaggtgtggaaggagaggcacgggcaggaaccagggatgcgctcgcgggccagctagagttctgggtgagcgtgggcttggcgggccctgcactctgagcggccggccggccctgccgaccaggcagtgaggggcttagcacccaggccagcagctgcagagggtgcactgggtcccccagcagtgctggcccaccagcgcttccctcctcaccgggccttagctgcctccccgcggggaagggcttgggacctgcagccccccatgtcatggctgagcctccccccgacccgccacccctgccacccctgccacccccaccatgggctcctgcttagccctagcctccccgacgagtgccgccccctgctccacggcgcccagtcccatcgactgcccaagggctgaggagtgtgggcgcaccgcacaggactggcaggcagctctacctgcagccccgatgggagatccactgggtgaagccagctgggctccaagtctagtggggacttggagaacctttacgtctagctgagggattgtaaatacaccaatgggcactctgtatctagctcaaggtttgtaaacacaccaatcagcactctgtgtctagctcaggttttgtaaatacaccaatcaacactgtatctagctaatctagtggagatgtggagaacttttctgtctagctcagggattgtaaacacaccaatcagcaccctgtcaaaacggaccaatcagctctctgtaaaacagaccaatgggctctctgtaaaatggaccaatcagcaggatgtgggtagggccagataagagaataaaagcaggctgcctgcgtcagcagtagcaacctgtggggccacctgtggaaactttgttcttttgctctttgcaataaatcttactactcttccctctttgggtccacacttcctttatgagctgttaatactcactgcgaaggtctgtagcttcactccggaagccagcgagaccacaaacccaccaggaggaccgaacaactccagacgcgctgccttaagagctataacactcaccgcgatggtctgcagtttcactcctgagccagcaagaccacgaatccaccagaaggaagaaactccgagcacatccaaacatcagaaggaaaaaactccggacacgccgcctttaagaactgtaacactcactctgagggtctgcggcttcattcttgaagtcagtgagaccaagaacccaccaattccagacacaataccatgtccataatagagggattccaaaatgaaaagtcatggtcctaccttttaggagcttacaaataagctgtttacgaacgaagttaaaaatgcaaaaaggagtaaaattaataagctatagtaggagtagaggaaaataagattatttcactccaattatgtgaaaaaattttaaaactcggtggtagaaacaaaatttgagcaatgtctctgaaggcagtgagatgtaaacactatgtcaatattgtagaaaggtctatttaggattttggaacactggtagcaaaaggagagtctggccgggacacaggtacgttggtgaaataagcacaaattagaggcttttgtcactagactgtggaaaactatcgatgctctattcagatgagtgtcataattagagttgtgtttggccaggtgcagtgtggctcacacctgtaatcccagtactttgggaggtcgatgcgggtggatcacctgaggtcagatgttcaagaccagcctggccaacatggcgaaacgctgtctctactaaaaatacaaaaattagctgggcatggtggcgggtgcctgtaatcccagctactcagggtgctgaggcaagagaatcacttgaacctgggaggtggaggttgcagtggggcaagatcatgtcactgctctccagcctgggcgacagagtgactgtctcaaaaaaaaaaaaattgagttgtgtttaaggtaggtaaatttgaccacagtgtattggtctaattggaattgagataagaattcatctggacttcttttacaggaccctgttgataagacagtgtgcgataaagaagccagccaaaaaccaccaaaaccaagatggcagcaaaagcaacctgtacccgtcctcactgttcattatatgctaattatgatgcactagcatactaaaagacaccccccccccaccaccagcaccatgacagtttacaaatgccatgccaatgtcctgaagttaccttatatggtctaaaagaaagaagaaccctcagttctgggaaatcctcacccctctcctggaaaactcatgaaaaatccaccccatgtttaacaagtcctcaaaaaataaccttaaaaagagccagccagcagcccacaatgggtgctctgcctgtggagtaacttctcttttattcctttatttatttatttattttgagataaagtctcactctgtcacccaggctggagtgcagtggcacgatctcggctcactgcaacctccgcttcccgggttcaagcaagtctcctgactcagcccccagagtagctggtattacaggagcccaccaccaagcccggctaattttcatagttttagtggagacgagttttcaccatgttggccacaccggtcttgaactcctggcctcaagtgatccaccagccttggtatcccaaagcgctgggattataggcatgagccactacacctggcccttctattcatttactttgttaataagcttgctttcactttactctgtcggctggctcttaaattccttcatgagctgagccaacgacccatgtggcttcccgggctgagccctacttttgggctttgccctgtgccagaatgggaaagtctagaggtggagataatgcaacactacactgcattttaaagtttacattctagctttttaaaacgagtggtagcttgatacagcgggaaatggaaagtcactcgaagtctgaaggcattctctggctgctgtttactagctctgtgacctttggcatattaatcaatatctgtatcctcagtttctttttctgctatgcgggattaatgttgtagagttgctttggtaagtgagataagcctcggaacacaatgcctcacacatagtaagtgctcaatgaatatttgtttccctcctttttttgcctaattcagaaccttaaaagcgtttatttctgactgttaatatagcttgagttagtgaacacccacgtatctcatttcagtattttagatggttctaaagtctgtgccacagaaggcaaaattgcatcacatttgcatttgggagaataaatttacaatcaagaaattaacaggtactttgggttctcaagatagtctgagtttattcaacattcatttgatcgatatttgttgtgcctctgtgtctgtggctctgcaaggagatacaaaagtggtacaactcagtcttgctgtcaaggagttcaaagtcaagtttgagatatatcaacatacagatgatcaaaagggtttatacaagtgttatgggagcacagaagaatgcgtaataggctgagtttgcaaaaagaagtaagggaaagctttgcaaggaggaagaaatgcctttagataaatcttgaagtattagttgtagttcacccgctacacgttatttcttctgctagacccataccaggtgggaaaataatttgtaaaactgtcagaagcatttgaaccagagcgccaccatcttgagcaggggctgggtaaaacgaggctgagatctgctgggctgcattctcaataggttagacattcttagtcacaggatgggataggaggtcggcaaaagatacaagtcacaaagatcctactgataaaacaggacgcagtaaagaagctggccaagtcctaccaaaaccaagatggcaacaaaagtgatctctggttgtcctccctgctcactgtatgctaattataatgcattagcatactaaaagacactcccaccagcaccatgacagtttacaaatgccatggcaacttccagaagtttaccctatatagtctaaaaggaagaggaaccctcagttctgggagctccctgcccctttcctggaaaactcatgagtaatccaccccttgtttagcatatcatcaacaaataaccataataatagccaaccagcagcctttggggctgctctgtctttggagcagtcattttttattcctttgcttttctaatgaacttgctttcacttttctctgtggacttaccctgaattctttattgtgtgagatccaaaaaccctcttttggggtctagatcaatacccatttccggtaacaaaaatgtaaagaagagaggaattgcatcgggctgcatttacctgaaaataccaataacagggatttaaacaaagttggagttctttttctcacatacttggaaatctagaggtaggcacttgctggtattgacataatgacctgaaggatgtcaagtcctaggtctttggggttcttttggcctatcccttggggtctctagatggtcatttcaactccagctttcaagttccatacttcaagcagaaagaagtgtcagaggcatttgaacaagagcaactccatcttgaataggggctgggtaaattgagtctgagacctattggactgcatcccagcaggttaatgcattctaagacacaggatgagataggaggtctgcacaagatacaggtcataaagaccttgctgataaaacaggttgcagtaaagaagccagtaaaacccatcaaaaccaagatggcgacaagagtgacctctggtcgtcctcactgctacactcccaacagcaccatgacagtttacaaataccatggcacatcagaaggctaccctatatggtctaaaaaggcgaggaaccctcagatctgggaactgcccactcctttcctggaaaatcagtgaatagtccaccccttctgtagcatataatcaagaaataaccataaaaatggccaaccagcacctcattctgctgcctctgcctatggagtagcctttcttttattccttctttttcttaataaacttacattcgctttgtaccgtgggttctccttaaattctttcttgtgcgaaatccaagaaccctctcttggtgtttggatcaggagccctttccagtaactgaaggaagttccagtgcccatacaagggaagtaaaactttcttagaaatccccagcagaattccatttatatctctttggtcacagtggtatcctatagcagcacctatctccaaaggaagctaaggcatagaagttttcttttcattatttattttacccttttaaagcagggcacaaaattaccccccaaaaaatcaaaattctgttaaaatggaagaagggaaaatgtattaaatatatgatgtaagcaacttaagatgctctgctaatgcatgttgagggaattacaaatagttggtatagctagatgatagaatgtcagaagattggtaagagataaaggctggagccacaagccaaactgagccaaggacaaatctaaaagtttatttgtgcaaaaaaaaaaaaaaaaaaaaaaagtcttttttaagacgaggtttcactttgttgcccaggctggtcttgagtacgtgggctcaggtaatcctcctgcctcagcctccagaatagctggactacaggtatacatagttcatttgtgcaaagttttttcacaggaaaatatactcagagttccatgatgggatattgggaacatttgcctggttacagccatatggcaataggaaaggaaggctccatgttcccattacattttggccaatcaattaatcagaaaccttccaagtcctggaaatgcagccaagggcagggttccagcagaaaatactgaccgttttgcataggcagcataagacctgtttttagcccatgtcttgataaaagtcaccgccaatatttcttttgctattattcctttctttttttcctttccttctactcctttttgctttgaatttacaccagtatgtgtcccagtgagtccatttcttctcccttttaaaatacgttctcagcaagtttccaagctcctgactaaaagccaggcaaggtcatttctagacttcaaggtttctgagacataatttttctttttctttttcctatttatttgtttatttattttgagagagtgtctcactctgtcatccaggctggagtacagtggtatgatcatggtgcactgcagcctcgacctctcaggctcaagcgattctcttacctcagcctcccaagttgctgggactacaggctcatgccatcgggccccaactaattcttttttactttttgtagagacaacgtttccctgtgttgcccaggctggtctcgaactcctgggctcaagtgatcctcccgcctcggcctcccaaagtgctgggattacaggcatgagccaccatgcctggcctagttttcaagtttttatcattctatcacatcattgtgatattatatatatattatatatattattatataatataaaatatataatatgtataatatataatatatctcatatagatacatatagatatatatctcagcatcgttcacagtcgttgaatgcactgtactacatttcgtttctattacaacgtttacatttcctggagtcagtaatcacttcggtttctgtttttagatatctatatataatatatatctcttatatagagatatatattatagatataatatgtagctatatatgagatatccatatataatagatatctcatatatatatctatatataatagatatctcatacatagatatatataatctctctcagcatcgttcacagtcattgaatgcactgtactacatttcatttctattacaacgtttacatttcctggagtcagtaatcacctcggtttttgtttttgttttcctactggcttagttttttatgaaacagatcccagaccttccaatagaaccataaaatttaagtcagtgtagctcaaacacatcagttcgttttggttttttcctttgacaacatcccttttgtcctcctccatagtcccacttcgtttgaactggaagttttcaccttgaaattatcttacctctctctcctatgttggatgtcttgtttcttgaactccagtactgtacttttttctgctttacttcttcattgatgaagcacatgtttgagtaactttctgaaaaactcaatatgaacagcaaattgtgctcttgaatgagtgaaaatgtctttatttacccttacttaatttgtagtttgtctggctatagattttaggttgcaaacaattttcctttagaatttcggaagtcctgacttcagtgtgttttagctgtcagcattgctgttgactcatctgccatctgagttttaaaactttgtatgtcatctggtttgtgtgtttttttccttttaagattctctcgttatgactggagatctgaaatttcacaatgaatctgctttggtatgggtgttttttcattcagcgtgctatcacttattatgctctttatgcagtttcgatttggaaacttgtatccttctgttctggggaacttttggtgtttgtgtgattatttccttcctccattttgtttttgttttttaattttggaacttctgttactccgattgcctttctcggattgataatcttttctttcctcttttctatctcttgtatttctgtattatttttgggagataaagtgggagctttaccttccaactcttctatttaattttccttttttttttttttttggagacagtctcactctgtcgcccaggctggagtacagtggcatgatcttggctcactgcaacctctgcctcccgggttcaaatgattctcctgcctcagcctcccgagtagctgggattactggtgcacaccaccacgcccagctaatatttgtatttttagtagagaggaagtttcaccatattagccaggctggtcttgaattcctgatccacccgcctcagcctcccaaagtactgggattacaggcaaaagccaccgtgcccagactgaatttttccaaagctacttattatccataaaactttcttttcttttgggggatggtgggtcttttatagaaaatagaattattttttgtgtcatgaaagctgaaggtattaatggtttaaataaaatttttttcttctctaagtattatttctgggttaactgtttcctgagttgctttatttttctgttttagtctctactttatgttggcggcattcctcaaatgttttataattttgtcttttcatatttaacaagtcactaaaaactgatttgactggaagctctgtgtgcctgagtgaggcttcctaactgatgagtccactgctatagaaggaataggacctcaaaatctaattgctagtacttcttttagactgatccctttcactagaaagaaactttcattcgctttttttagggaatgtaggcctgaccaccagcataccatgttgcctcatatatttttctgcaagtaagattatactatacataatgctttctaaaatttgtttttcatctaataatatatccaagccactcatgtctgtaggcacgggaatataaaatggctgtctagaatttcatattatagactattcttgacttatgctgattcgacttacagtttttcaactttacaatgatgtgaaagggatatgcattcagtagaaactgtacttcaaattttgaagtttgatcttttcctggcctaacaatatgctgtccaatactcacaatgctaggcaatagcagtgagcctcagcttccagtcagctgtcaatcaaacaggaggacagacaacggatactctccaatggatagtgttgccaatgatattgcccaactctaggctaatgtcagtgatctgagcacatttaagacagactaggctcattctacctgacttcaaactatactataaggctacagtaaccaaaacagcatggtactgataccaaaacaggtatgtagaccaatggaacataacagagacctcagaaataacaccacacatctacaaccatctgatcttcaacaaacctgataaaaacaagaaatggggaaaggattccctatttaagaaatggtgctgggaaaactggctagcagaaaacagaaactggaccccttccttacaccttatacaaaaactaactcaaaaaggattaaagacttaaatgtaaaacctaataccataaaaaccctagaagaaaactgaggcgatactattcaggccataagcatgggcaaagacttcatgactaaaacaccaaaagcaatggcaacaaaagccaaaattgacaaatgagatctaattaaactaaagagcttctgcacagcaaaagaaactatcatcagagtgaacaggcaacctacagaataggagaaaaattttgcaatctatccagctgacaaaggtctaatatccagaatctataaggaacttaaacaaacttacaagaaaagaacaaacaacctcaacaaaaagtgggtgaggatatgaacagacacttctcaaaagaagacatttatgtggccaacaagcatatgaataaaagcccatcatcactggtcattagaaaaatgcaactcaaaaccacaatgagataccatctcacaccagttagaatggcaatcattaaaaagtcaggaaacaacagatgctggcgaggctgtggagaaataggaacacttttacaccgttgatgggagtgtaaatgagttcaatcattgtggaaggcagtgtggtgattcctcaaggatctagaaccagaaatatcatttgacccagcaatcccattattgggtatatacccaaagtattataaatcattccactacaaagacacatgcacaggtatgtttattgcagcactatttacaatagcaaagacttggaaccaacccaaatgcccatcaatgatagactggataaagaaaatatggcgtatatacaccatggaatactatgcagccataaaaaagaatgagttcatgtcctttgcagggacatggatgaagctggaaaccatcatcctcagcaaactaatacaggaacagaaaaccaaaccccatgttctcactcataagtgggagttgagcagtgagaacacatggacacagggaggaaaacatcacacaccagggcctgttgtgggagaaggagcaagggaagggagagcattaggacaaataactaatgcatgtggggcttaaaacctagatgacaagttgataggtgcagcaaaccaccatgacacatgtatacctatgtaacaaacctgcatgttctacacatgtattccagaacttaaagtaaaattttttaaaatttaaaatgagaaaaaaagaaagtatacctatataattgatacaggagtaccatgattaataccccagttttatgaaaaaatatgaagtcattatggagtagcaagaattatactaacataaagacaaagtagaaataagacaaacaaacgaaaaaagcagacaacttaggtcagaatagtgtaatcttgccaaaggtcatatagcaatgtataagtaagtactcttaattaagtggtaaattgctcaatgtcattgttcatgtctccttagtatgaataaacaataatcattattgttttcctatcaataaaaaaaagatagataggctaagctatgatgttcggtaacttaggtgtattaaatgcattttattttatttatttttctgagacaaagtgtcactctgtcatccaggctggagtgcaattgtgcaactatagctcactgcaaccctgacctcctgggctcaagcgattctaccacctcagcctcctaagcagctaggactacaggtgtgcacgtccatactcagctaatttttttgtgtttcatagagatggggctctcactctattgcccaggctggtcttgaactcctgacctcaagggatcctcctgtctcagccttccaactgttaggattacaggtgagagccattatgcttggccattaaatgcattttttacttagggtattttgaacttacaatgggttataggggcataactctaccataagtcaaagagcatctgtatatattagccataatttataaacagtttctaactgatgggcacttggggatcttttttccttataacaacaccttaattgggtctgtatctttccatacttatgcaagaatatctgcaggattaatttctagaagtgaaatgattggatcaaagagtgtgcatattttacatttttgtcaatattgccaaattattctccaagaagtttataccaattcatactacccctttgacaggattttttttttttagactccagctgaacaggattttttaaagtgtatctaattctacttaggaatagatttctctaattattagtgaagttaaacaacttttattatttttattatctatttgcatttattttaatataaacttaaaaaatactttgtccatttttccattgggtggttagtgttttcttattaatttgttcagtttttctgtacattaaagaaattagctctctgcccattatttactctgacattttctttttttttcaacctttattttaggttcatggggtatatgtgcatgtttgttatatgagtaaattttttgttgctgaggtttggtgtatgaatgattcccatcacccagacagtaagcatagtaccagataggtagtttttcaaccctccctcatacccttcccccaccccagaagtccctagtgcccagtgtctattgttcccatctttatggccatgtgtactcaatgtttagctctcactttaagtgaaaatgtgtggcatttggttttctgttcctgcattaatccacttaggataatggcatccagctacattcatgttgctgcaaaggacatgattttgttctttttcatggctgcatagtattccatggtgtatacataccatattttctttatccagtccaccactgatgggcatccaggtggatcccatgtctttgctattgtgaatggtgctgtgatgaacatatgagtgcatgtgtctttttggtacaatgatttattttccgttgggtatacacctagtagtgggatttctgggtcaaataatagttctgttttaagttatttgagaaatttccaaactactttccacagtggctggactaatttacattcccaccaacagtgtttgtaagtgttctcttttctctgcaacctcaccaacatccattattttttgactttttaatagtagccattctgactggtatgagatggtgtctcattatggttttgatttgcatttctttaatgattagtgatgttgagacttttttcatatatttattgactgcatgtatgtcttcttttgaaaagtgtctgttcatgtcctctgaccattttttaatggggttattcatttttcgtctgttgaattgtttaagttcgttatagattccagatataagacctttgttggacgcacagttttcaaatattttctcccattcttcaggttgtctgtttactctgttcatagtttcctttgctgtatagaagctgtttagtttaattaggtcccacttgtcgatttttggttttgttccaactgcttttggggacttagtcataaattctttgccaaggctgatgtccagaatggtatttcttaggttttctcctagggtttttatagttttagatcttacacttaagtctttaatctatcttgagttaatttttgtatatggtgaaatgtagaggtccagttttattcttctgcatgtggctagccagtcaagtaggctcttttcctgggttacagggatcattcaacatatgcaaatcaataaatgtgattcaccacataaacatcattaaaaaccataagatcatctcaatagatgtagaaaaagcttttgataaaatcaaacatccctttatgataaaaaccctcaacaaactaggcattgaaggaatatacctcaaaatagtaagagccatctatgataaacccacagacaactttttatactgaatgggcaaaagctggaagcatttgccttaagagctagaacaagacaagtatgcccattctcaccactactattcaacatagtacttgaagtcctagcctgagcaatcaggcaggagaaagaaataaaaggcatccaaataggaaaagaagaagtcaaattgtctctctttgctgaggatatgattctttatctagaaaaccctaaaggtgttgccaaaaggctccttagagctgataaacaacttcactaaagtttcaggatacaaaattgatgtacaaaaatcagtagcatttctatactccaataatgttcaagctgagacccaagtcaagaacacaatctcatttttaatagccacacacacccacaaaagaaaataccttggaattaatctaaccaagaaagtgaaagatctctacaaggagaaccacaaaacactgctgaaataagtcatagattatacaaacaaaaggaaaaacatcccatgctcatggattggaagaatcaatactgttaaaatggccatactgcccaaagcaatctataggttcaatgctattcctatcaaactactaacatcatttttcacagaattagaaaaaaatattctgaaattcatatggaactcaaaaagagcctgaatagccaaagcaattctaagcaaaaagaacaaagctggaggcattacactacctgacttcaaactatactacaaggctacagtaaccaaaacagcatggtactggtacaaagacacacatagaccaatggaacaggatagagaacccagaaatgaagctacacagtatagccatctaatcttcgacaaaggcaacaataacaagcaatgggaaaaggactccctattcaataaatggtgctgagataactagctagccatatgcagaagaataggatattttcttttaaatgttctttctagttttttttctaatggaaatttcaaagttaaatgtttttactgtatggattggattttatgtgatgattagaaaggccttccttactccaagatgacaaaaaaatatattcactatgtttttatcaattgtttcatggtatttttctattatatggaggcaccataatttatttagacagtcctataatgacctttatgttgtttccagttttccaaaggccatgtcctcttgttttgtcctggactccctgagaaactgaagagcaacaggcaaatgtcttccttattgagcgtcttccttaaaatgtaagattttcttctcccatttcaataatcaccactactttaactgcattttatttcattttttggttcatttttgttatcctgctctcaaatcctccctgccatttcacatgtgcattaaaatgtcagtgcccaaaattggcatgatactttaagggtgtgaccaatttctaagtttagcagaaggatattttcccagctcctggatgtcagagacctattaatatatttcactatcacagttagctttataaaaacagccatactatactgctgactcatactcagctggtggtctcaagcctaaccagtttattaaactagaaatgatgtccaatatgttagatgacagaaaaaaatatttgaaaagttcctgggattttgaaccctgggccaaaatttgaagcttatcaggaagaccacgaaaagctcatcatttatgtttaaaaaaaaaaccaccaatatgagtacaagataaggatgatttcccttaacacataaacattgaaactttttggattaccatgatttaatattggcaacaatattgcacaatgtaatgtgcaaaattcattacattttttgacagccatttcacattgttgccaatgtgaaaaaaaaattaatggctaactgttcacagtctctcccttttctccttcagccaaggaaagttctttcttggcaagttcagttccttggccttgttaagagattgatggatcgagtaagagggaaaaggtttgatttaatctcttagaaaagttggagagctgcacaagaaaaaagaagatcctgaggatgagaagttgctgagaaaggcaaacgccaataagcaatggctgagacagcaagtttgggaagcttatgaaggagagaaaagaaaaagaaattagattagctgctacgtcgtggcaaggggggcttttcagatgaggaacgagatttttaatgaagtgttaccatgtgttaggaatattgcatcacattgcatgtgttctaagagacttaagtaaaatttaaatatttttccaattatttttggatgtctgaaatgtgtgtctttggttggaactttgagctgagaatcagtcacaggatatctcagctatgtacaggttacaaaatcttacattgcatcaacagagctatggtgttcagtgcaataaggatgacaattatgtctttggtcagacaacatttgccttattatcttcagccttgggtgccacatttttacaaggtgcattgatttgctagggctgctataaaaaagtactgcatactaggtggcttaaacaaagtttattttcttacaattctgaaggctagaagtccaagatcaaagtattgacagggttagtttctttggaggcatttctccttggcttgtagatagtcatcttctccttgtgtcttcacttggtccttcctctgtgtgcgtctgtgtctttaatctcctctttttataaagacaccagccacattggattactgcaaacttaatattggcaatgatattgcacaatctaatgtgcaaaatgagttacattttttgacagccatttcacattgttgccaaagtgaaaaaaaaattaatggctaactgttcacagtctctcctttttctcctttggccgaggaaagttctttcttggcaagttcagttccttggccttgttaagagattgatggaggctgggcacggtggctcatgcctgcaatcccagcactgtgggaggctgatgcaattggatcacgaggtcagaagttcaagaccagcctggccaacatggtgaaaccccatctctactaaatatacaaaaattagccgggcgtactggtgggcacctgtaatcccagctacttgggaggttgaggcagagaattgcttgaacctgggatgcagaggttgcagtgagccgagatagcgccactgcactccagcctgggcaacaacaatgagactctgtctcaaaaaaaaaaaagaaaagaaaagaaagaaaagaaaaagaaagagatttatggatcaggcaagaggaaaaaggtttggattttacaatggatttacattggattataatccattatactgacctcactttaattattttttctttttttttttttttttgagacaaagtcttgctctgtctcccaggaggctggagtgcagtgccacatgatctctgctcactgcaacctccgcctcccaggttcaagcgattctcctgcctcagcctcccgagtagctgggattacaggcacccgccaccatacctggctaatttttatatttttagtagagacagggtttcaccatgttggccaggctggtctcaaactcctgatctcaagtgatccacctgcctcagcctcccagagtgctgggattacaggcttgagccactgcacccaggctaattacctctttaaagaccctatatccaactacagtcacattccaaggtactggtggttaggacttcaacatatgaattctgagggaacacaaatcagctcataacacaagcctactgacaaattcataatttattgttatttttagatccctttaaattttattgctgatcattcaagactcttaccaagttctcataatctgtaaacaaccagaatatcatcaacttcttcattaaattgttaaaagtagtgaattaacctggttgaagcacattattgctatttgacttaaaaggatttagaatatgatagtttgttaggtttgtgaaaatggtattatataaattggtcctttggagataaggtatatatacacatgaaaagaaacaattccttctctcctgtaaaatgaggcaactggaccagataatctctaaggtctctcccagttctaaaatcctacaattctggatcaagaacaataaaaatataatatgttatttaaaataatattaaagtattggatctgtgttataaattatgaacaggtaggaaagacacagatcaaggtaggagctgtagaaggttttcttaaaatttgaatgggtgatataaaatatcttggaggaaagaccatcagatttgactgctaacctaaatttcggcctcagaatcacaataactcatactgatggcaatttagatcccaagttttacattgttttgataaccagaattttctctcatagctgcttcaaaactgacccagaagaatcaaccacatcccctaatgccctgctgtacatttcatctttctgcataactacatgaaaaatacattatatctctcatctccttgacttttatttcatagtttgttgcagaaatagtagcatttaatcagcttgaactgattgtccatgtatttagacataaaataatagattgtaaacttctgcattacacagataaatatctgagtttgacagtgttgtaggcattatatttattcatatttctcaagctcatgcagaaatctattcatatacttctcaacaaggcaggattacacagatctgccaatccctaaaattagtttttaaaaataccttgtacaagtcaaaaacatggctcatctctcagaaggttgaagacaggctaatattttacttttcttaaaaaaaaaaaagataaggacctactatcaggcaaaatttgtgaaaatgtagcagtaatacttagaggttgctttctgcagtgaattattagactttgaaagactctcatatactgcagaggctcatttctgacatcaagttgaaatcactttagcatgaataatttttaaaatgaaatgctttttgaggatggaaaagagccatactggattttatctggttattaaattcaaaaacggccttgtatcaagaaagtggatgttgtgccaagcattattaacatattctatttagaaaaatgacattgttactcatatgaaaacagatgttgctctagataaagttaaatgccttcacaggtctcaagcatgtgtacatgaaattacagaaattaatcatagttcaagcaaggacttgactccacttctgctgtaaagaaagtgtttgggttatctatggctgcatgacaaaccatcccaacacttaatggcttaaaataaaggttgggaaactttttctgcaaaaggccaaatagtaggtatgttaaaatttggtgcaccatgcaatctctgttacaactactcaactccagtgtaactcaaatgcagccatagacaatatgtaaacaaatggatgtggctatgttccgataaaattatatttacaaaaagaggcagtatggtcaagtgcagtgcctcacacctataatcccagtgctttgggatgccgggtgttcaagaccagccttggcaatatagcaagaccccatatctacaaaaagtaaaataaaaattagctgggcatgatggagagcacctatagtcctagctacttgggaggctgagacaggaggatcactaaagcccaagaatttgaggctgcagtgagctatgatcatgccactgcactccagcctgggcaacagagtgagatactctctaaaaataattttaattaaaattaaacaccttttttatatgacagtgggccagttttggcccacaagctctagttggttaactcctggtttattaagcctcctaattctatgggttgatattttcagcaggactctcagtggggttgactcatatctgctctccatgattgactggattggcatatgtgtttgcagtcagttggcaaggtgaccgagggctgactggtcctgaatggttccactcacgtgtctggtggttgactgaagctgttggctgcatgcttcggtttgcctttacacggcctctgtggtaagggcgctctggatttctcccatagtagctggattccggggggacaaaagcagaagcttcttgacttctgaggcctcagctaggaagccacaatgtcacttcatattccattggccaaagtcacaagagatgaggatatagactatacattttgatggaaaagctcaaagagtctgtggccctttaaaatccactacagtgagtaaactgtcaaaacagtgtatcaattcctgcaagacttttaccagcaactttcctactttgaaactcaccagtactttgtgtattatggtcacaattctcactgtaaataacacagccataacttaagcaagaaacaataattaatcaaaatttccattcaaaatattttgaaatgtttgtgaaaaggaagcagttatgaaaataaaagaggtcttttaagactcagagtggaattatctcatttttatttttaatggggagcttggttaaaagggtcatttgaggaggagatagtgagggaagatatgggaggtagtaaacagagggtggctgaaattttaatccttggaggtaaagaggttattgctttggagagactccttttgttttagaaaactcccctcaatagctggcacggtggctcacgcctgtaatcccagcactttgggagactgaggtgggtagatcacttgaggccaggagtttgagaccagcctggccaacatggtgagactctgtctctaccaaaaaatgaaaaaaaattagccaggcatggtggtgtgaacctgtagtcctagctcctcaggaggctgaggctgcaatgagttgtgagtcatgatcatactactgcactccagcctgggcaatagagcaagactctgtctctaaaaaaaagaaaagaaaactcctctcaatgaatcttgagttacatttgattgaggtggtgtctgccaagcttttccactgtaaatttatactttttaaactttctaattaataagagtttattaagaggtaatttattccattcttcaaattttatccattagttgtagtatttattgatttttttctgaattaattatctctatggtggttgtcaaataatgattttctaattctatcattccttctacatttactagttgtaaggaaaatctttaccctctctacatttacttatttatttatatcagtatagtttcataaattcatatttaattcaattttataatccatgttgttatttattttgatgaccaaactcccaaattttggccagggagagcctccaaaatctggcttttctattttttttaacaccctcatctttctttgagcatgtccttactttctgacacaacaacaagatattccaggctcatcttgtaattttcctgcctcgactctgccttgttgcttttaatgaaggaaaaaaaaaaaaaaacaagatcttgatgctaaatgtgctcattgctattgggatattgctgttttcaggccttcatgacaaacatttttttcaagacaggttctcactgtgttgcccaggctggagtgcagtggtgcaatctaggctcactgcaaccactgcctcctgggttcaagcaattctcctgcctcagcctcccaagtagctgggattacaggcatgtgccaccacacctggctaatttttgaatttttagtagagacacggtttcgccatgttggccaggctggtcttgaactcctaatgttaggtgatccatccacctcagcgtcccaaagtgctgggattataggcgtgaggcacagcgcccggccactatcttcatatttctatcaccttgtattagacatgttaatcaacagttcctgccatggttcacagtcctcctgaaaagggagtcttagattctgtttaataccacataagtacaattcctacaagagccaaagctgattagacactgacccaaaggctgtcaacctatgatttgacaggaatagggttttccctataacagatgctgttggttccctgcctgtgtcccctcccatactccctgatccagtttacgctgacagcatcttgctgtaagcacctgccacttaccacttgagaaaatggacatactagatggacatggacattaatgcccctgaaattagctttcagccactgacagatgagagttggaggggaaatatccaacttctttgcctctcaactgggataactctgagaaatattctacactgtctcccagagtcccccaatgggacaaaaatccagttgcctacagcagtagctcagtaatgagcttccttaccttccttgtctcaatttcccactcccttaaaagtgcttccagaaattatctcccaaattaactaccagctcttaaatccttgcctccaacttgggttctgtgggaaaccaacttaacacactgctcagatgtcacaatggttattagtaaagccaaacaggcatcctctctggtatatatgtatttttaaaaaaccttttttagctggaccaagagaaacagatatgtcatctctatttgaaccacatatttggtgaaacgctaaagagaagatacaaaaaattcctgcccagaggtatcactctttggatgcagaacaaccctctatcctaatcttgataagactgtgccctattacagctccttttatttccatgagattctttcattctatagctttatatgtaccctaacaatagtgaacaccagcattcccaatcccacttacttgagtttgagaatttctcttcctagacactaaactataacttgggaggcactatattttgcttcccgtattgcaactaaagtaaagctttgcacaaagtagacactcagttaatatttgtctaatgaagaaatgggaggagtattttaatggtagatgtggatttacctgggtttagaactacttggcaagtcttagctatgaaaaagtctttttcccctccatggagcaaacacttgaagaaattttcataccttgtaattagaaggacaaattattatttttattatttttgtactaagcatccctttctatcttcttatggttactgtgtcccttctcctcacttcctttccccacaaacatgcacatgtcctttggaaaactacttgtcctttgattcctaggtttctatccctgcccccaagaagctatatagcccccacaactggtcaatcataattccttatcttcctggggtttggcacatgacctaccaagataaaacttctgcccttgagttttataaaggggctatggagaggaaagctcttttaatctcctgagtttgccaagctgtgttaatgtaagtgtgaatttgttagcccacccctcacatctcattcctaccaaaccacaaaaagtcatctgtcttcagtagatgtggttgaaagaatcacatacgaaaatacagcctggagagagacaggaagatctagcaatgttttatgtctctagacttctccaagccaccatcaccttgtatttctttttaataagagccaataaattcccttttaattttcagtttttttgaattgggtttttaccacttgcaaccaaacaagatactatatgcaaaacttgaagaactaactctaaaactgacaggagtacgttttaaaattgaagcccttcccctgcaaacacctcaccagcacctcagttcttaaagcatattagaacatcaatagtacctgtaaacccaacattttgggaagctgaggctggaagatcacctgagaccaggagtttgagaccagcctggacaacatagtgagacccttgatctacaaaagacttttgaaattagcccggtgtgatggagtgtgcctgtagtcctagctactcaggaggctgatgcaggaggatcacttgagcccaggagttcgagggtgcagagagccataactgagccactgcattccagcctgggtgagagagtgggatcaagaaagaaaaagagagaaaggaatgaaggaaggaaagaaggaaggaaggaaggaaaagaaagagaaaaagagaaagaaaagaacatgaacatcaatagaagccatgagtgtgtgtctttgtgtctcccattgcatcatgtgctagatgtctaggagcctgcagcagggtcccttgtacactagaggattgtgttaatagagattagagtgtatccagctgaaggggatttcagaaagaaaagagattatttcttttctctttatgcaatgcataaaaaaattatgggagaaatgtcaacacttattcctggaggttatgtagagtggtaagctatttttttctgaaaggagaagatttagggaaatttagccaagcatgaaaggtgatttgttccaaatcctttcatacatgtacctgagtaaacccaaacaatgtaagtgtcttctggctggttccaaaaggaactaaaatttatctgaaactgagaccataactcccaaacctggtattcttttagtacttcttatcagtataatgtcacggccatttatccaatttatgtgtaagacagaaaccgaggggttatctttaataacttcttggtcttcatttccttcaaatccagtgagtcactgagttgcatccatttcatcttccacatgtctcttaaatctctctgcttattcccaattcttctgtgatttcctctgtccaggctatcatcacactggattactactctaacccactaactgttcttccctgcatgcagtcttgatccactccaagccgtttcagaccattttctactccaaagcccatcttgctttgttgttgtcattaatgcagatctgtttatgttattttttcctttctcaatctccttaaaaatctccaaagtatgttggatatctgatcatgtctgtccagaaaatttctatcctccttatgacagtaacaccctaagtttattttaggaaaccacctctccccaaggtggtttgagtgggattacccccatctccagctccagagttatggattccctaattggcttccctagccacagagataatgttaggggagggcacttaacccatacctaaaccatgtagagcacagcattcccctagccaaagaatggcttcagagtgggcatatgatttaagcaaatccaatcagaaagattgactagttcttgggaccatggtaggagccagactgaagattaaggataagggtagagtcatgggatccaaaagagccagaactggggcaggaaaagatcatcaccctatgaataaaacttgtccttagagtgggatctgaactctggacttcaccataacataagccaatggttctttttctgcctttctttattttatgaagaaaggctggattgaattttctattactggcaaccgaaaggttcttagctattattcatccaagctaatgtattattgcacgtagaataaaggcaaagttcttaatatagcttgaagcacatttgcatttgctgcctgagctctagccacagaggcctatgtttaacttttgttcatgcccttccctcttcctgaaaccttcctggcctcccacacacccaatattatgcattttgtcttacttatgctttaactctcagctcaaattcctttcgtgaccccttaaacagacaaaatccccttaatattcactctgaaagtccaggaaggattcaattttggtacttataaaaatatttgtgagattatttcataaatgtctgtctctctcacttaactctaagttacatgtaagaaactctccataagtttcagttaacaacacactatcaaataacaacttgaattatacttgaaaggaagaagaaagtcatagtaaatatcactggttcactcacaaaatgaaaataggttaataaaatttattttaaagccatcgtaggaggaattttcctggtcacatccaagcaacttataaaaatgggaaaatttaaaaacagatgtatcagaaacacatattattttatctagaaaataaattaaatagtggaattaacatctttttattgtagaagattaaagaataaatttgtctttaatgtaattcaaccaaagggggcagaatacaaccaatgcattaatttagaagtggatggaatgatttggggaaaaaaaaaccaggatttctggcaagtttccccttctgattcagagctgcaacaaagaagctgttaaaatgtttgcaatttcgtttcagtgttggatcaaataatatacacgtgcagctattggaaaaaagattttgaaatgattttgttgtattacaacttacgcagtccatcatggtcaaaagaccattttagatgaatttcagttttaagaggtcatattactgcatcagtttttttttcccttgctgttctatcttcactccagagaaaaaaacagaaatgtatgggaaggctaaactaacaatgttgttgctctaatggaagtttcataaatacaacaaaatttattatattcttagtggaacaatacttagttgttttcaataatagttgaacaaaatatatatatttcatgagtctagacttggaaagagctgtgacagcacaattagagacacctagaaaaatgcggtatcccccttaccgtgggggatacgttctaaaacccccagtggatgcctgaagacacagatagtactaaacatgcaagtgtactatgcatgaatttctttttccttcttcacaatttcacagagggaggattcattcttactgtagatcttagtaatctcggtatgtaattttttttcttttttaagtggagaacttacactttttcacttaaagaaagcattttatggatcctctttggcatatccaccatcatcaccactcttgcactttagggccattagtaagtaaaataagggttacttgaacgcaagcactgtgataccacgacagttgatctcattatcaaaaagctactaaatgactaatgggcaggcagcatattcggcgtgaatacaccgaacaaagggatgagtcatgtcccaggcagcatggagcagagcagtgtgagatttcatcacaaaactcaggatagaatgctataaaaaacataggaattatttatttctggtattttctatttaatattttcagatcacaattgattgtgggtaactgaaaccacagaaagtgaaaccacagataagtgggaactactttaaaatcagaatgtttatatctcttaattaattttttctccaacctgaaatgccctcccttctcatttttgccaaattcaacttctctttcattttcaacaacacaaaaagctctcacgtcataaccttattgttctgtttttttctatacctgtagactagtacaagtagtactcaccgtgtggtatcagtgacttccaattgacaactcaaggactatactatctgtactccaaatcacctggaaaacatttaaaatatatcttccaaattgctccccaccctgcctctcccactttcaagacttgagtcagtaaattagaacatctaaggaatctgcagtctttaaaaatattttctggcctggtgtggtggcacacacctgtaatcccagcactttgggaggtggagtcaggtggattgcttgagctcaggagttcgagacgagcctgcacaacatagcaaaacccagtctctacaaaaaatacaaaaagtagctgggcgtggcagcccacacctgtagtcccagctactcgggaggctgaggtaggaggatcacttgagccctggagtcagagattgcagtgagccaaggtcatgccactgaactccagcctggcaacagaacaagaccttgtctcaaaaagtaagtaaataataaaatattttctgtacacccctgttgataacagcattattctcaatctccaaaaggtggaagcaactcattgatagacagacaaacaaaatgtggtatacacatacaatggaatatttttcagccttaaaaaagaagcacattttgacatatgctacaacgtgaatgaatcttaaagaattatgttaagtggaataagccagtcacaaaaagataaatatcatataattccaattatatgaggtacatagatttgtcaaatccatatagacagaaagtagaatggtgataggggctaagggaggaggccacaggagttattgtttaaggatatggagtttcagttttggaaaatgaaaaaagttttaaggatgaaaaaagttttggaagatgaaaaatgttagagatggatggtagtgatggttgctcaacaatgtgaatgtacttaataccattgaactatacacttaaaaacagttaagattgtgcattttatgttatgtgtattttagcacaactgaaaaaaatagttaaaagggtaaattttattttacgtatatttaactacaactaaaaaaaacattgtacgtgggaaatgctggtctcagttttttgtgttggttcttcattcttaattgtcataatattttattcattcatttctttataaataatgcaccatgcataattctagatgctggagacatagccatgactaaagcagacaaggtccctgctctcacagagccataattctaccatctatgacatcttatttgtgaggatgagatggtatagcatgggatggaaaccccaattttacagtggctttaacactcaagattttactctctgatataaaatatcaatttggcagggactcaggatccttccagctttgttctttatcaaccctagggtatgactgtatagacatgatccagtgtgactgctgaatagagctggtctttgcatctgtattcctaccagcaggaaggagaaaatacaaccaagggcataatccttattttaggtatactctttgaaagtgacatcccattgacaataacttaaacaaatggccaagcctagctgcaagggaagctggaaaatgcaatctttgttcctggcagacatgtgtttagctagaatgcaagggttcttttactgaaaaagaggagaatggacactggaagagaactatcagaatctgctacacaattattttcccagcacatcttgaattctttgaaggataagaggtctctcaacacgtagaattaaaaggaagagcccctaaggggaaagcaaaaagataatttgaaatgatatccctctgagggcttcacccctggaacagcccacttcctattgggaacatttccttttgatatgtagacctatgaactaaagaaacaaaactctcttgcacattcccaacatgcagtaatggaacaggtagaaaatactgctatgaacattgctttttaaaaaggaagaaaattgatacacacaggattcactggtccacagcaattttgaaatctagctggacatatgttgccagttccttgattaaaggatcaattctactgcctgggaacaattcactttggctcttggctctaccctcttggccatcttcattttccatggaaaatagcccatgtttatggctgagtaatttttgcagcctgtttctgcccacagaaatttggatttcattttgtattttctatatctttcagtccaagttgatataattcttttaaaatctttgagtttttaatgaattatattataatccactccattaaacagaattcttacccaaaggtctccttcaagataagcccttctctaccttggtcttcctattaggctcccaagggacaacatctttaagattcttataagcccttttttgataaaggtgatctgtgggatatgcccttaagatccttagaggatcttttatctgactaaattgttctctgaggaatcacttgagatttttctgagatcatatcaaaggatcttattgttcttacctaggtttcatctttgccttgaagcattttccttaattgacaatcttacagagcctagaagtgacagttttattttcaaattcagttttgtgttcatcttatttctttcttctcatcttttaccgtaaacaagaagaaatagccagagggcaccttcaacattcttccagtgaatctccttagctagataattcagttcattgggtataatttctgctttctactttattacaggtccttgtgttgctaaacattctgccactaaataacaaagatcttcctccaatttccaagaactttttcttactttacttcaagctctctctacaagccttcttgaggaccatcagactcttctaccagtatcttcatggtccttccaacttccaccttcttccccaaagccactatcatatttttagatttttattacaacaccccgcttccaggtaaaaacctgttccagtttctatggctgcaaaataaattaccccaaaacttagtggcttaaaacagccatttattaggctcatggattctgtgggtcaggaactttgaggtagtgacttgtctctaggttaaaagatttgtgagatggaagacaaaggttggggatgggaatcatctgaagtctcatccctcacatgtatggcacctgatacaaaccgttcactggggaccttggtccttctgcctgtgatttctttgcatgggctagttttagcttcctcatagcatggcggctgggttctaagagagagtaccctgcaaaagagcctgatgatagctaaattgctttctgtgacttaaacttggaagtcacaaagtgttatttctactttattctatcagtaaagacagtcacaaggcccattcaagtttaaagactcgtcttcttgagggagaagtgacaatattctagtggagtatatgggaccagaaataatgctgtggccactttggaaaacacaggagaagcctaggaaggtactcctttcattgagctcttggataataagctcatctcaggctctgcttctagagaacccaactgcattagtttcaagggctgccataatgaagtaccacaaggtgggtggtagaaacaagagaaatttattgtctcacagttctcacagagaaacttattgtctcacagagatccgagatcaaggtgttaacagggttggatcattctgagggatgtcttccacaccttgcctttcctttctggtggtttgctgacaatcttggcattccttggcttgtaggagcatcacttcactgtttgccttatcttcacatagtgttctcactgtgtgcatcttgctgtatccaaatttcccctttttgtaaggatgccagtcatatgggattggggtcctctctaataacctcatcttaactaattacatctgcaatgactgtttccagataaaattacattctgatatagtggggttagcactttaacatatgaatttagggtagacacaattaaacctatgacactgacctaaggatagaggcaggaggcggagaactatcctagacagataggagagggtccccagagaacctctgacccaccaaggttattgtgcacagggggcttgactaaatatgcccacggtgaaaaattctgtcccttagcacatgtgcggtaagggaaataaatcaatgtggcgggactcaggctaagggccccgcaagtacactggaaggatggcgtggagtcaccaggaattcacaccttacaaaaatggggaactgatatggtttggctgtgtccccacccaaatctcatcttgggttcccacatgttgtgggagggacccggtgggaggtgattgaatcatgggggcgggtctttcctgtgctgttcttgtgatagtgaataagtctcacaagatctgatgattttaaaagggggaatttccctgcacaagtgctcttcttttgtctgctgccatgtgagatgtgcctttcaccttccgccatgattgtgaggcctccccagccacatggacctataagtccaataaacctctttcttttgtaaattgccaagtcttgggtatgtctttatcggcagtatgaaaatggactaatacaggaacccagccccatcagcagatatatagaagcccttgtattcaactttgaagggggccaactggcaacctgctttcaggacccctctttttgctgagagctttcctttttgcctaataaattacactccactcactctttgatgtctgtgtgactaatgtttcctggttgtgagacaagaacccagatctagctaagccttaaggagtgaaaaatcatgcatcactaagacataagagtatctactctatgcccaggtgcagtgcctcacgcctgtaatcccaacactttgggaggctgaggcaggtggatcacctgaagtcaggagttcaagaccagcctggccaacatggtgaaaccccatctctactaaaaatacaaaaatttgctgggcatggtggcacaagcttgtaatctcaccttctcgggagtctaagacaggagaatcactttaacccaggaggcggaggttgcagtgagtcaagatcatgccactgcactccagcctgggtgacagagcgagactcagtctcaaaaaaaaaaaaaaaaaaaaaaacaaaaacaagagtatctacgttacgctatttattaaaaagattatctgaaataatacatagttcctggcacctagcaaatgattaataaatgttagccatcatcatttatctttggatccagacagactagcacagtgcttagcacatagcaaatattgaccatctttgggttttgcctgcctggcattcactccatctttttctggtaaaaacaccttgaaacaatctttttgctagtcttggtgaggcaatcattcaaaatgtcctgccctgccctcaagaggtgagtatatgtgtgacccaagaatgccattcagactctgtctcctaaaaattaaatctcgagcagagtaacgtagagatagaaaatgacagagatcatttatcccgctaacagtgccacgaaaagagactgacctttagttcctactatctggatacttagagctgttttgactcctggccttttcacagcctggtgcttacttagcatttcttttaattatttgtgccagtccacatccttgagcacatttcttgtttagcttaagatagtcagagtgagtttcttttgtttgcgcagaaacagaaatagactgaagtagaaattgattcctggacataacagttacaactgacacttagaatgacaatgtgaagttggaagggtcatggtgaggcaggagacagtgtggacctccgtttctctggctgggaaatgcctatcttcaaaagcatgttgtatctggaaactcaggcaatgtgtctgtccagctggagatttgggagagtcagtagaaaaacgtcagctcgttggattaggttggatacttttttttagcccaagataagttactacaagtaagagacaactgggtcatcagaaagcagagagagagagaacagaaactgctaagggaagccctttctaattgtggcctgtgatcaaagagggatagtagtcagataatcttaagctgaattctctcccctgagttaaagttagtggaagtaatgtcttaagattctgaaaacttaagaggagctaaaaaaaagtctcccggaaaagctctactaagcacctccttctgggccttccttgacggatgaggcttcacttagtccccaatttacagcccaaccactgaaatacatgggatgttggagctgagattggttttatctctttcgactcaggctattgcttgtcattgcccccaggaaatgttaaaattgaaggctttgtggctgagagctggagggaagggcagagctctaaggcctgttgctatgagagaggacatcctaccattggatgtgcatggagggcctactaggtttctaagaaaattgttatttctggataaacacttaaccaacctaaggtaatctccaggcccctgaactcttctcaatagaaaattaggttctaaattagtttaaccctcacaagtgatcctctccactgtccttttcagaggtgaccacagtggatactggacattggctcttctcccagaggagaaaaccagaatcaactacttttgctgaccaatatatccactctgtcactggagcagacagcactttttattcctgagaagcaggatgtgacaaattctgtttgccaatgaccactctaagctgtttcttccccttcccttttccatgtgagttttttttttctttaattaagataacctgacctatttctaccattgtagatcaggttaaatttatcatttaacctcagtttgccaatacacaaggagctattctgggccaacctgagaataatgcatgttgctgagaggtggatgcagtaactggcctagcacttggggaaggagggagttttgagaggtatgtaaaagagttgcactattgcaggtgataacaattatgatgatgctgcatgtatgagaaggagagtgtgtgtatggatatcaaacagcttgggagattatagtggacaataattgttttcacctgccagtatcccaagtttcctttataaaaactttcttccgcgatgcttgagccagacagttctagaagggctgaacctatacctctacagcttggttggcatgtaacccaaaattgtgtgtaaatttattccatcttctcggctcagtgaatgatttaggaaagcttacgtgatccaagtcagatcaatagagtcagccacagagttctgaaggaatgattgggaaagacacattctttccaagggattgcttggctggtagaacgtaagtttacagctctcagggcctaacctgccaccagggagagaatgcctgaaaatgaagctcggggaaaggaaagcaaagtaagaacaagagtaagaaagagaatgagagccaataaatatcctttttgcttagccatttggagtaggtgtagtctattttgtctggagctcagcacctgtgaacactctccttttggttaggaagtttctttcctccccaaattagatatcagaaattatgctttcttcaccccccttgtagctagctgggcacaagcatgtgactcaggccccatcagacatccttgtgaaatttctttgagatgagagcaatgtgagaaagtaatgccacatggaatccatttctgccagtgagagtgacaccactgccacttggccttcagaggtggcattgttgagttcctataacagggctggcagtagtgcttgtgtcagtaaagttcctgctggcggtgcaaaatgtagcattgaatgctgggaggtgaaggcagtagcagtgtcttcaggctagtcctgacaactgtttgtggtggtatcctggaagttcatccttgagcctggctctctagccctcctggcaattctgcgacctaccaaatatcctttaatagttttctttttggcttaatcaaccaattagtttttgtcactttcaactaaaacttctggtactaaggtaaaaatcagtaaaaatttgatagagatataaatcaatgaatgaatggcaattctgtgaggtatatattatacttccattgtacagaggaaaaattggctgagtaatattggaccttgcatcctgtccaaggtcacgcagctaataaatcctagagtaaagatttgaattttgctcttttttgaatgcccgaagttcacgtttttgaaataattttgtggcagatagagcagaggggcttgcacagaattcattctacccttcttgtagagtgccttcctatactgcagaggctagaaaactaaaagtgacattttccagactttcatacagctaggaatatgattaggatccaccaataagatgtacttgtgtgaaaatttaagttagcactgagtcaggtaggaaggaaggcagtgcccaggccttcattttgatggtacgaatctgttacagtatggtttggggccaacagttgagtccacaattttctgattgccaaattgtggcaaggcagtgtgatctaggatctggtgagtggtatagtggtttcctgatccccagcttccagattgttgcagagatagttctctagacaggtgagctctctagtgttgttctggaacccagtccacagcccactcctccagcccctgtaactgtgggcatgggattccctgtagccaatcctttcttgctaaaactactagaatggtttctattatctgcttctgaatcttgtttaatacgagcatggatagaggtcaaatactacataacaaagcagcagtacacagagattcttatcgtttctaagccgcaattaaagagaaaaaaaaggatgcattcaaggtaaatttatgtatttcagtaataagcaccatggactttgtggtcttgccacacccgtaatccccagaaactgggtgtatcagtcagcgtaccaccggcaggaaacagaaggctcattcacaatggaaactctggggagactttaataaagactagttttggccggatgcggtgactcatgcctgtaatcctagcgctttgtgaggccgaggcgggcagatcacttgaggtcaggagtttgagaccagcctggccaacaaggcgaaaccctgtctctactaaaaaatacaaaaaaagaaaaaaagaaaaaattacccaggcattgtggtgggcacctgtaatcccagctactcaagaggctgaggcaggagaatcacttgaaccccagaggcggaggttgcggtgagccaggattgtgccactgcactccagcctgggtgatagagtgagaccctccttaaaatataaataaataaataaataaataaataaagactcgtttttacttatcttttatttctatttatttaattttttagagacggggtctcgctatgtgcctaggctgatctcggattcttcccaccttggcctcccaaagtggtgggattacaggcatgagtcaccatgcccagcctaaacgagtttttaaaaatatagactgggcatagagaaccacaggggtcgtacagtgcccctagacctgaagcaacaagtggaggaatctattatggaaatttgaagacagctaggtagagagggtgctttactggagctgtgacctttggttgccgaatgcagtcatggcaacctcacaggcaaggtgcagggagggagcaaccttacactcaactgttttttcaaacttctgcacatttgctgagctcacctagaagccacaggacacaagcgtgtgctgtagtccttataggacagtctgccagggtggagaaagatggaacgtggatctaaagggcaaatgggagatatccagcacaccacgtgaaaaaattaacaacctcagtgcagtaagagatcatgaagaacgcaggctgaagtattttatgctcctgaatttataatgttcacagattaaatttattctttttttttttttttttttttttagacagagtctcactcttcgcccaggctgaagtgcagtggtgtgatctcagctcactgcaacctctgcctcccgggttcaagcgattctcctgcctcagcctcctgagtagctgggattacaggtgcgcaccacccccagctaattgttgtatttttagtagagatggggtttctccatattggccaggctggtctccaattcctgacctcaagtgatccacccaccttggcctcccaaagtgctgggattacaggcatgagccactgcgcctggcctgagtttattcattctttttaaagatagtcaacacaatctactcatgtgatttgaggtcgttttgcttagtttagcacacagtgccgtggagtatgagaagtggaaagcactctagagatctcgctgaacacccttattccatagatgaggaagtcaagacttaggaacatgacacaaattcctccaaagtcacttatccaaagttgcataatcagcatgcacacccaaatctactgatgcccagtccagagcttcttccactattggcagctgaaatccatgctggacgtgcaagttgtgctcattacaaactgccagactgtgatacagctgtggtctgagcctggagcatccctctgccttagtcttattattctcttcattttaaacatttacctgagaagctgaattccaaagacacttttcctaaaaataactcaaagacatgcaggaggaaattagcatactgtattttcttcagctataatttacagtgtgtaatctaaaaatgtgcaacaaagcaatgctagtagtgcagagaaaattcccctgggatatttggttccatttaaaaacacctcagtatgggggggatgtgggagcagcagcctgtgacacacttccatcagggcaaaatgttattccagtgattcacagccagaggcctgacaaacactttgagtcgatataaaggttcttgccatcaggataaaaatgagaattgcagtgggtggtcccattctagcctcatgtctccttctacttctgtcctggcttaggtggttgccctggaaacagtggggtagcaaacaaaaccatttggaacaacttttagaaagccttatgtacagaggcctgatgtttatttgttgctgccttttccaaaggctttcttcccctgagagggtgtgcttcttggactaccttgaaagctagttcatgttaaagtctttggcaaggtccagttggagggctggccagagtttggcagagaataggagaaaggggctttgcttatcattattcagctttggatccccacacagatggccctgatctcctcctcccccacctaagaatttttctaaaatgacacccaagtttttcttggcagaagttataattcctggcaaacagttcactgcagctctaattatgatgacagctttaatggagaagataatcatattaaatggttcttattcacttccatgtgatgaattagtgattaccataaaatgtgttaagcagctaaaagtaaggggaagggataatgtactgagctacaagttgaggttttagggattccaaaactgggtaggagataggataaaatgaatttcatcagataccaggggtgatcaggtatcaagggagggtattctcaataaactgacttggcaggactcttcctaaaactacaccaggcaggccaaagacaggatggggaccaggggagaggcctagtcgagaagagggttcaggggaacctgactaaagtttggtaaagaagtctttatcatatccaccacttgtacaacatacttttaaatactgtgactcagatacggaaaggtaagaatgaaaaggagggaaagaggaaaggaagaaaggaagggagggaggaagaaaggaaagtttgtaaaattgccttccgaattcaggctcttctgtacgttgctacaaagttgtctggggtggagggaacacatttggtctttgaaacagccaaaggacattaagggccagtcttaaaaataaggaggagatcaaactgagtaacactgtatgactataaagcaatgggctggtggttcttgtgtggtttatgaatagggtgaccaaactcaatccattttgcctggaactttctcagttttaggactggacatctccctcagttccaggtaaatcaagaagatttgcctaagactctcccagttctatagccccacattctggaaaacagaaataatcagtcaccctattcatcaaaagagctctgaaggtagttcctaacaagaagttccaaaatcatttagagccatagcacctgacaaactaggcttccaatataagggttgttcagaaaacaaaaacaaaacagcctcattcatttagtcacatattatgtgagaaaataaatattcaccctgactcctatttaattagaagtacctttacttagatactttgattcaaatacagggcccaaacacctctccacaaatgtttggttgaagaaagcttatttacctaattagaatatttatgtgccatcatgcatgttttatttttatattaatatatctctttgtgttttattacaaaaatcttgctttaaaaaagacattcaaatttgtttttcattcatctgtaagctacaatacatgtagttactatgtgtagtaatcaaagtgtgtgtgtgtgtgtgtgtgtgtgtgtgtgtgtgtgtgtggtcttccatgaggaagcaaccttctttatcctcatcttctctaaaccctaattcatttgtactttcactcattttcccaaggaatatgttattcctttagaagtcatttttaatggctagagaaagataaagaaggctaaataggaaagccttgctcagaaagccctgttgctcctgctgctgctttgaataacaccttatggttacactatgttatccttctaaaatctactttacatggtttctcatatgtgtgaagaccttcatccctgagaagtgagggcctaggcaggctgggaagagatatggtagctgggagcctgggacatgtctgaggctcattggagctgaagaggtagagattcaggggaagcattctacggagaagctgaatttaaaaccatttgggcagtaccaaagaaccatcttttctaaaaggttgggtagagacagagtatccatccaaatatgaggacaaactgggaaaatccattgtgagcaagcaagtttaaaacacagcacagagggagaaggtaaaaaaaatatttaaggtaggtttcttaatttttttataggatgccagcagccttagcctgatgtgggaggaggctctaatcaggtctggctcttcttccacattccactccactgggtggtgtttttcactgggtgactacaaagtcttaacatgtttaggtgggttcttagttgaggtgggagcgtttcatgtgtttgcttctctagcagacatcctttctcaaggacaggtaccagatctggcagtggcacttctgagaatccagaaccttttgcaagacacgtgggctcttctaactcagttgtcagggtaaattacttggctctgtgtctagggcagagtctcagtgaactgagctagcatgagctggctgaaacagacctcatctctgcttttactaagaaaatagaaacaaccacaagacaactgtaacatttcccaccagcattctcattaagttttgcctttccttccttgatgatggaaaaactgtcctagactcttagtcctcctagaccttgtgacttaagccctggattccccatcacctactcaaaggctttgctcttttcatcaatcactgtctccaccatctctacatctccactctctgtttgatcattcccatagcagatacacatgctataatatctcctgtctttaaaaaacctgtcttctctagaattacaccctcctccaactactccctcctgcttctcaggcctccttacatcatcatttctaaagcaagttgtcaatactcagtgtctctccacttcctcatttcatggtctcttttcagtcttctccaatcatgtttgcttccctatgattgcactgaagccattcttctcaggatcaccagtgagctctacatgtcttaaatcctctgaacaatttcccagcccttctcttacttgacctctcagtggattttatttcacttggtgaaccacctggaatctgagtcaacgcactgtctcggttttcctcctgtgtccctggattggcctcttctgagtctgctggctccttcctcttattcctcattttttaatttctttaaacatcttctgttctttaaatacactcgttcactttataggagatcttatccagtcccatggctttaatttctgtctctctgtcaataactcccagatctatattctctagccctgacatttcccctgagctccagacttaacatattctgccacctacttgacatttccattagatgtctaataagcatttcaaattgaacattttcaaaatagaacttggtcttatctcccaaacctgtttttcttacagttttatacactgcagctcctggctttaccattcatccagcagctcaggatatagacttgaggctcattcttgaccactctattcctcttacactcacatatcataaaaacccaattgtgtgggcccctgccagacctgactacctctattagtgatggccaggacgggctatcttcaaaattcccagcagatgatttccaggattagtgctgtagtcttccctcgtgtgtctatggctcccaggattgggtatgaaatggtaaacccaaagtgcttgaggaaggtgactctggtgcaaactgagttcccgcatctaatttagccactccaactctatgacaagtgattcttaatcccaaggaagaggagcaattatactctttcaaaagccggtttcctagagaaggaaacccagaggtggagacttcagggctgggtcttccaagcactagatattgctcatctcagtggatggagacattcacgtggactgggctgggtcaggtaggtcaggggaaggcaggaataccttaagtaaggcttgttaggagactgcatctgcatctgagaaccaagaaaagcctccatcccttttgagcatgtcaattattacaacagactatgaaaagaaatgtgtagggaattgtctaatgaattccaggaattgataaatatatttgataaatcatgtgggctcttcctctgggactacaaacacttgaagcataatgcagatgtctcgactggacagaatagagcccagtaattcttccattctcttggacatgtacttttcagggttggcctgcaggtggtggtgtagcccacagaggacttgaggacctgtctggacaaaggactcacaggatgttagatttagattcgtatattaggattttgtccaagtagctcatgcctccttgatcctgcatgagaagatgactagggcctgcacagccaaaatgacaccataatctgccagatcccccctctcccattgatgtcaaagctcttggaccagtaagctgggttatctacaacctcttccctgtccaggcagaggataagagaaaaactccctcccagatacactcaaaatgtacttcccacgtgaggttgctagtgcctttgaagagagggcatctgtgggttaagtggccaattcatcatggtgctggtgttgttgctcccagactcagtacatgaagttagcatcctccctttccccacacattctccacccctgccaaagccttggaaatagaattgctgtccatcactggcttggcaggaagccacacatatttgtagtggggtcacaaattcattcactctgtactcagatgtgcgaggaaaatatagcttctgtatttctccataactcatctactcatccacagggaattgggaaaaaaggaccctaaatttatccccttcagttaaacttagttcagctcaataattcagatgccttctttatgtaaattatctttagtttctttaggtaaaatacggtctttacattttctctccatctctttgttgtcctccaagttagtgactctgtctctgtttagtggggtctgtaagaatttagatgacccacgcagcagagatattatctgaatcctcactaaccaaaggtgaagtggctagattttctgtttactggactggtgaccactgaaggttgatttttctggtttggctttttgaggtaaagtaatttcctctggaatctgtgtttctggccatctcaaagtttctactcaggtacctctttgttttaaccagagccctttggcgtacctctgtgctctcaaaacctctgtctcatcagaacacacgggacttgctagatcacctgtacaacatcccggccatgtaagcccaggagtgatggctcaagctcatctatcaacccacctactataccacctcctcaccatcactccttgccaagactctggcctctggccttctcacttcttgtcttcctcatttcttccataatcccttggaactggaaggggcagtctttgggcaactcattcacccatgtactatctcccttccagggtagagcaacgcatatcatgacctagctttcataggtggtaaggttatcttcttttttcttaagaaaaaaacactatgagttgagggccccatcttagttcatggtatgccttaaatctgaatttaaaaatcctttctggacaaagcctaagtcttgctatagatcagtacgaacaataatcaaagcacaaaggtcagaaattactttgttgttttagagttatgctgtgcaatatggtaacagctccatgtgtctatgtaactttaatttttaaataattaaggtttttaaattcaggtcctcagtcatactagctacaatacaagttttcagaagccacatggggatagtggccactatgttggacatcaaatatataaaacattagcagcatcacagaaagttacatcggacagctattctagaggctgtctacccttttcccttttctgaggcactaaaacgctttttctttttggtgacggagtctcactctgttgttctggatggggtgcagtggtgcaatctcagctctctgcaacatccacctcccaggttcaagcagttctcctgcctcagcctcccaagtagctgggattacaggtgcccgccaccaagcccagttaatttttgtatttttaataaagatgtggtttcaccatgcttgccaggctgatcttgaactcctgacctcaagacccacgttgacctcccaaagtgctggaattacaggcttgagccaccgctcctggcctaaaatgctttttagatgggtgggagcttcccagagaaaaaacaattacttataatggccgctgctctgcactcccaagacgcgggttagtcgataaaccccacccacttccccaagtgccggtggtattcttctctgtttctcctaaggagaggctacataatttatggagcccagtaaaaagcaaaactttattcacaaattattttaagtttcaagctatcaacaccagagcatgaatccaagtacaaggtctgagggcgggtcccagtgtgactgcatagggctcgcacctaggaagctggccttctttgaagagaattgcacccaacagagatgtcaaggcagcactgtgggctcactggggaatttacttatgagcagcaatgccagagcccacagctgcactagtgctgaccaggctcagatgttaactctgacagctgcccagggaatgcctgtggctagatggagccacccagccaaaaagaagtgacaggaaataagggccccaacatgttgtattggaaagcccattgctggaagctctggacatgtcagctgcttccagctgggcatgtttctatcatagccagggttgtgtccagccaggaaggctgagacctgtcaagtccatcattttagaaactgctgaaggatggggaaaaggcaacacacccaggaactacggcacagagaactatggccagctttcttacctggactctggctgtgagcagagcatggtgtccaggagcctgtgtgcagaggaggtcttacctccccaacctgagagacaaagggatttgaggtggctcacgcctgcaatcccggcactttggaaggctgaggcgggtgaatcacttgaggtcagcagttcaagaccagccttgccaaatggtgaaaccctatctccattaaaaatacaaaaattagccaggtgtggtggcaggcgcctataatcccagctactcgggaggctgaggcaggagaattgcttgaacctgggagatagaggctgcagtgagctgagatcgcacactgctctctagcctgggtgacaagagtgaaactccatcttaaaaaaaaaaaaaaaagaaagaaagaatctactagtaagtcaagtagatggaaacagaggaaaccagacaaaaacaaaaagatgtgaggtggaaggtgagacttggaacttgtaaatagtctgtaagataagtaaattaactcccacagctttttagagtatagcagattggtacctacacatagaaataattggcaaaatgcagtaaaaaataacttttaaataaacagctgaatgcaaaaggaagaaaacggttttagaataaagagagaggacgaagccgcagtgggttcagcctgacttgaccccagctcagctgataggctcagtggttcttgtgcagaattctccttggatgcccttgttgctcatattgacccctggcttttggcctgggggacccaggccccaggccaccttctctgtttaggttcagaagctgcaaaagagaactgcctgaattccctgagacacaggctctggagacccaggagaagtccttggaggaaaaccttgaagagctactcctgccatgaagagggaaatagaaaagtccaaatccgcagtctgaaaaagtagtatggaatcctgggcttttcgtttctcccaggggtcttttaaattttaatcctaccttctaacttccagtatagaggaaaggggagaataaagaaaaaaacggctgggtgaggtggctcacacctgtaatctcagcattttgggaggccgaggagggcaggtcacttgaggtcaggagtttgagaccagcctggccaacatggcaaaaccccatctctaccaaaaattcaaaaattagctgggtgtgatggcgcatacttttaatcccaactacttgggaggctgaggcgggaggatcacttgaacccgggaggtggaggctgcagtgagccgagatcatgccagtgcaccacttcagcctgggcaacagagtgaaaaagaaaagaaagaaaaagactagctcaacctaatagaaagtagaaaagaataaagaatcaaagttaaagaataactggctgaaggaggattgcttgaacctgggaggcagaggttgtagtgagccaagatcgcaccactgcactccagtctgactgacaaagtgagaccctgactcaaaaaaaaaaaaaaaagataaatagaaaacacaacatgaaccatgtatcaataatcaaaattcatataaatattaacatattgaatttccctacaaaaagatggagattctcaggatttttaaaaattcagccaagagactacctagaacttgatgacacagagaaatgattatgtaaatagatggataaactgtactagaaaaatatttttttaattaaacgtaatattatcatctttttttaaactttaaggcaaaataaaagtaagggataaagagggccattatataatgataaaaggataaaaagataaaaataagaattcacattgaagaaatagtaagttggaacttcagtgtgtgtgtatgtgtgtgtacacacaatacattgtcaaaattataaagagaaaatgataaatgtataatcatagttgtagaagatgtaaagaacacaggtaatacctacacccaaaattataggaaacgcattcttttcattatttttgttgttgttacgggcagcctcctgagcaagaggaggctcagagattcccaggaaacacattatttctagcacacgtgaaacatttacaaaaagcataatatgtcaaaaagtaaacttcaaacaaataccaatgaccaaaatcacacaaaacattctctgacagcaatgcaataaaatcaaaaatcaatgtaatagtcacactgccccattattttagaaacttctaaataattattaaggtagaaaaatgaatagaaaataccaaatgtgtaacaccactcagacaataaaaacatgagtaccaaaacccatggcatggagtttaagcagtatttagaaggaaatttagagctttaaatgcctataatggaaagaaggaagcgtataccccaaaggtcaaaatgtttaaaaattagaagaaagaaagtagaaggaaaaaaagtcaaaaataagaggagaaatagccaaaaggggaaaaaaatcaataaggtttcatatagaatcaatagtattcataaatcaataaggattcatatattcctattctatatgaagacaatataattcaatcgattcaaaacctaattcttttagaggactaataaaatagacaaaacctggcaagattgattgagagtataagagaaaaaagcgggaataaaggacttgactataaatttttaaaagtataagagaatacgatgaacatcattatattaatacatttggcaatttaaatgaaatggacagttttctagacacatgtaaatcactaaaagtgacatgaaaaagaaatggcagtctatttatttataaccattaaaagaactgaatctgtagtttaaaaaatctatccattaagtactatgccaatcaagtacttacccaaagaggtgagttttaccaaatcttcaaagtttatttcctgtattgaacagactttttcattcagtgaagacaaaaataggtgagctctctttacttcttttgtaagtatatttttgatacccaaactggaaaaagacaatacgagaaaagaaaatcgttgttttttctcacttttgggcacatgtgctcaaatattttaaaatatcatctaattgaattcagcaatgcattaagacatcatattagataaggcacaaagcagatataataaaataattatagaatctggttggtgggcataagggtgttcaccgtacaggccaaatttttcgtatgtttgaagttttccttattaaaaccttgcaaaaagtaagaaacgaaatcattacgtatttaccacctgtaaaaacatatcatgacagaataccaagaatggttgaatattaaaaatctatcagtgtaattcacctcattgatatagatgataaattttatcaggaaaatgaggttgtagtccacttccagtttgccaatagctttttttcccataaattgctttttcatcaattatataattatataattgagcttggctgtgagtggcagaaaactccaaactatatagaattttatttctctcctaagtagaagactgattaggtggcccagagccaagttacttccaatattttgatgtttggtaagatctctgttcctaagatcacatcaagtacaatatgattgcgcgaattccagtcattacatctgcattctaggtggcaggaaggagaaaagggaggagtgattatgtttccactttaggggtactactggaatttgcatatatcacttctacttacatcccaatggcaggaactatgttatatgccctcacccactggaaggtggcattgaaatgcaggcaattttcttgacactgatgtctccaaataaaatagagattatacagaggcaaaaagggagaaccaatgtgagagggagggatcagcaatctctcccaagtataaagttaccaaaaacccacagaaaacctgatgcttagtggtcaaacgttagaagcattctctttagagtcaggagcaagtcaagagtgtctgttattacagcttctcttaaccattatattaatattaaaagtcctagccagtgccaatactctttaaaagaataagaattagaaagaaggggaaaaattgttcttatttataaactatctgataatttacattaaaaatgcaggagagtgtgtagacaaacaattcaaacaggaaaattcagcattctgaatacatgttcaggatatggtgtgagaggagaaaaaatttgtgtgtgtgtgtgtgtgtgtgtgtgtgtgtgtgtgctctcccatttagaatagatatctaggcagaaatatctgcaagacctatttaggcaaaattataaaacacgacataaaatatgcactggataaatgatgagacactgagggatggaaagataattgtgtcaatctggcagatcaccctgtgaatttataatgaatctatgaatcattgtaattccaaccagaatcccaacaaggcttcatggaatttaacaatctaacccaaaagttggtgtggaagattagacactcaactagcacagaaatgttcaaaaaagaaaactaaggagaggtgatttgccctaccaggctaattatacaaggttataattcttttaagaagtgcggctttggggacaggaatataaaaataggctgaaagggcctggcgtggtggcttacacctgtaatcccagcactttgagaggccgaggtgggaggatcacttgaggttagaagttagagaccagcctggccaacatggtaaaaccccgtctctactaaaaatacaaaaattaggtgggtgtggtggtgcatgcctgtgattccagctactctggaggctgaggtatgagaattgcttgaactcgggaggcagaggttgcagtgagctgagatcatgccactgcactccagcttgggtaacaaagcgagactctgtctcaaaaattaaaaagtaaaaataggccaaaagaatggaataaagggtatagatactgacaaatacatacatggaaaattgatatggaacagaagtctcttacatatcagcagggagtggcaaacattagctaagtggtcctaagacaactggctatgtacagggaaaaggaatttacatccccatttcataccacaacaaaatacatcctacatgggctaaaaaccttaaatgtatggtagggtgacagggggaatcttaaaattacaaagtaaatacaggagaatgtcttcattacattttcagttttcttaaataaaataacaaaagcataaatgataacagtgatcatttgaatacatttaaatattaaaattctatgaaacaaaagacgccagacacagtgaaaatgcaagccattggagaagttaattatagtatatattactgggtattagcatcaagagtatttttaaatctctataaatgaataagaaaaaagcaagcaatacagtagaaaatttgtcgatgatatcaacagttaattgttagaaggaaactaaacagccaaaaaacataaaagatactcaacttcagtaataaatgcaaattaaaaccacaatgaagtactatttcacatccatcagaagggcaaaatttagaagtctgagaagcccaagtgttggtaaggatgtggaagaaaaagaaaaaaagaacttgtaaatatggctggtgtgaatgtgtattgtagaaaatcacattggaggacaatgttgcaatatcaaacaaagttgatgagcacatgctaacctatgacctagcaattctgcctgtgggtatgtatcctaaaaaattctcacgcatatgcccaaggagaaatgaaatacattgttttttgtagcaccgtttttaatagcaaaacattggaaccaacctaaatgttcaaaaatataattgtggacagggctcagtggctcatacctttatcccagcaccttgggagaccaatgtgggcaggcggacctcttgagccccagagttcaagactggcctgggcaacatggtaaaactttgcctccacaaaaaatacaaaaattagcccggcatggtggctcatgcctgtagtctcagctactcagaaggctgaggtgggaggattacctgagcctggggagattgaggctgcagggacctgagatcacaacactgcactgcagcctgggtgacagaatgagaccttgtctccaaaaaaaaaaaaaaaaagaaagaaaaagggaaaaaaaagaatggtggatcaataaatggtgccaaagtcacacaatgaaatatcaactatgtatgtgcaaaatatgtaagaaccaggaaggaaggatacatgctaatttcaggatagtgattatctctgggcagagagcaatggaattgggcagtgggtgctatggttaaaatgtatctgtaatgttaaaacaaacaagcaaaaaactctaaagtcaggcaagatgtcaacattggttaaatctatgaaaaacaataagcctggatcatactgcagactaataagaaatgatttccagaactacttcagaagagtgtggggtgtggactaccatgtgtgtaatgctgaagaagaggatgagcttgtttgtgcagacttcctaatgacacaaaataaattggcaacagtgatggcctctgagggagagggacacaggagactggcataagcagaggaaaaagacctttacatcctttttctattatttgcctgttttatcacttgcatatattttctcaatagtaaaaaaattaaagcaaaaatatatttttaataaaaatgattcctaccgcaacaatgcacttaaagccaaaattacaattttgagggacattttgcatgaagtataagtgtacccttatgcttgccaccttcccaaatgactgatttttctacagcgttcctgataataagttccttatgatcagtcacacagaaacatacaccctgcctgctacatatgctttaactgtgcatctatttatatgggatgacagatactttccctaataaatcttgccattttccctggtaaggaactgtgtgctgactaaatggttgctgacacatgggagttattcccataatttcctcacacagtaagacaaatcaatgcaatgcagagctctgttacagacactaacagatttggagcatgtcagaaagtgggggggtatataatgaatccatgtttctagactttcctaccagagacagcttgaggcaatctgacagcaaaggcaggatctgaagtcctaaactcagacattttatctccgtgagctaatttacaaccaagagagccacaatactgtcagatctagaactcaactactttaaacagcgaccttttgtcttatattttgcattgatttttttgaagtgttatgttgtttgaaagctaattaccttcctagaggattaatttcaaaccttttcaaacctagaaccgctttagggaacaaaacaactgactctcactgctttcttgttatcccaagctggactccaagggccccaggccccacttggtgtaaggtatagaattctgctttataccagtttacaggtatcaaggaggcaggagagagactcagggtagtgaggggaaagaagatcagagtcatctctttttcatgtctttcatttcacaacttcttccttcccatgcctgctggtgcgctccctcgccttgttccagagccaaaagacaggtcaacttcactgctttttatccaagttggcagaggttgtggcagcggggtggtaactctgcccgatgttcccaagctgcagctgggacatgtccaacagcaaagtcactcagtaaacagttctctgtttctcttttcctcgagttggctggaatatctctaagccctagtaccacccactctttaattcaagacaagcccacagaccagaaacttcacagatcactctgtcttaaaacagtcttttgctgggtacaaaataccatgtataaaattattgatatgctacaattatttccattccaatccctatagattatcctttttgacggtttagtttttctatttttattaatatcccttgtacatcattcagttcaatattcaaaaacctccttagatgtttattttgtgcctagctttgtggtgatgtgggggagataagcaaatactgcacttaacagttacttattttaagatgtttacaaactaattggagagagaaaagccaatatgaagcaagtgataactaaagaaaaactgtctttaaaccctaaaagtgggaggaaatagcaaagacatgcagaggtcaggaaaactttaagaaagatgttggctggggctgggatttgaaggagtggaggttgaggagggctttccagatctcacaagatggttaagcttcagaggctgatctcagcagaacatactgtgggactgtcagagaccagtttaataaagcaactctgacaccagaaaactggtaaacaagcaagcaaaaaaaaccaggaacaggtcgggtgcggtagctcacacctgtaatccaagtactttgggaggctgaggcaggcggattacgaggtcaggagttcgagaccagactggccgatatggtgaaaccccgtctctactaaaaaaaacatacaaattagctgggcgtggtggcatgtgcctgtagtcccagctactcaggaggctgagacaggagaatcacttgaacccgggaggcagaggttgcagtgagccaaaatcgcgccactgcactccagcctgagtgacagagcaagactccatctcaaaaaaaacagaaagaaaaagaagaacaagggtagattaataagttggctaagaattcattatccttccatatgttgagtactagagatcaaagggaactcatgaatcatgtcatgcaccttcatgccttcatttcacagatgagaacaccgaggataagcgactcaaaacaatttcaccatagcaggtcacaaattagtgccagagtggaaattcaactccagggcttccaacgcccatgcatcacactccacttcaaaaccccacactgttatgcttcactgatggaaggccctttggaacagtgatatactaatagtaacaaaataataaattccaaagtagaggtattatagaagggataaggcttattttgtgtacagatatttctaagtttttcttttcttaaattgcactagctattatatcaggtttcacctcctctgcttttgacgaagtcttccatggccctgcctagcctttctgaccttatttcccaacactccctattctacaggctccactcaagccagatgtgtccattcatagtccccagcttttgctaggctcgtgcccatctctggggtgttgctcctgttttccccttttcaactttcaattgatataaaacccaaggctcagtgaggacctttggctacctcaagtcttctctggactcctatttaatttaactcattttaataaaattttatggaggacctgctgtgtgtcaggcactctacaaggcactcaggactcccaaataagtcaggcatgggtgccaccctcaaggtacagaggctagaaggggaatgcaaacatgaaaaaatatcattaccacccagaatcataaaaataggtacaggaaatatagagacattctggtctagtagatggaaagggagaagatctcatggagagagtgaggtctgagatcagttagtagatgagtggaacttcatcagggactaagttgggggaaagggaaggaaagggttattccaggaagaaaagactggatgtggaaacgcacagcatttatcaactttggtttggctaccaggttctgtaccaaactaggtttgagtttggtactaggatttggtttgccttcaaaacagtaggtacctagaagagctggtggggaaaagacaagagaggtggtcaggactgaactgcggcctgtagatgataaagagccaaagacatctgaagagggacaatttaaatcaaatgtttgggtggtttgttcacaggaatatgggcccgaccttatattcaagaaatcaatgaagctatagaaaggacagttctggagacagatcctgaagaatgggtaaaatttcaacagactgaaatggaggggaagtcattacattattagtggagacagcaaagcaactgtttatttgttacctgattgttctgggtacactaatttttactcctgagacatattacctaaattcttcaaggacaggaatcatttttccaactgctttttaatagttccaagtagctaacacagttctggatacacagtgggtgtttagtcagttcctaataactgcttggggtgtggccaaaaaaaggaagaaagaaagaagaaaaaccctcataatatttgttcatgacagaagctcatttttattcttaaatctgttgctaagaataaaaatttttaagtttttataaatccaaaatttcatatttgaaacaaagacggtgtatataattggaagcttatggttgtctaataaaggacagaagattccaattaaagccaaaattttatctctaagcaggctttctcactgtgtgggcatcccaactgctaagtttgtttaatagatcaaattaaatggatgactgcttttgaagggcatcttagggacttgggacttagctttgctttggtgctagtttacctaagctcactactgaggggattatttggtcttattatcagaaagatcacttttaaatattggggcgagtgataatatgatataaatacttcatatatgtgtgtgtgtgcatgtatgtgcacgtgtgtgttattttttcttaatgagaagcaaagggcactgggtttcaccaattctctttccctcctctacctctgatcagactctgaaaaataccctgcttcttcaacaacaaatgttttaagtgcaaagggtaaattttgttctataaagataaatgtactttttatgcattccgcagtgctcatattgcattacatatgttatttgtaactcataagtagtgagatactgtcatgcaggaatgatattctgaagagttaacaatggtacagcatagacaccagccattcagaatggactcctgaataatctggaaggatgccagctggctcactggacctgcacatcccagctacatctcagctctggtgtagtagactgttaaacctgcttttatctgtctctacttcccttccagtaacagccacacattttcctttggagaactgcactccctgaaaggaaatggccagcatgggactctactttccctaggacacaaggccagggcatgcaatccagatttagcaaataaagacatagtttaggccaagcagagtcctcccccggacttttcctctggagttaattgggaagattttctctacttcggagattactttgaaggatgtgagcctgaggcatttggaggctagccatcttgcctttgtagaggataaatcctaactgaagactgaagtcaagaagaaataagtgaacctgagaaagaaagagagaaacaaagtcctgggaacatggtttgagtctttggaacagctgtgcctacagccagatgcaatctcccgaacttcccagttactcaaatacattttttcttctttttcttttttgtttttgcttagcattcaggtaagaactgagtaataattatgcccacataatatagttctatgtaatttccattacacaatgctgatgaaatcttggacttaattgaaaactctgttttttattagattgtcctaaggctccaaaccaatacatcatgcacctagaaatcatcatggatccttaatcaggagaataacaaaataaagaaaagtttgcctggcaagagatatgtggaaataatcaaaacaacatatgctcatagatgtattcaggaatatacatacatacatatatatatatatatatatatatatatatatatatatatccttaattttgaaagatgccagatgccatttctttccatgttagtataactgaaaagaactgttattgcccataccttaaaaatgtttggagattattctatactcttcacttaattatttgcaacactggaccatagatttacctcattcatttatcctataagcatattttaggaagttgttatatgcactttgctgttacaggctctagggaaaaaagatgaattaggaaattcccctatcctccaggagctcagattctagtgggaagcagaagtgtaaattgataaatggtgtgaaagttggcaaggcgagcactttgcctgctactggaggcttcttcctcctccatagaggcacagccaagagctggacacagtggagtctagcgggtgcacatggctccataaaagtcgctttcccagtgttccaggctaagctgttcagcaaatcatacggtcccggattttctggtatttcaggcattgagatgctttactattgctttgatgtttttaaagcaaaaaactttttcaatggaaaaataaagagttagtttccccatcattgatcaatgtagtcttaactttctttgcaaggccagacatgatctccaggaagttactgtggttgattaacacttcaaattataaattaaatttaaactctaaaaagtgtaattatgaacaaaatgcttgagagcacagagaaaggaaccattaaatttacattttcagtcactgtcaagcctctatttattcagagccattctttcctttaaaaggcactgtagctaggtctttggagtggattctgttacaagaaattccttgaagctgtctcattttcctcagtccctcactggaatttcataatgatttaacccatagctgaattcacttagaaattctcaggagctagaagccaaaaagacactgacaataatttctttcactatttttcttattttagttcgtggatctgtgagtgttgtttcatgtagtttggttttggtggatgattgctacacttcacaagtgaggagaaaaaataattcttccatttcttttcctttcctattctaactggcttttaaattatccacatgggctttcagattagatgttgcccaaaatggcttatgtttttttgctctggaagtaactcttataagaggaaaataaagcatttattttgttaggttatttattataaaggatttagtgcctgagttacaacttaaatgatttgcagactagagagcacctcagaaattacctattccaaattctttattctacaaatattcagacaagataaacgaattgcccaatttgcagagctagtcagtgacaccgccaagactagaactcacatctcagcaaggcattcggtattgctaagttccctgaccatttcgtataataactattacaaatcttcaccactgctttcatgaacctcataatactgcctccctatcactctggcccctgcttcacagaaaattggaagctaccaagcatgaactccagtttccacttttaaacttcctcatatctcatctcaaaagaagaatatcagaatattattacccttcagggtaatcttgccatttgtcatctgtgtcacactgtctcttttttttttttttttttttttgagatgtggtcttgttctgtcacgcaggctgaatcgcagtgatgtgaacatggctcactgcagcctcaacttcctgggctcaaacaattctcttgcctcagcctcctttgcagttgggaccacaagtgcgcgccactacacctggctaatttttttattttttgtagagacaggttctcattttgttgcctaggctggtcttgaacacctgggctcggcctcccaaagtgctgggattataggtgtaagccaccgtgcctggccggagtcccatctcttctaaaaccttattctgttaatgttaaacctcattctttcacctatatggggattttctctccatcagcctgttgtgttcaacacataaacatgctcaaacacttgcattcatagtgacattgtgccccattctggaagcattctttgttttcttttcatcatagccaaacttaggaaagtttccacagtcacacctcccattcatttcttcaacttcaaaaatttgacttttgacactactattcaaccaaaatgtttgggcaaaggccatctctgtgcctttcaaggatgtttttcaattttctccttttgagaaccctcttctcttctggatttcttattctcctcttaccactgggtttactttcaagtttttctctctcccttcattcattccttaatttctgatactttccagggtttcattcttagtacctttttcttcttattctgtattgcaaatgacaagtcccattgaaatccatgcctcagtccttgcacaaaaatttgtgtaacgtacaaatgtcatttaaaggaaaatatctctcctaagttttcaacattgatgaaaatttttaaattataatattatttagttacttgaatataaaactaaatgtaaattccttgtgttcacagggttttgtttttgctttcggttttggttttgggttttttcttttttgagacatagcctcgctctgtcactccggctgaagttaagtggtgtgatgtagtctcactgcaacctccacctcccaggttcaagtgattctcctgcctcagcctactaagtagctgagattagagacacccaacaccacacccagctaatttttgtatttttactagagatgggattttgccatgttgtccaggctggtctcgaactcctgaccacaagtgatccactgccatggcctcccaaagtgctgggattacaggcgtgagccaccacgcccagccatgttcatagttcttatacagtgatacaactaaaaacttttttaagtgaatgcaaatgaaactaaaattccaaaatactcataaaatgaagtgaacattaatttgtgtggttatgttgttttcttgaaactgaattgtcaacttacaatgtgaatataggactggctgctaataacatagttcctttctaattaaaatagagctgtgtgccatgtgatgattcagctctcccaccacttttctctgtccaaactactgtgaaaccttcattcccatgggcaagcacacagtgacaccattgtgtctgcacttgacctgtttgcatcattcacatattaaacctagctttgtgatatttggcaccagcaagattatgaacataaatatcaattcagacactgaagtaagttggcaatattcattcatgaggtggtcatccagataattcagattattgttgaaatgaaagcatgagtgtaagcatgaatgtaaaaatcaacctagtgaacacagaccactgaaaatataatcaaggaatctcagggatctgaggatcccaactttatgaatcccagatctgtatctatagcccgaaaccctctcctgagcttctgccctgtatttccaactgcctactaaaaatttctctacctacatgtcacctcagaggcaacatgtccaaactgaacttgttatcattccccacgcacacacccaccttaacctgtattcccaatcctagttaatgacataatcatctacccagttaccgaagccaaaaccttaagtcttatactagattctttcctctgcctcacctcctacacccaaatcttgttgatcctacttcctaaacttctttcgcatcaatagtcatttttcctttgacccagaaatcctactcagaaattatctcaaggaaataatttaaatattaatgaagcaacaaacataaaagcaaaattgttcacgccactattgtacttaataaggaaaaactgaaacaacatgaccacttaagaggaggagaaagattaaactaaataacataaaggttatccttatccaggagcaatataaaattatggttcctcgcagactaactcaaaaaaaaaacaaaaaacttttaaataaattttatcttatatatttaaagtatacaacatgaggttgtgggctgtatatagacagtgatatggttgctatagtgaagcaaataaacatatccatcatctcacatagtaacccattaattttgttgttgctgtttttgagcagctgaaaactacccacttagcaagaatcccaaatacagtacgattttattaactatagtcctcatgttgtgcattagatctttaggcttgttcatcctacacatctgctactttgcatcccctgacctacatctccccatttcttccccaccttcctcttccccgactctggttatcactgagcattcagaatgacagacaagagacagaacctgggcccaagggaggcagcctatcatattggactttgcataaagtaaggaatcccaaaaaagcaatattctcagtgagtgaactagaaaacatctactcacagaggaacgcagtaaggaaaattgcctgtctcagtcttggccataaataaaggtcagaaataagttattcttgataattcaaaactataagcatgctctcaggtggatttagtgacagaatatacagaatctgaatgttcccccacaacacaagaaacaatttgtatttaaataagtcttaggttggtagtgtccccaggcatttagtagaaactgaagcaaatttctctcaagaaattcaatttcaacttggactttcaaaaaaccccactaacaaaatctcaaggaacataaatccataataaaagacagtgagacatgaagaaataagttatcagggacaagtctcagcctttaaaaaattgcattatcagactcacaaaagcttcagatataaaagttgatatagaatataaaataaacatttctaatacatttttaaataaaagaaaatatagccaaataatgagtctataaaaaatgagtagagtagtaaaaccaacaagaattttaagaaatgtaaaatatatttactgaaaaaaatttaaactatggtattgggattaaacagcagattagacggaggtgaagaaataattagtaaactgaaagataaatctggagaaattgcatagagtacaacacagaaagtcagagagataaaatatatgtaataaagataaacaaacagaatggttagagtgtgacgctctaacaaatatatacttgcaatactgaaagggaatgaatgaaaaaatgagggagagctactaatatttccaacataattaaagacataaatttttagattcaaaaagcccaatatattgcaagtacaataaataaaacagagatctagaccaagaccatcactgaaaaactatgacataccaaagacaaaacaagattttaaagctgccagagcaaagaaaaggatggtagatgtgaagtttgctagcttctcaactgcaacaaatagaaacctagaatattaaaaatgtcaccttagaattacatacccagtgaaaatatctttgaagaataatgacaaaataaatacactttccgataaagaacaccatggaagatgtattaccgacagacccttactagagggatttataagcatgtactttagaaaaacgaaaaatgatcctataaggagagtttgtaatgcaaaagaaagttgatggagaaaattttaaacaggttaagatctctaaacaggcatgactatataccatcatatttattaataatatataatttgtttgcttaataaaatatagaattaaagaattgagtaaaattgtttataatctaagaggaaggttatcagagttgaagtgtcctaaaaatctctcaagcaaattatgtctattgaaatattttgagtaatcactaaaatagaaatagaatatataacttctaaagtaagagcagaaaaagtaaaatgaagggggaaaaacttcatcaagctaaaagaatgggggatatgagaaaaaagaaacaaggaaacagcaggacattttaaaagctgcaaagaagattatatcaatcatagtcccaaaagaaacacatgacacacttgaactgtttacatgaaaagagtttagtgaaggaaacatttaatacggcaagggcaggtttaagggaaccagtaagggagagtgaaaaatactgagatgagcaagagtgggaaaccaatactaacccgaagcctggtagagaaagacatgaggactctgtcactgaagctcaataagaattggaaccaagaaagaggcacctcccaacaggagctaaagtcataacagactgcagccactgacagatggtagccaggtagggaggaacactgtcccaaacctatgggtttgtcctatttatgaacttaacccaaaaccagattgcaagggaacccagatggtgctgtagaggtcatcctcataggccacagagcagtgcagaggagggtattagtgaattacagggagtagtgggggacacaaggggttcaaataggacataatcagcacaaggaaaacagagataaattcaaatatatcaataataacaagtgtccaaatggactaaactctaagttacaatcaaagattgtcaaattgagtttttattttattttattttattttattttattttattttatttttttgagatggggtcttgctctgtcacccaggctggaatgcagtggcacgatctcggctcactgccagctctgcctcctgggttcaagcaattctcctgcctcagcctcccgaatagctgggattacaggcattcaccaccatgcctggataattgttttcttttgtttttttaagtagaaatggggtttcgccatgttggccaggctggtcttgaactgctgacctcaggtaatccacccaccttggcctcccaaagtgctgggattacaggcatgagccaccgccccagcccaaactgagtttaaaaaaaaacaaaaaaaaacaaacatatgctgccttaaagagatttctttcaactataaagacaaagaaagattaaaagtgggggaaaaaaagaaaaacaatgtatcagggaaataaaatccaggagaaagtgggtttaccatatacgatagcattaagacaaatatttaagaaaaaaaaatattagaaataaaatgaatccctagacattgataaaaagctatagtatactggtaaatatttaacaggctctcaggggaaggggaagacttatttctagtgtttttcaatttctgtggtgaaaatatccttaccttggccaatttcaagccaccaatgtgaagttaactgactcacaaaattctaaaaatttaacatcagctcttatgggttgcagctcttacgagtaaaagttagtttcagcatcttcactaaacaagtttcaattcactgggaaaataaagcaattaaaaacacatttgccaccatgctttatgtgatacttgattggaataggaatggagggaaaagctatattgggacaattgaggaaaattaataatagaatgtatattagataataatattgtatcaatgttaaatgtatttgatgagagtatacctatacacttgtattttcctaagatatactgtttatgtttgggggaaggaagtgctatgatatttgcaatttactttcaaatggctcattaaaaaggatatatggtgacactggttaaaattgtgcaagagagagcatcttcctctctctctccctggccctttccccctctcccccactctcttcttccacagaaacactgataaattgagcaaaattataggaatcaactttatcaaaactctggaaaaccgtcaaaggtttacagcaaaaaactgaacaccaaatcaagaaacaggcattaaaaatgccaggaagttttgcgaattttcacttgcctttgctccacctttgtcccagactcagtgacagtcttggagacagcagccagtgttggaccctgcactctggctccagagataaaagagcagatcatattcacaaagaatcgtgtttgtcttttctaacctgtctgaaagctacctgaaggactgacacaaggagcttgcctttgtttcacctaactcagacttactcatgggagaaaagtggctatgcagagagtattccttgcaaacattataagaccaataaacaacatgccacacctggaacaaaaaaattgcaattgaggcaaactatagatatgctgaaagcctggaaggaaaagacagggagacagtttctttggaaaattaggcattcaaaagtgtccacatacattggggaacttagaaagccatgtgcatacccaaggtagaacacatgctggaaaagacctgagaagatctatgtggaagatcagcttccacttctggctgatctctaggttcaatgcaagcaggaaatgaaggctacagcagagctataaacagcctgtctaaacattgaaggagtgctccaatacagagctgactaagagatatcttttcttccttttttcccttttctttctctctctctctcaatctctccctggcccttttcctcctctccccccttctctttttcttttatgtcaaccaagaatccagaaacacaaaactgtccttcaaaaaggagagagaaattaagatatttccagataaacaaaagctaagaaagtttgttcctagtgaaactgctctacaaaaatatactaaatgagattcctttaggctgaaatgaagacaaaaattggaaaccatatgaagaagccatataaagaactccagtaaaggtaactatataaataaatataaaactcagtgttattgtatttttagtttataactcctttttttatttcccacatgatttaggagataaatacataaaaattcttgtatccttgcttctcctgtgcttggtgcttaaataacaaaaaaagtaagaaaaaatcttatatatttttgttaatgggcacacaacatataaagatataatttgtgacaatcacaacataaagtatgggcagcgctgtatagagctatagagcagagatttttgtatgctatcaaagctaaatttggatcaatttaaactaggttgttataaatttatgaagttgattgtaacctctgtggtaaccacttaaaatttttttaattttaatttttatttattttttgagacggagtctcactctgtcgcccaggctggagtgcagtggcacgatcttggctcactgcaagctccgcttcctgggttcacgccattctcctgcctcagcctcccgagtagctgggactacaggcacacgccaccacgcccggctattttttttttttttttcatttttagtagagacagggtttcactgcgttagccaggataaaataaattttcaacatactgataagaaaatagaggagtttgaggctgcagtaagccatgatcatgccactgcactgcagcctgggcaacagagcaagaacctgtctctaaaaaaaggtcaagaaaattagaagggtattaaatgatacactacaaaaaaaaaatcaatggaatacaaaagaaggcagtaatggaggaaatgaggaacaaaaatggtataagacatacagaaggagtgcctggagagcagcaacagcccagctgccgccaccatgtccctgcaggctgattttgacatggtcacagaagatgtgaggaagctgaaaacaagaccagatgatgaagaactgaaagaactttatgggctttacaaacaagctgtaattggaaacattaatattgagtgttcagaaatgctagaattaaaaggcaaggccaaatgggaagcacagaacccccaaaaaggattgtcagaggaagatatgatgcgtgcctttatttctaaagccgaagagctgatagaaaaatatggaatttagaataaagcatatgataaattttcctttttgaagccttcataatggtatcatgaccaaacatttagagttaacgctgttaactctaggtatcatgtatatttttgctattattatgaattatacttaattagtagtatgctaaaactgcatagttaactaaattgtacttgcttaaaccaggtgtctttaaaagttcttttagaaaagtattttttttatttttatagatttagggggtacaagtgcagttttgttgcatgaacgtatcatgtagtggtgaagtctgggctttcagtgtccccatcacccagatagtctacaattgtgcccaaaaggtacaattgtacattccttacccccctcgaaccctcccacctttccaagtctccagtgtctattgttccacactccatgtccatgtgtacacattgtttggctcccacttatgggtgagaacatgtggtatttgactttccatttcggagttatttcactgaagataacggcctccagttccaaccatgttgctacaaaaaacatgatttcattctttttcttaatggctgagtggtattccatggtatacatataccatattttctttgtccaatcatctgtggatagacacttaggttgattccatatctttgctattgggaatagtgctgtgataaacctatgggtgcgggtgtgtctttgatacaattatttatttacctttgggtagatgaccagtggtgggattgctggacggaatgatggttctgcttttagttctttgagagtctccatatcgttttccatagaagttgtactggtttgcattcccatcagcagtgtatgagtttcccttttctctgcatcctcaccaacacctgttgttttttgacattttagaaaagtcttgctctggtagtatttacacaaaggttaagaatttttttaaaagacatacagaaaacaaagagcaaaatggcataagtagtactttcttatcagttattactttatgtaaatagattaaactttcaaatcaaaaggcagaaaaattagcacgatatgtttttggttttttgtttgtttgtttgtttgttttttgagatggagtctcgctctgtcaccaggctggagtgcagtggtgcagtctcggctcactgcaatctctgcctcccgagttcaagcgattcttctgcctcagcctcccgaatagctggaactacaggcgcacaccaccacgcccagctaatttttgtatttttagtagagatgggatttcaccatgttggccaggattatttcgatctcttgaccttgtgatccacccacctcggcctcccaaagtgctgggattacaggtgtgagccactgtgcccggccccagcacagtgtgtttttaaaaatgaggcaactatatgctatccacaagagactgagtttagatccaaagacacaaatcgtttgagtgaaaggatggtatttgggttaaattatgtccctctaaaagatatattaaagtcctaacacccagcacctgtgaatgtgaccttatttgggaatagggtctttgcacacataatcaaattaagatgaggtcattaggatgggccctaaatcaatatgactggtgtgcttataagaggaggagaaggctgggcatagtgcctcgcacttgtgatcccagcactttgggaggccacagcaggaggatcacttgaggccaggagttcaagaccagcctgggcaacatagcagttcaagaccagcctgggcaacacagttagaccctgtctctacacacacatacacgcgtgcacacacacacacgcccacacacacacacacacacaattagccaagggtggttgcatgtacctgtactcccaactgcttgacaggctcaggtgggaggattgtttgtgcccaggagattgaggctccagtgagccataattctatcactgcactccagcctgggcaacagagtgaggccctgtctataaaaaacataaaataaaataaaaacaagattttagaaaaaaaagagagagagaagaggagaagagacacagggaagaaagacgtgaagaaggaggcagagattgaagttatgcagctatcagccaaggaattcctgggaccaccaaaagctggaagaggcaagaaaggatcctgccacagaggcttcagaaacagcataatcctgtcaacactttgatttataactttaggcatccagaactgtaagagataaatttatgttgttttaaggcaccctatttgcaaaactttgttacagtgcccctaggaaactaatacagaatgaaaaaagatattccatgcaaatagtaacaaaaaagagtgggaatggctatactttggacttaaagccaaaaactgctacaagagaaaaagaaggtgattatgtattgataaaagggtcaattcaccaagaagatataaaaattatgcatatatttgcactaaacaaaataactcaaaaatatatgaaacaaatactgacagaattaaagagagaaatagagaattctacaatattatttggaaacttcaataccctactattaataatggttagaacatctagacagaatataagtaagaaaataaaagactgaacaacctagaccaagcttttccaacctgcagccccacaggctgcatgcagcccaggatggctttgaatgtggcccaatagaaaattgtaaactttcttaagacattatgattttttttgtgatttcttttcttttttttttttttttttttagctcatcagctatggttagtgttagtgtattttatgtgtggcccaagacaattcttcttcctatgtggcccagggaagccaaaggattgaacacccctgacctagaccaactagacctataaaaaccagacctgacagatatagataaaactctccacccaacaacacaataaacaatcttctcaagtgctcatggaacactctataggagagatcatatattaggccacataacagtctcaataaacttttaaaaattgaaatcaaaggaagtatatcctctgaccacaatggaatgctgctaaaaatcaataacaaaaggaaaactatttttattcacaaataacaaatttgtgaaaattcaccaatatgggaaatttaaaaacactcttaaacaatgaatagatcaaaggagatatcacaagggaagttagagaatacttagatataaataaaaatgaaaacaacataccagaaccaatgggatacagcaaaaagcaggggtcagagggaacgtcaagaaataaccatttacatttaaaagggcgcagtggctcacacctgtaatcctagcactttgggaggctgaggcagaaggaaagcttgaggccactctgggcaacatggtgaagccctgcttctacaaaaaattagctcagcatggtggcatgctcctgtagtcccaactgctcaggaggctgaggcaggaggattgcttgaacctaggaggcaggggttgcagtgagccgagattgcaccactgcacttcaggctgggtgacaaaggaggactctgtcaaaaaaaaaaaaaagagagagagagagacagagagattatatcaataataataataataataaaactcccaacaaagaaaactccaggaccagatggcttcactgatgaattataccaaacatataaataattaacatcaatccttctcaaagtcttcctaaagaagagaagggaatgctttctacttattctatgaaaccagcattgccctgacacctaagccaaataaagaaaccacagaagaatatgcaatatactcagcatatatgaatatagtcgcaaaactcctcagcgaaatactagcaaatgaaattcaacagcatattaaaagattacacagtgtgaccaagtgggttttataccaggaatctatagaatgtaaggatgattcaacatacaaaaatcaatcaatgtaatatatcaaattaatagaatgaaggaaaaacatgatattatgaactcaattgatgcagaaaagcatttgacaaaattcaatactctttcatgagcaaacacacccagaaaactaaaaataggaaggagcttccttaacataataaagggcatttatgaataacccacagctaatattgtactcaatactgaaagactgaaagcttttctcctaagatcaggaacaagacaaggatgtccactttcacaggtactatgtaacattttactggaagttctagccagagaaattaggcaagaaaaaagtaaaaacaatatagattaaaaagaaaaagtaaaactattcctttttgcagatgacctgattctctaaatagaaaatatcaaaaaatccacagaagaaataatagagctaataaatgaattcatcccaatttcaggtgtaatacaatgctcaaaaatcagttgtgttgctataaacaagcagtaaagaatctgaaaaagaaattaagaatacaattccactataataacatccaaaaaacaaaaataattcataataaatgtaatcaaagaagtgaaaagacatctacactgaagcattgctgaaagaaattaaagaggagctaaataaatagaaacacaccttgtgttggtggactggaaaactaaagatggcaatactatccaaatctccagagataacataattcctgtcaaaattccaatggccttttcacaaacatgtaaaagccagtcctcaaattcatatagctacaaggggccaaaacaaacttgaaaaagaataacaggccaggcgtggtggctcaggcctgtaatgccagcactttgggaggccaaggcgagtggatcacttgaggtcaggagtttgcaactagcctggccaacatggtgaaaacccgtccctactaaaatacaaaaattagccagcctggtggcaggcacctataatcccagctactggggaggctgaagcaggagaatcacttgaactcaggaggcggaggttgcagtgagccgagatcgtgccactgcacttcagcctgggcaatgaagtgagactccgtctcaaaaagaaaaagaataacaaagctggaagtcacacactttctggtttaaaacttacacaaatctaaagtaatcaaaacaatgtgataatggcataagaataaacctgtagatccatggagtaaaactgagagtccataagtaaatccatacatctatggccaattgattttcagcaaggatgccaagacaattcaatggggaatgaatagtctgtttaacaaatggtacagagacaactgaatatcacatgcaaaagaataagagggactccctatatcacagtacatagaaaaattaactcaaaatggatcaaagacctaaatgtaagagtgaaaactataaaactcttagaggaaaacataggggtaaattttcatgtccttggacagtggattcttagatatcctatcaaaagcataagcaacagacaaaatagataaatttgattttatcaaaatgaaaaacgtttgtacatcaaaggccattattaaatgaaaagacaaccaatacgagggagaaaagacttgcaaatcatgtatgtgataagagtctagtgtctagaggccaggcgcggtggctcacgcctgtaatccaagcactttgggaggctgaggccagtagatcacaaggtcaggagtttgagaccagcctggccaatatgtagtagagatggtgaaaccctgtctgtactaaaaattagccgagcgtggtggtgcatgtctgtaatcccagctactcgagaggctgaggcaggagaattgcttgaacccgggaggtggaggttgcagtgagccaagatcgtgcccctgcactccagcctgggtggcagagcaagactctgtcaaaaaaaagaaaaaaaaaagagttcactgtccagaatacatttaaagaactttaacaactcaataacaaaaagacaacccaattttaaaatgagcaaagttcttgatagctatttctccgaaaaagactatacaaattttcaacaagcacatgaaaatcttctgcatcattagtcactagagaaaggcaaatcaaacccacaatgagataccacttcatacccactaggtcagccataatagtaataaccatcattgtcatcactggaaaataacaagtattggtaagatgtggagaaattagaactctcacaaattgctagtgggaatgtaaaacgatgcacccactgtagaaacagatagggtttttttcaaaaagttaaacatataattaccatatgaccagcaattccactcctaactatatacccaaaagatttgaaaacagaaggtcaaacagatgcttttacacaaatgtttatagcaacattattcacaatagccaaaaggtattaatagaaatgtccattaacagatgaacacataaacaaaatgtacatacatataatggaatattactcagccataaaaagagatgaagtactgatacatgctacaacgttcttgaacttcaaaagattatgctaaatgaagaagccaaataaaaagttcccatattacatgaacagtctagaatagttaaatccatagtgacatattgattggtggttctcaagagctggttgggggagtgggaagtgactgctcaatagatacaaggcttttcctgaggtgatgaaaatgttttagagatagaggtggtggttgcacaacattgtgaatgttctaaatgccactgaattgtgcactctaaattgttaattttatgtcaatttcacctctatgtgaaaaaatatatacatatatattcatccatacacatatagaaatagagaaagcaatacggcaaacgttagtgtttcataaatctaggcaaaagatgtataaatgttcactgaactattatttcaagtttaatgtagaagtcagtctcatgtagaagtcaataaaatgttgagaaaaacttattcaaatagtaacttacctttagtataaatcaaaaattgacaaaatcacaaggagaaattgacaaatctaccatcaagatgagagattttaagaaactctcttaataattaacaggtaaagcagatttttaaaacttagtgaggataaggaatatatgaacagtttcatttaatagaaatacgtagaacattgtatccagcaactgcaaaaactgcaaccttttaaatacacatgtagtgcttatgaaaatggaccatgtgttaggagataaagcaagtcttgataaattttgatgcatcagtgttatatagagcatattataactataatactagtcacaataaataaattttgaaaatattcaaaaagttatatatttagcaattattcatggaataaagaaaaatatgatgtaagttttaaaaattgacctaaattataacaaaaatagttgagatcaaaacttgtagtaccaggagaaaacatatagccaaattttaggaaaaaaaaggtaaaaattaataagacttaattttatttattttgtacagacaggggtctcactatgttggccaggctgatctcaaactcctggcctcaaattatcctctcaacttggcctccaaaaatgctctttttctaatgttaaaagttaggtctggcagcaagccactgtgcagtgagccactgtatctggccagacttttaacattagaaaacgggcaacagaacaagatattaaaagtgagaaaataatcaaaatataaattaaagaaacggaaaacaaatacacaccaaagagcatcaacaaagaaaaaggttgtttttgaaatgccagccaaaattggcaaacctctggcaaggttgatcaataaaaagggaggcacgtattaaaatattgaaaaaattttgaaaactacagatcaagcataattaaaaagctaacacatgaatgttaagaaaatctttatgccaataaatttgacaacttcagtaagaaggacaacttcttagaaaatggacccccaaaaaaaaaacagaaaaaaaatgagatgaaaataggaaaacatgaatggtcttacaaccaatattgaaactgttggccaggcactgtggctcactgtaatcccggcactggcgaggcaggtggatcacttgaggtcagtagttcgagaccagcctggccaacaaggcgaaacctcatctctactaaaaatacaaaaagtagccaggcgtggtggcgggggtctatagtcccagctacctgggaggctgaggcacgagaatcacttgaacccagaaggcggaggttgcagtgagacgagatggtgcctctgcaccccagcctgggtgacagaatgagactctgtctcaaaaaaaaagaaaaagaaattgtatcagtaccctaaatcttttcacaggcatgtgcatgcatgcacacacacagacagacagacacacacacacacacacacacacacacacacacacacacacaccatagtaggcccaaaatgattttaccagtaagttctactggaaagagttaatttcaattttaatcaaatttttccagagaatagaaagaaagaaagcaattcccagttaatttacaatgatagcacaatttccattcaaaagccaagcaaaagtattacaagaaaaaaaatttcagattaatctcactcacgaacatagatgcaacaatctatgttaaatctaccaaaatattagcaattcaaatctagcgtctagattctagattctagaatctagattctttttgcaaaagccgttcatcatgaacaagccagctccccagccaaaacagccttgtttgtagttgcctgctgatttccatgtgtaaatactaaaacttgcctgctttcaaggtaccaatatgactttactgaatgcagagttggagagagatgctaacacttagctctcacaaatcactatcgtgcacgacagaggtaccaccaaataccaatggataaagttaacgagcctgggataattggctatctattgttttttaatgaaataagatgtctacctcatgccatacacaaaaatcaattgaagatgaactatggacttaaatgcaaattttaaacatttttagaagagaatatagacgagcatctttatgaccttgggataagaaattatttttacaataagacataaaatcactgacaataatgaaaaatatttttattacattaaaattatgaaattctgtccatcaaaatgcaccattaagggagtgaaaaacaccactaaatgaagtgatgaaaattcttgctgaaggaattttttcccacacaaatacaactggataccattttcttctgcctctttgggacccctgccataactactgtctctctcattctgtagcttaaatctcttctgtgctggattcttcctgaaacactccctctctttcttcttcacagtccagcttattgaaagattaatatacatttacttttgccatttagtcgcttttcaactcatttcttagttgagcatttacttctcattttcactgcactctggtttcttagttgacacagttctttctaaggtgaccactggtctccataagatgaaattcagtgaacgcttttcagtctttatctgacttgtcactctccagaagcactccataacgttgactatgcttttcttaaaatcggttcctccctttgcttctgcagctgtgctcactccctattcctcactccttctgaatattctctgcaggtttttccattctttctgcctcttcataccacccaccaaatttaactactttaaaatttatataggtatatgtgtgtgtatgtacatgtatatgtagaatatatgcttactttttaaaattccagaacatttagaaaaataaaaagaacagaattaaaagtatcagtaatcctaatacccaaagataagcattgttattaataataccataattgttatacatttctagaatttttctagggatatatatttatttttataaaatggtaactactatacataatggtgctttcatcacttaatattacatgcatactctctcatatcagtatagattaatattgttactttattaacaatagctaatactgagctttactaaagtcactctgctaaactctctatatatatatatttgtcactgacattaaaaacttataagatagaaattatattattcccgttttacagatgggaaaactaaggctttgataatttaagtaaatagttcatggtgtaatggtgagtagcactagtgagagctacccaagatttcaacctaagctaattccagagttgtacctgttttcactgcctatagagctttaccaataaggtcaattttacttgtaagtaatgttgatactctttaaaagaaacattaataattaaaaagtctggcattagtttcaaaattggtcatgaccattcaacagtgaaggctttgggtggtttctctgtgactctcatggctttctctcagagcctcagatagttacatagctccaagcaccacattcttacatcttcacacaaaatatccagagaaggtgaaaataaacagttttctcttcatacatctcttaatataatgtgtacttccaaaaaacacaaataactactttgatgtttcactgaccggaaatagaccatctgtcaactcctaaaccaaatacatggtaaggttaccatcatcaatcacaattcactacctgaaccgcacccatcttccttaatcatcttgccactcaatatcttcaaaaaatggcaattctgttagcaagggagaaaaggaaaatgactgttagggtggcaaccaacgtgctgccaacagtcattttaaattttacgtttgtaccatgatttaattaagcaatcccatgttgaaggatatttaagttgttgctaattttacactgttatacagaaagctgcaatgaacatatttgtagattttttcatacttttaaatctttccccaggataaattcctagaaaatttttgtatcaaagcaaatttttaaggtttgaaaaaatacatattaccaagttgcaatccaaaatgtatatgcaaatgaaagctctctaaaacagagtataagagcatccatttcttcacactttcaagaatgttaattggttttactattgctttaaatatttgataaaaaatagtataactgactccttttaaggcttagtttttaaatcacaaaagcaaaagttgcttattgacaaaaatgtaatagtccaaatatgtgaataaagaaaaaagtaaacatcctttccccctcccactgccgtcattctcattccccaggggttaacgatttttaacctgttgacatttttttaactccacaattgccagaattttttctatcttgttcttttctggatcactagttaatggcccagtttctgacatatactacatttaacaaatgtttgtaaaaataacatcataccttccattattttctagaatttgacctttttcacccaatagcatactgtcaatacctttctattcttgaaatatatacatatttatatatatgtttaattttaaaaaatatataggaagagtgttccaccatatagatgtaacacagcttatcaaactcctacttagattatcccatgtttttactatgataagcaccattcaaatgaataacattggaagtatacctttgttttatactgaaaatatttctgggaaaatttctgtgcaaatatttcaaatatttcccataatatattcaaggtcaaaagatatgtgccaattgctttccaaatgattgcaccaatttactttttttttttttttttttttttttaaatatgagacagaatttcactcctgttgcccaggctggagtgcaatggtgtgatcttggttcactgcaacctccgcctcccgggttcaagtgattcttctgcctcagcctcctaagtagctgggattacaggcacccgccaccatgcctggctaatttttgtatttttagtagagacggggtttcaccacattggccaggctggtcttgaactcctgacctcaggtgatccgcccgccttggcctcccaaagtgctgggattacaggcgtgagccaccacagtcggccatccaatttacatttttaacacgtgtttccctattctcaagccagcatttgatatcataaatatttttaccttttactactctgaaatgtaaatttttctcattattttaattttagacataatcacttaggcagtagtttaacattttctcataattggccatttgtatttcatctgtaaattgcccctttacattccttacctattttcctattagattttttgcgcttttcttatttatcttagggaattgttaatatagttaccatttgtctactatatattctgaaatattttctccccactttattatttgttcagtagcattgtgttatttttaccatacacaaattttatattcaaatctatctctttttttttggtagagtaccatggtgacttaactgttgtaactttacaacataatgttttgttatctggcttggcaagcccctcaccaaaacttcctaacaggtctcccggtctccagttccacccttctccaatccattttccatgctgtgatcagagatacttttattgaaagaaaatcttaccatgtgtgaaattccttggggtgaagtttgaaccctttaatttatcataacgatgtccacctaccactttggtctcttctctgcctcctttcctataatttattcctgattctcttcctttttgctgatgactcttcctcctgtctagaaacctctcctttgctttcccatcagtcatctcttacacccctaaaaactcagatcaagcttcactatccccagaaacattcctctgtgctctcacagtatccagtgcatagtgctgtcatacacctatcaaaccactcctacataaatgtccatggcaattttattcatagtaaccccaaacaatctaaatgtccatcaataataaaatttgtaaataaatgtagtttgtttgcatattggaatgttaaacatctatcaataagtaacaaactactgatacataaaataacacaaataaatcttacagatacaatgttgagtggagagaagagcagaccagacacaaaagaatacataatacactattcccccagtcatactggaaaacctaatagaattacatcaaactaaaaagcttctgcacagcaaaagaaacaatcaacagagtaaaaagatgacctacagagagggagaaaatatgtgcaaacaacacttctgataagggatcattatcaaaaatatataaggaactcaaacaagtcaatagcaagaagacaacctgattttaaaatgagcaaagaacctaaatagacatttctcaaaagaagacatacaaatggccgacaggtatatggaaaaatagtcaacccactcatcatcagggaatgtgaattaaaactacaatgaggttgggcgtggtggttcacacctgtaatcccaacactttaggaggccaaggtgggctgatcacctgaggtcaggaattcaagatcagcctggccaacatgatgaaatcccatctctaaaacactaaaaacaaaaattagctgggcgtggtggtgcatgcctgtaatcccagctacttgggaggctgaggcaggagaatcacttgaacacaggaggcggaggttgcagtgagcccagattgcgccattgcactccagcctaggtggcaagagtgaaactgcactcccccctgccataaaaaagaaaaaaagaaaaagaaaaacggggataataatagttcctgtcttgtcgggttattgtggtgattaaatgagatgaaacagaaagataaaagaatgaaacaacagggccgggtgtagtggctcacacctgtaatcccagcactttgggagaccgaggcgggaggatcacaaggtcaggagattgagaccatcctggctaacatggtgaaaccccatctctactaaaaatacaaaaaattagctgggcatggtggcacgcacctgtaatgccagctactcagaaggctgaggcagcagaatcgcttgaacccaggaggcagaggttgcagtgagctgagatcgcaccactgcactccagcctgagcaacaaagccagactcagtctcaaaaacaaacaaaaacaaacaaacaaaaaactacaatgagatatttatattacctcacacttgttagaataactattatcaaaaaagagaaaacacagcaagtcttggtaaggatatggagaaaaggaaaaggaaacacttgtgccctgtttgtgggaacataaattagtatagttattatggaaaacagtataacgtttcctcaaaaaattaaaaatataactatagtataatccaatcccactgctgtgtatatatccaaaggaaatgcaatcagtatgtcaaagagatattggcactcccatattcattgcagcattattcacaatatagccaagacatgaaatcaatctagggagccaggcgtggtggctcacgcctgtaatcccagcattttgagaggcagaggcgggcagatcacttgaggtcaagagttcaagacaagcctggccaacatggcgaaaccttgtctctactaaagatacaaaaattagccgggcatggtggcatgcacctgtaatcccagctagtccggaggctgaggtgggagaattgcttgaacctgggagtcggaggttgcagtgagccgagatcgtgcctctgcactccagcctgggcaatagagcgagactccttctcaactgaaaaaaaaaaaaaaagaaatcaatctaagtgtccctcaatggataaatggttaaagaaattcagcctaaaaaaaaaagaagcaaatcttgtcatttgcaacaacatggataaacctagaggacgttatcattatgttaagtgaaataaacaaggcacagaaagacaattcattgtatgatatcacttacatgtagaatctaaaaaagtctgaactcatagaagcagagattaaaatggtagttactagggagtgagggttgaaggttgatattgggaaaatgttgatgaaaggatacaaaatttcagttaggaggaacaggttcaagagatctattgtagaatatggtgactgcatttaataacaacatattgtatacttgaggattgctaagagagtaggttttaagttcttaccacccaaaaaagacatacaaatggtaaacaagcatatgtaaaggtgctcaacatcattgatcatcagagaaatgcaaataaaaactacaatgatcagcaccacaggaaaggtttaaaaaaatacaatgagatatcatctcaccctagttgaaatggcttttatttaaaagtcaggcaataacaaacgctggagaggatgtggagaaaagggaaccttcatacgctgttggtaggaatctaagttaatacaaccactatggagaacagtttaaaagttcctcaaaaaactaaaaagagagctaccatataatccagcaatcccactgctgggtatacaccccaaagaaaggaagtcagtatatttcttcactctcaggtttgctgcagctctgttcacactagccgagatttggaagtaacctaagtgtccatcgatagatgaatggataaagaaaatgtggtacctatacacaatggagtactattcggccataaaaaagaatgagatcctgtcatttgcaactgcatggatgggactggagggcagtatgttaagtgagataagacagcacagaaagacaaacatcacatattttcacttacgtgtgggacctaaaaataaaaataattgaactcatggagttagagaatacaagaatggttaccagagggtgggaagggtagtgaggtgcggtggggaggtgggtatggttaatgggtacaaaaaaaatagttagaatgaataagacctaatatttgatagaacaacatagggactataatcaaaacaatttaattgtacatttaaaaataactaagagtattattggattgtttgaaacacaaaggataaatacttaagggatggataccccattttccatgatgtgtaatacattgcatgcctgtatcaaaacatctcatgtagcacataaatatatacacctgccacatatccaccaaaattttttaaaaaataaaaattttaaaaagataactgtgaaataatgcatatgttaataagcttgatttagtcactccacaatgtatacatgtttcaaaacatcaagtttttcaccataaatatatacaatttttatttgtcaattaaagataaataaatagaagaaaaaaatgtaaatggtccaaacacacctaattaaaagacagaagttatcagattggataaaaaagtaaggcaataatatgctatctataaaaaatacactttaaatatgaaaaacaccaataggttaagtttaaaaatgaaaaaaaaaaagttaactttaacaaaagaaagaataaatgggtacattaatgaccaacaaactagatttcagagcaaacactgttactagagagtttaaaatgtcatttcataatgataaaggggtcaattaaccaaaaggatatgacattctaaaaacactattcacctaattaatacaagaacttcaatttacatgagacaaacattaatagaactagaaggagaaatagaaaatccacaattctaataaaatatttcaataccccctctcaataattcttagatcaagtcagcagaaaatagtaatgatacaggttttccaaacattatcaaccaagatgacctaattgacttgtatggacaggtccactaaacaacagcagaatacacattcttttctagtgcacatgagatattttatcaagataaacaatattttgtgccacaaaacaagtcacaataaacataataggatttaagtcatacagaaagcaaattaaacccaaaataagcaaaaaaaggaattaataaatatcagggaagaaatcaaagaaataaaacaaaatcaaaaacagaaaaaccagagacacaatcaatgaagctaaaggaaatgtggctggtgcctgtaatcccagcattttgggcggccaaggcaggaggatcccttgagcccaggagttcgagaccagtctgggcaacatagcgagaccctgtctctactaaaaatttttaaattagctggatggaatggtgcacacctgtgttcccagctacttgggaggctgaggtgggaggatcacttgagccccagaatccgaggctgaagtgagctgtgatcacgccactgcacttcagcctggatgacagagcaagactctgtttcaaaaaaaaaaaaaaaaaaggaggaggggaaagaaaaaggaaactgaaagctaccctgcaaagattaataaaattgataaatttctaaattgaccaggaaaaaagagtgaggacacaaattaccaatatcaggagtcagagagatgacatcagtatagatatccatagatactaaaaggataatgagggaatattatgaacaaccacaaactaatatatttaacaatttagatgaaggacagacacacgacagacacaaactaccaaagcccattcaagaagaaaaagataatataaagagataggtcgggcatcaggtgactcacacctgtaatcccagtactttgggaggccaaggtgggcggaccacttgaggccaggagttcgagaccagcctggccaacatggtgaaaccccgactctactaaaaataaacaaaaattagcagggcatgatggtgagtgcctgcagtcccagctacttgggacgttgaggcagtaggatcgcttgaacccaagaggcagacgttgcagtgagctgagattgcatctcaaaaataaaacaacaaaacaaaaatatgtatatctattaaagaaacaaaattttcagttaaaaaccttcccacaaagaaaactctgatccagatggctttattggtgaattccaccaaacatttaatgaatgttacattcatgaatgaacagttaatgaataattctaattcttcacaaatttccaaaaaattgaaaaggaaatactttccaactaattctgtgagttctccattaccctgatattagaaccacacagacacataacgaaaaaagaaatttacaaaccaatatccctcatgaacacagatgcaaaatgctaaacaaaatttagcaaatcaatcaatatttaaaaaggataaaacatcatgactgagttaggtctataccaggaattcaaagttgttttactttcaaaaaaattatataagacaccatataaacactaatttaaaaagaaaagcatatgatagtctcaatagacacgaataaagccttcgaaaaaatccaacatcggtttctgattaaaaaaaactctcagcgaactaggtataaaagagaatactcaatctaataaacagcatctataaaaacaaaaacaaaaacctacagctagcatcatacttgtaaaaattaaagctttcctctaagattgagaaaaagacaagtatgtctgctctcaccacctccattaaacatttaactggaggttgtaagcaagaaaaagaaattaaaggcatccagatggaaaagaaagaagtagaactgtcattatttgaagacaacatgaccatctatgtaggaaatcctaaagaatctacaaaacaggtactagaactaataatgagtttagcaagcatgcaggatacaaaattaatgtattaaaaaatcaattgtatttctatttaccactaatgaacaagtgaaaataaaaaaaaattaaaacaatatcatttataataacaccaaaaactagaaaacatttagggataaatctgaccaaagatgtaagaatcctgcatactggaaacaacaaaacattactgacactgattaaagaaaatctgaataaatgaagagatatacctttttcatgcttcaggaggctcaatatggttaagatgtcaattcttcccaatttgagctgtacattcatttccatctcaagcaggccttttggcagaatttgacaggctgataataaaattcatgtggaaatgcaaaggatctacaatcgccaaaacaatttcaaaaaagaacaaaaaatttggagagctaatgctacctgatttcaacacatatcgtaaagctacagtaaccaatacaatgtgctattgataataaagattgacaaagaaatcattggcacaggatggagtccagaaataaaaccatgcatacatatatagacaacagatttttgacaaaggtgaaaaggcaatttagaggagaaagtatactgttttgaacaaatggtgctaggacatggaagaaatatatatagccttgaattgtagagagtttcacagggcatgtcagatttggcagattgggctacataaaaatttagaattcatgtatggaaaagataacctaaactaactaaaagatatgcaatatatctttcgaagacaagctatatttaaaagatataccaacaggccagatggcatggctcacccctgtaatcctagcactttgggaagcagaggcgagtggatcacatgaggtcaggagttccagatcagcctggccaacatggtgaaatcccagctctactaagaaatacaaaaaattagccaggcaagtggtgcatgcctgtagtcccagctacttgggaggctgagaaaggagaaaggagaatcacttgaacctgggaggcctgaggtcgcagtgaaccaagatcgcgccactgcactccagcctgggcaacagagcgagactccgtcacaaaaaaaaaaaattaaattccataatctatcaagagttcctgcaaattactaagtaaacgacaaagaacattaacagacaaatcactggaaaaaatataaatttcaaataaaccaataaaaagttgttcaacatcattaataattacagaaggccaattattttcccacaatcttattattgaaactattaaatgtggataacactcccccaaatccagaccagttatttaatatgttttaggagtaggttgtcacttctctagaaacaggaacagaaacatgatcaaacttctgcttacatttgtcaatatgaccttgagaaaagagtatcagcgcactgcatttccatgctccactctgggcaacaacggaggtaaacaagataggcctccagtccttgtcagctgtaatgtattgtctcagatggacttaaaggcatattttctcttaattcaagggaagatgactcacctttccagagtggtctgtcagtgacatgctatgctagagactttgcattaattatttcttttaatctctaccacaaccctgcgaggtttttatggatgagaaaactgaagacgctatgttagcattccccagcctttttggcaccaagggctggtttcatggaagacaatttttccacagatgggggaaaagtttgtccatggcccagggattgaggacccctgctctacataaccagcgatatacttcagtgtccatgtttctttccactgcatcctaaagaaaggagttctcctctaggtggggggacagactagagtgtgaaaaaggccctaaaagacactcaatagatcaaaagtataacaataagtaaaagttccacataaaatgctgaaaacaattttaaccttgcatatgtctgtgataagcactgatgtttatgatgttattttgtgttgcaattttaaagtgaaaagaatgctggtgttggcaataggcagacctggtctcaaaccccagctctgctgcttaccagtggtgtaatcttggtcaagaacctgattctccacactgaactctgactttacattgtcactattgagtgcaatgtataatcctatgataaagttaatcatcatttgacttgtttgggggttagttcctgtgactatcttttcaaacaatattgaaaattgtgagcagctgtaagacaatcactttgtgtcactgacaacacttaaaaagttacttgtacattaagagtttaacacacatatttattagatgaatattttattaaacccaagacaagataggttgacaatactaagagctgacaaagacaggggaaggcaatctgggtaggagaacaatttgccagtgattactaaaaaaagtgctataaagaataagacccaaatgtctgccatacgtcctttcacaccttatttcatgcctccccaacccagtaccttgatcacttgactttatttcaatcctttggattaagagaaaacaacttaagaacagggattatgttttattcgtccttgaatcttcagaaatagcataataaggtgctcagtagatgactgttgaagtgaactgaatggtaacttaagaagcaagagattattatatgcagaatattcatctcaagagggaaagctagttttatgtattttccattgtgattcttttgtaagtagggaaattctatgccaaggactgaaaaaagcacatcataaatcatggttcagtccatctgagtactgttttaattttagcgcagcatgtgttgaacttcagtgctcttgatttacacattcctaatgcaaatatatcaaattttcaattattcaagggtgaattatcaaatttgtagattagctaggctttatgcttattctactccctttaggtacataggcctttgggcgccttctccttcttccttgtgcttgaatggcagtgggattaactcattaagaataaaggaaacatctgtgttgcttaaatgacagtgaggatcttgtagaaactcagtaccacctgtatgtagttctattactggtcataaattcaaataaaactgtcacagtattcaaaattcaatggatatttcttgaagtagttcatcagagaacaatttttcctcatgtcagagaaagaactaaatgaagcattttatttacaataataaaaaatgttatattgattcaaatcaccggcagtgtccacagacacatgacagaaagcggacatacacgtcgtggagatatttggccaatcacatttatcccagcttgactatgtctttcatttagtgacaggaaatctactatcagcccctatcacttcaatggtcaattaattaaatattttgattctattcacatcctttgctttgagccacttgtaatcatctcatagagggaagaaaaagcaatcatgtttataaattatgagcattttcaacacagttgaatgtaatttattctttacttcttacgtttttctatcactattaatacttcatgtaggtgtgaatataaaccttgatgcacacaaacacataactcccagttgaatgtcaacaccttcagaaagaaaaaaaaaagacttgtataaggaaaacaatggataagctttatgtgtgtgtgtcatacagtgaatgtatataactacacatacattcatgcattaacgatagggatgcattctgaaaaatccctgactaggtgatttcgtcattgtgtgaacatcatagaatgtatttacacaaacctagatgatataacccaccacacacctaggctatatgttatagcctattgctccgaggcttcaaacctggacagcatgttactgtactgaatactgtaggcaattataacacagtgtaagtatttgtgtttctaaacatagctaaccatagaaaaggcatagttaaaatgctgtattataatcttatgggaccaccaccctaaacacagtccacagtccatcattgactgaaatgtcattatgcacacataactttacgtgaaacagaaaacaatgaattgtgaagaaaataaacaaagtaattgaatggtgggatgcagagctaccatgtatagctgcatggattgtccactgcacaatttcaggaacagcagtcactctgactaccaggtggatggcgccccctggagttgtacaatatggcagtcttggtgaactttttttctttgggatttaaacatttgggtttatcaaaacgattagactgtgaccacagcttcaggtcacacttcctaatctcctagcatccttagaagtgacttgttctctcacaagctgatgtgggaaggagaaagaaaagtggaaaggataggaaaatgtatctatatagaggtaatttgacaataacaatagctaatattttttggaacttttattaggtgccaggtgtggttcatcgcactttgtacacattaactctttatttaattttttttttttcttttgagacggagtctcgctctgtcacccaggctggagtgcaggggagctatctcgactcactgcaagctctgcctcccgggttcacgccattctcctgcctcagcctcctgagtagctgggactacagatgcctgccaccatgcttggctaattttttttttttttttgtatttttagtagagacagggtttcaccatgttatccaggatggtctcaatctcctgacctcatgatccgcccacctcggcctcccaaagtgcagggattacaggcgtcagccactgcgcccggcctgtacacattaactcttaatccttataaccaccctagtggtaggtactattcttatccacatttcacagataagggaattgaggctcagaaatgttaaataactggcccaagaccatgttgcagtaagtggggaagatgtcaggtaggaatgagagagctgatagactcttctcctttgcaaaattgtgactatcaattgaaggtcaattagaggctccttttatttaaatttttatttgctcttcctaatataattatttttatgggaaaaagcagtctcttaggaagatctatcttcaatcataaagtcagatttgggccaagtgcagtggttcacgcctgtaatcccagcactttgcaaggcccaagcaggtggatcacttaagcccaagagttcaagaccagcctgggcaatatggcaaaaccctgtctctacccccaccaaaaatacaaaaattagcagggcctagtggcgcacacctgtagttctagtaacttgggaggctaaggcagaaggatcgcttgagccaggaggcagaggtggaggttgcagtgaaccaaggtcgcaccactgcactccagtctgggcaccaagtgagaccttgtctcaaaagaatatataaataataaaaataaaatcagatttaagaatgaaagaaaagttccaaatataattactgacaaaataataataaatctccagaataagcccccaaattaaagtataaaatgtctaggattacatttacatttaacacaaatgctaaagggataaagaataattcttaactgattagctagcactttctgcagatgtctagcttctagaatgagtaaacagaaatgttaggagatgagaaaacatcacagaggcactgattaaaaaaaagaaaaaaagagcagtaaataaacatagggagaagcagtcacaagaacttccacaactaaaggaaatgggaattggggtaggccatggttgctaatacacagcacaggagaccaagaatatttctatagtgagtcatcggcttttgtatacctaattgattccttgtttcataacttccagatatctgaatttctacacattcaacttactatatagaatcatattcatgttgaaatggcatcaactttgcatgaaattttagtttgaaaaagcaaatgaataaaattatgatgtcaaatgcagtaagaaattgcaacaatggtctttgtgtttttgctctcactgcccactccaatgctgctgtgttcaaataaattatttcagcaaataaaatatttagagctataaaggaatatggtaaagacaaagataaaataccatttgtaatatgactactattaaagctctggcttgcagattgctggcaaatagtctattttccagcttgtcaaaacaacccattctctgagcatgttcagagcttgcagaggtcttcatttataccagaatgggaattggagaaagaaaaacattttgaaaatgatctgcagaatacattgttttgtaaaatatctaatcaaatgagagcagcctgtcaaagtcaagaaatgttacttactcggctacaataggtatgatgcagaactggccacccactcaccagctgcagaaaatgaatttaaagtaagctggtcatttgtcctcagacaaagtacaactgccaaatattttatcccaatttgtcatccctgctctattccagtgaattccatcaatccaaggccagtcacagtgtttagtctctccagaacaataagcttaacccaacaggtttatttgtttaagtcatctggtgaaatcttttaaattacgccttgtttctaataccgcttgtattttgcattcacgtaagcttctgctgcagctgcttgagaagaaaaggaaaggaggcttttgctgagcagtgagaagagaatacatttttaaactttcctttctttctcctaaaattagcacctggcatatggaatattcagcaggtggctcagcagggagagagttactgtttttcttacctgccactgagatgtttgacattttgacttcataaggaacaagattcttgaggccatcagtgtgtgtgtgtgtgtgtgcgcacacatgcacacactcatgcactaatgggcatgttgagggaagtcccatagaggacttctggaggacagagtgtaagagacaggagctactaacagacaaagttatacaattaagaaacattaaatatcagagaggggagtacgtttcatattgttgaaactgaataactaattcaattcccactagtatcggagaataggaaattgctttgtaacttaaagaacttcagaaattacactttataatataataggaatgttctttgaatattgtttgaagactctgatgtaaagttcactgagataacttcccccagatgtaggaaaagtagctattgaatcagaattttacaaacatttataaatgtcaacaatctgtgtcatgtactattctaggcaatagagcatcagagaaaaaagtggagttccaaatgcgaaagatatttagaaagtataataaactaaccttggatatgggcagtgagggagagagaagagtctcagataatccccaagtctctggcttgatgactaggtgaatagtaggatcattaaagatgtctgacaagagaccactaattgcttgcctaatattcattctacccattttctatgtaactgacctatatagcattaatataaaagatagcaacatgcccagctaaaaaccacatttctctgtctccattacagataggattgtctaataagacataagcagacattttggaatggggcatccgtgagagctctctaaagtatattgaatagcagggtggcagcactttttctttacctttcttctttctgcctggaatgtcaaggttaaagcgcccacagctggtttgtgaccatgaggtaacttgaagataaaaaagcttcatggtaaggattatagaacaaaaaataggaaaggcctagattcctgataattggtgattcttcatactggaattagccctgggttaattagcaactgggttgcctaaccctagagttttattttgatagaaaaattaatctttactttgcttaagctgctgttatttcaggtctctgtttagccatcaaaactaatcctaaccgatactcaatgacagagaatcaagttgcttggtgctttttggtaggtgggagggttaggatgaagttcagttttggatgtattgcatactaagtgctggtagaatgaccaaaagtcacttggaaactcaagctggagatatagatttgggattgatccaaatgggaggctaatgtctacagcttatcatctagaatcagtggttcttcattttcttcagatcagtctatggtaagaacattctggttttcatttttaagcatttaacttgcaccttcccttgaatgcagggagtgcaggcagtgcagaaccataaaaatgagagtgcaagctgaaactgtgcaaagtgattttaataatggaggccgggcgcggtggctcatgcctgtaatcccagcactttgggaggccaaggcaggtggatcacgaggtcaggagatggagacaatcttggccaacatggtgaaaccccgtctctactaaaatacaaaacattagccgggcatggtggcacgtgcctgtaatcccagctacttgggaggctgaggcaggggaattgcttgaacctgggaggcagaagttgcagtgagctgaaatcatgccactgcactccagcctggtgacagagcaagactctgtcttaaaaaataataataataataatcaatggaacaattatgactatcctgtgacctttaaaatgtttgtcaaaacatgaaagctctcttactgtcaattataaatgtacagagaaatggaaaaaatagtaaggctattattttgtagtagtagtccctccttatctgagggtgatacattccaagacccccagtggatgcctgagaccgtggatagtaccaaaccccatacatgctgcgtttttcctaaatatatatgtatccatgataaaatgtaatttataaattaggcacagctaggcacggtggctcatgcctgtaatcccaacactttgggtggccaaggcaggaagattgctttagctcaggagttcaagaccagcctgcgaaacatagtgagatctcgtctctaaaaaattaaaataatgttctgtcataaaggacacaaattctctgttatccaataatctactaatctgaatcatcatctgttcattcatgcattcagtaaatatgtggtaggcactgtacacacatttggaatatattatatccatgaaaacaacaggcaaacatccttgcctctgtgatgcttaccttttagttggtagtcatggggggctgaaacaggaggcaacaaaaatgaagcctactatattatttgaggtggataataatgatgcgatgataaatgagaaaagtagagacatttaaatgcatgtgttaaaaaaaaaggattagcagtcttgaccagatgatgaattgatattacagacatactgtatgaacttgtaaatgtgattccctaagaaagacacagtatcacttatgaagcattctggctagatatgcagaacttgaatgtaatcatgaggaaacattagacaaatcccaaataatgaacattatattttaaaaaaggaaatattctacaaaatgtcaatgtcatatatgctgaaggttttgtgtttttttttaaatctcaatgttagggctcctattgtcatgaattctgaatttactaaaggaaaattatttatatttctatatttacagccaatttttttcttagtttatttagaaaatatctttttaagcacttgttatactgttttgggcactgtctttgcctgagttatttagaaaacagagcctaggcaaatttaaggaccagcactttattgagaggtgtaatctgaggacattaagagtgcagaataggtgaatgaggcgggaaaggagggtaaattaacgtaagagttcatttctgagctggccacagcttcattaaacagtatggtggggatctcttcaagaccgcgtgagtccaggagttcaaaaccagcctggccaacctggtgaaaccccatgtctactaaaaatacaaaaaattagctgggcatggtgacccacgcctataatcccagctactcaggaggctgaggcataagaatcacttgaaccccggaggcgaaggttgcagtgagctaagatggtaccactgcactccagcatgggccacaaagcaagactccgtctcaaaaagaaaaaaattaggccaaatgtggtggcacatgcctgtaatccccagcactttgggaggctgaggcaggagaatcacttgagcccaggagttcaagaccagcctgtgcactatctctacaaaaaaattttttttttaattagccaggcatgatggtgtgtgcctgcagccctagttacttggggggctgaggtgagagaatcacttgaggctaggagttcaaagttgcagcgagccatgatcacaccactgcaccaacctgggcaacagaacaagatcctgtctcttaaaaaaaaaaaaattaagaccaagatatttttaaaaattatattcattaatttaattttaaaataacagtgacaacatgaatacatcttggagacattatgttaagtaaaacaagccagacacaaaaagacaaacattgtatgattgcacttaagggaggcatctagattagtcaaattcatagaggtagaaaatagaattgtagttggtaggggctctggagagagaggaatggagagttattgtgtaattggtgtaattggtacagagtttcagtttgggaagatgaaaatttctggagatagatggtggtgatggtggcacaacaacgtgaatgtacttaaggccactcaactgtacaccaaaaaatggttaaaatggtaaattgtatgttatgtatattttaccaaaataaaaaataacagtaaaaaatcagtacattttaacacatatatttttatgtacaactatattttccaaaaaataattagtaagaagtggcattattttgcacttttgcaaatctcttaaagtttggtttactagaagataactgaggccgggcacagtggctcgtgcctgtaatcccagcactttgggaggccaaggcgggcagatcacttgaggtcaggagttcaagaccagcttggtcaacatggtgaaaccctgtctctactaaaagtacaaaacttagccgggcatggtggcgggctgtaatcccagctacttgggagactgaggcaggagaatcgcttgaacctgggaggcggaagttgcactgcactccagcctgggtgacagagcgagactctgtctcaaaaaaaaaaaaaaaaaaaaaaagacaactggattttcatatctatttctgttttcagtctatcatgatagttgttttggttacatatatgaagaaaatcttacctcacaaagatagatagtgggaaaaggaagaattacttaaatagccttttcagaaaattgtgaatagtattctttaatactatataaaacttgaaaagtggtagtttcttaaaatactggttcactatggccaggcacagtggctcatgtctgtaatcccagcactttgagaggccaatgcaggcagatcatgaggtcaggagattgagaccatcctggctaacacagtgaagcctcatctctactaaaattacaaaaaattagctgggcttggtggcacatgcctgtaatcccagctactggggaggctgaggcaggagaatcccttgaacccgggaggcagaggtttcagtgagccgagattgcgccactgcactccagcctaggtgacagagcaagactccacctcaaaaaaaaaaaaaatttggttgactaaattatgtagatctcccaagtgttgacatatttcattgtacatcagaaaaatcacatttgctgatatcaccaccacaaaaaagtcttaaagtaccgggaagacgttacgccccaggacagtgaatatacatttttcacaattcaaatttttggtttaaaatgcaaatgttacaaatgttaacaaatatagtcagttgttttcctcatcttacacaaccttttttttttttttgagaaaatatctgccagatacttaagtctaagtagtcatagtttgtccttggttactttaagtaaaaataatgttgcataaaaagaagcaaccagttcacttctcaactcaaacaatcacacaagtgcttttcttgaggcaatcatatttctgtatgccgcaatagtacttcacatgtacttcccatttcgtcacacagaatattaaaaagacaagtactaatttcagcaatctaggaagagaagggaaattccccaatctcatgaaagactaagcaaaacctatttttaatatgatgattaatgatgaaagactacatgtttttcttcctattgccgaaaacaaggcaaagatgtcttcattcattgcttttactcgagaatccagtcaatgtaataagaaaagaaaaagaaattttaaaaaggacaagaaataaaaggcatgcagattggacaagaagaaataggccaggagtggtggctcacacctataatcccagcactttgggaggctgaggtgcgcagatcacgaggtcaggagttcaagaccagcctggccaacatggtgaaaccccatctctactaaaaatacaaaaattggccaggcatggtggtgggtgcctgtaatcccagctactcaggaggctgaggcaggagaattgcttgaaccagggaggtggagattgcagtgagctgagatctcaacattgcactccagcctgggcaacagagcaagaccccatctcagaaaaaaaaaaaagaagaaataaaactgtctttattcacaggtaacatatcatgtacattaaatcccagaaatatctacataaaagctgctagatttaataaatgggtttagaaagctcataggatataatgtcaatatatataaatatatgaaactaacagctagaaactgaaatgtaaacaacagtaccatttttaatgccaccactgttagggataaacccaacaaacttgtgcaagatatgtatgctaaaaacagcaatacactgacaagagaatttgaagcagatataaatagatggagatacatacaatgttcaaggttctaaagatgtaatattgttaaggtggcaatttccacaaaacttatctacaggctaattgcactctcaatcaaaactgcaaactatttgtagaaattgacaaactaattgttgaatttatatggaaaagttaagcatccagaataatcagatgaatcttgatttttttccctcttatttttaaaaggcataaagatttaaaacaagaagagtttgaaaaacctttgtttgtttgtttgtttgtttggagataaggtcttactttgtcttcctggaaggagtgcagtggcacaatcatagctcactatagcctccacctcctgggctcaagcagttctcccaccttgcctcccaagtgcctggaactacaagagcatgccaccatgcccagctaattttaaaaatattttgtagagacaaggtcttggtatgttgcccaggctggactcaaactcccagcctcaagtgatcctcccaccccggcctccagtagtgctgggattacaggtgtgagccaccataaccagcaagacatcaaatgcataataagagaacaacattaggccaacaaattcaacaatacagatgaaaaatgcaccaaaatagtgcatttttgaatgcactaaatagtgtacaatgcaccaaaatagtcacaagaaaaaaacagaaaacctgagtaagcctatatctaataaacaaatggagtatgttaagaaaaacctttccgaaaagaaaacttaagggccagatgctttcactggtaaaaacatcaaagttacacaaatgttttccagaaaagagaagaggggagaatatgtttttcagaaaagagaggaagagaaaacaccatccacttcattttatgaggttaatttttatggactgaattgtgcctcctcaaactttgtatgctgaagttccaacctttagtacctctgattgtaatcatatttggagataaggtctttatggagccgattaggttaaaatgaggctgttagggtggggccctagttcaatataactagtgtccttagaaggggaaggacaccaggggcacatatgtacacagagaaaagaccacatgaggacacagcaaaaaggcagccatctgcacaccaaggagagaggcctctggagaaatccaacctgctaagaccttgatcttggactgctagtctcccgaactatgaaaaaattaatttacattgtttagacctcccactctgtggcatttccttacagtagccctacaaactaatacagtaacataagcttaatagcaaaacctgacaaagattgtatttacattttacagatcagtatcctttactgatatagaggcaaaatccttaacaaaatactaacaaatcaaatcaatagaatattaaaagagtaacacttaaagattaagtagggcttatctcgggaatgaaaagttagtttaatattttaaaattgataaatgaaattcattatattaacaaaaaaaggagaaaacccatatgatcacttcaatagatatggaaaatgcatttcacaaaaattcaacattgattcttgataaaaactttcagcaaatcagaaataatagagaacttcctcaaatcagtaaagggcatctataaaataagtacaatataattaatgatgtaaggctgaattgttttcccccacaataggaacaaggcaaagataccatggccactattctaaagttctatttgacattgtgttggaggtctcagtcattataagaaggaaagaaaaataaatggaaagaagatcaaaagggaacaagtaaaactgtccctgtttgcaaatgataagatttttaatggaaaaatccccgggaatctacaaaacaattactagaatccataagtgaatttcccaaggtcacaggatactgggttaatatataaaaatctgtttaaggcaaatattaaaatgtatatgcttatatactaacagcaaactactgaaaaattgaatttaaggagcaattccctttgcaataataccaaaaatataaaataattctgaataaatctaacaaaagatatttacattgaaaacacaaaccctcactgaaataaaataatatacaaatacgttgagatatataccatgtttatggaccaaaagattcaatattgttaacataacaattctccccaaattgtgccactggcaaaaggatagacatacagattaatcatgcaggcagcaaagtctagaaatagacccatatgtataagttcaattgagttttgacacatatgccaaggtaattcaatggtgagaggaagaaatagtagcctttttaataagtagtgctggaacaactttaatggacatcccctccaaaattgaaaaaaaaaatggactgtttaaaaccacaccatatgtaaaaattaacttgaaatggatcatagtcctacatgtaaaacctaaaactataaaacctatagaaaaagaacatgggagtagatatttgtgtctttgggttagacaaaggtattccagagaggacataaaaagtataaacctaaggaaacaaaatattcgtgctaatatgccagcagttttaaccatcactgctttcacaccatcaatgaaaatatcaatgaactgaaaaaggtaaataaataaaatctggccgggcgcagtggctcacacctgtaatcccagcactttgggaggccaaggctggcagatcacctgaggtcaggagttcgagaccagcctgaccaatatggtcaaaccccatctctactaaaaaaacaaaaattagccggttgtggtatcagatgcctgtaatcccagataatcaggaggccgaggcaggaaaatagcttgcacctggaagacggaggttgcagtaagctgagatggcaccactgcactccagcctgggcgacagagcaaaactccgcctcaaaaaataaaggaaaataaaataaaatataaatataaatacataaataaaattctaaattattatccacataatttttactcatagtctcccctgaaaattctcacagaccctaaggggtccatagaccactttgaaaataacttttttgcaacaattaaaaacaatgaactgctaacggatgcatcatacaggtacaacgttaaacaaaagaagccaggcacaaaggagaacatattgtgtaattccatttatataactttcaagaacaggctacattgcactacggaagaagtcagaataatggctacctatgcaggttggaggaagaagggaattaactgagaaagttcatgggggaaaggacttctggttctatattttgatttgggtaatggtttgtgcatttcactgtatgaatgtcaatgtcatactttaattaaaatataaaaagaatataaaccctacagaatagcttcctaatgaaacatttctatatttagaagtatttgattaagcatcttctaacacttttatgcaacaaaaccataggcaatgggtcaactttaggaaagaattcatagcactgagaatctggaaattctactttgaaaatgatggagtataacatttatttcgcatttaatatttcaattgttaagtacatttgtatttatatgtatttatttcaatagatgattagttccttaaaggtaggaatgtatttcatgtctgttatactacagaatctggtacacagtaggtgacattgatttattttctcattcattcatgcaataaagatttctttaacatttatgtgtaaggtgcttgctagttcctgggtatataatgatgggtcggtgtggggctcaataaattcctgttaataactgattgataattatcagctacatttcagaaaaagtataactctcttttctcctgaattccgagtacaggggcactacagattttaaccttgttgtaaaaataacgacacaaaaacacagagatgaattaactgacttcttagggtgatgcacttgctcatgagtggggcaaggattaaaatggttacagcttctttcctggactgaggtgctaggggaattcattcagattgattcgggttcatatttcatttaaatgctctcatttcacttctgctacatgcaccttctctgacttatatttcaggacctgcagtctgaattggtttacttccacttcagatgctgtcaagataaattagacaccaagggtccatgataccatctgaagcagaactgctattagtaggaaatatataagcagttttatatttcaatatagtgtagcacttttttggagaatgtactttctactaaaaatgaaagtgtatgtaacaaaccttggtgaattttgaaatgttaaaaaaaaattcaaattttattttactgtacattctcaggcaaatgtagtcaaaggaaggtaggtaacactaaatatttttatctcctttcaatgcatctacaaaccattctgttgaataagatctcacaggttcctgactgtgagcagagatagggtaacaactcggatgatacataagcttgcatcagatacagactccatttttgctgtaatcatccatccatagcctcgcctgctcagctgacaaggcatgttattaataaagcatattgtaccacaagtgcattcccctacatggtgtttatcttgttggaaactgtaatcgtttgaaacaatggcctcagtgaaaagatatgaaacgttatgagctatgtaaaaatcaaaataatttgtactaataatggtagttgtttgtgaaggattaaaacatagatgaatgcatagagttaatgactcggtcttgcttttaggtttactttttattctagtcctgtgagataaccttaatttcaagccaagcctggtggagagacaaagttcccccaccagaaattaaactccactttggcttacccaccaatgtctccctagcacatagcacagtactgggaagacagtcaacatgtaatatttgttaaatgaaagaaatgaataaatatgagtataagagaaaaacggaacacctttcaggttaaagccaagccattatcagagctcctccaggatgtgattcaaagaaatagaggtggactcaatctccaggggacaagtactcccatattgcttccctttcaccctctcccaattcagccaatgggactcccacattgccgagccagtggagaagccccaggtatagaatccaggtaggaaaagatgaagtatgccctttcccatctccctgcaccctccccaatcccacccaataagatctggatgtgttcttgcagttttcaatctgaattctcttggaacaattttaaaagggactagagctctcctctgatttttaataacagaatgccaggtagaacagcctgcatgtattttagcccctcaccactgtgagggtctaggagaaaagtaagatcttaggaagatagacagatggaaggccaggtcttgaaatggagctggttcacctctttattgagttagttaagaaagagtatggctgggtgtggtggctcacacctgtaatcccagtactttgggaggccaaggtggcaggatcacttgagcccaggatttcaagaccagcctgagaaacataaggagatcctgtctctatgaattttttttttgagacggagtcttgctctgttgcccaggctggagtgcagtggcgcgatcttggctcactgcaacctctgccacccaggttcaagcgattctcttgcctcagcctcccgagtagctgggattacaggtgtatgccaccacacccggctaatttttggatttttagtagagatggggtttcagcatcttggccaggctggtcttgaactcctgacctcgtgatccactcgtcttggcctcccaaagtgctgggattacaggtgtgagccactgcgcccggccccccaaaaaaatgttttttatatcagctgagcgtagttgcttgtgcctatagtctcagctactcaagagactgagatgagtggatcaccggaccccaccacatcgaagctgcagtgagcagtgagccatgatcacaccactgctctctagcctgagcaacagagccagacccttttgccaaaagaaagaaagagagaagagaggggagagacagagatagagaagggagggagaggagggaaggggaggggagggaagggaaggagacggataaatatagaacaatttagaggtgatgaagaagagtagatacagaaacattctgaggtagaggaaaggaaaaatgaaggaacttgttggggcctaagccacagccactttttttctggcaaaatttgatgctgttctgattatatccttccatgtgttcacaaagggtgatttctctccccagcgtgaggagtagattacgattagtgtcattcctcttacaaataatcagtttaggattcgtgtgtgacacaattatgcctagtgggactcagttctgctagaagcctctaaaaagggtttcccttcctttattgtgagatggagggagggagggggagagacagagagagagggagagagggagaaagggagagagagaaatagtattcctatactttgctactttgctggatgcccgactgtatttgacatcaagacaagcagacgccatcgtatagccatgaagggacatgacaggagaaattaccatcatgtgaagatggcagagcagaaagaagaatcccacttcaatctcggacaacttccctaagttatttgaccaaccaatagtggaaccacctttctccaaacttcttattttatgggataataaattccatatttttcaaatttccacctctagtcaggtttcctgttgtttgcacttttgttcatacctttttttttctactaaaggaagaagtgagggcatgtgttatgaatgtgaaatctggaagttaaaaagtttgaaacagatatttcagttttcacttatagcctccttccatcttcttccccctccccaactcctactggattcagacaagggccaggacacaaggctgaatgcaaaaggacccctcccttcccaagactttatctttgttcctagctcaagctcagtgtgtctggctccttcttcctcaaagatttgttctgtcccaggaggctcctcaatcgctccagtcaattggcttctagagccttgccctatcagttccacagatacatccacacgtctgaactccagccacagtttagactcaagtggggagctcccaccgcagcaccgttctgtacctgtaactagcaatggtttgtagcctttgagcagaaatagggaatgaaactgccgagaatttagggatggaaactggcacaggcatgggaaaccgtttgagaatgcaggagttagctgggtttactagattataactcttatgaagaccacatagcacacaactcagcatataaattagtcttaacacatatacattgaatttctttgaaatgaccaaattgtaggcagataaaatggcttccttttacagaatcttcccttcagagagtgcctttcaatggcaccaccttccctccacccaaaataaaaccttcaacattttcaccttaagtgaaatgtttataacacactttgaaatagtgagtgtggtgaagatagttctattcaatctgctacgaagaaacaagacacaaagatctgacttggccaccatccccgaaggcatccgtggcagaactgggatggtccctcattccccagtggtctcaagcgtttgttctgatgtccctgtatgtaattgttttgatagcaattttcctggttctctctcactagcttgctaactacgcatgtcaatcacattcaggaacaccatgggcctaagggtcagccacatctcaggagaatgtgattcaaaagaggacacaaggcataatatagcactttctccttctagcatgtatgtcagttgcgttgcggcctcgaaagtctgacaatgtgtaaagagagtgttgcattttttttccttcccccagatgcagaaaggaaaggatttatgaagtactctgaccacaattttaaagcaagtgagaaacccaacagtgtaagatcctcttactagagaacactcaatggtactgaaagagttctccacctaaactctaaagaacccgaagagaggtccagttttttcctcccaaagatccatctccagagcttcactccctagtccgttagggaagccgggacggtgggagagccacagatactctttctcctacggaacccttggacctcttgccccgtttccctgtcactttagggagcagcacgcaggagactagaggccagggtccaagcccgcagccgtagcaggccggacgaagaaagcgggccggaagggcagcgtcgcggtgctggaggctgttgctgggaggcgtggattctggaaagtgcgtgtgcgcgtccctggagcaccgcccgcggagccgattggcccggacgcgcggcgggggaagcccttggctaatctcctgccactcagcccggctgacgtcggcgcccgggatgcagcgccgcgaacctctcgccccgccgggccgggccgcgcgcggaaggacaaatagttccggcggcagtgccgcgcacctctacgcggctctgctcgccccgcccgggctgccgagcccgaggcaggggtggcgggaagtgggggcgggcggagcagggccggcctgtgcggctctcggaccccggctccgctctttgcggccagacgggtggattgcgctccctagggaagagtaattggcttccaggctccctccagccgggatcagcggaagtcggctgctaagcctgcagcctgggaggggcgtgtggggaggaaggaaaggtggggagcgccgccgggagggacacggtgaaaccactgtcctcttaagtgcctgcgtgcttgtttctgtacaggccgcatcgggaagctgggtatagagaaggattaacagagattgcaccctggtgacctttcccctcaggcacgtgactcttgccccttccaagttgtcatcctcattgtgaaattcacctggtagctgatactcaggagaggaatactttggaagcctgagtcttctagccatcacccttctgtttttctctcaaagctccacttggagctcagctggagaaggaaccctgtgaagtctggaattggacatgtctcttattaacgaagtaattgtggagaaaacagcattcttaccactatcatccaggaaagtatcccaagtcccttccttggcagtagcaaacttcccttaattcccttccccttgaggagatgcagccagaatgagagccttaagcagagtttttgggtgaaatgataggcatgttctaggaattgtgacttaaacttggacctcttgtgattttttttcttttcatcttaattactgcatttcactcattcatcatgaaataaactcttactgaaggctttgtttgttccaggctctgttctacttatcagacatacgtcagtgagtaaaacgaatgcactcatggaacctcattacagttgctctagtgggggagatagtacatttacaatcatatacaattgtataatgtcatgtagggaagagcgctatgaagaaaaagagcagaaggacgaagtatgcagatgagagttgaacattattttatattttagataagttgattgaagaaggcctctttgaggaagttatgtttaaacagaggtctagataaatgaggtagaaagccaagcaaatattggggttgggggggttggggagaagattctgggcagaagtaagagcaagtgccaaggctctgcagccagagacagtttggtgagtctgaattagtagaaaggaggccaatgtgaatgctgtgcagtaagccagaaaaacagttagaaataaggctggagatggggtgatgagtatgtgcatgcttggcatttacttttaacataatttgaaagttctctaagttttgtatgcactaaagtgtcctgcattcttcctgtgtctccaccagacactacatttcatttcattcagagacaccactttttttcctcttggtctagcagtaagtgtttatttctgtttttctctcaccctcttctactgatctataactattggttcaaatgtttcttctgtgcagatccttatctttaatgtcacctttttttcccccaacttgtatatttgcctctttatctcatcaacgtatctaactggacgtcctgccatctttaggtttcgacaggtctaaaaccaatctcataatctcattatctttccaaaatcacttcccttctttctcattgataccactgctatctctgccacccaagctgaaaacaccgatgtcattttttacctgttccttccctttatttcttttatccagtcatctcagggccttcaatttatcctttaaaatacctcctctgtcagatcccttcctctgtctctacttcaggttctctgtctaagcccttaaatgcagccagctaggcttagttcagcagtttctatgtggcctttctgacttccttctcgctctgctccaatctaacttgccagaataatggttctgaatcttcactcttagcacatttctttgtgcttcagcacctttatggctacattttctatttccttaaatttaaactcttgtgactgaatctctttttcttttttttgagacaggttctcattctgtcgcctaggtgcccaggctggagtgcaatggagcgatcacagctcactgcagcctctacctctcagtgttcaagtgaacctcccacctcagcctcccgagtaactgggactacaggcatgtgccaccacaactggcaatttttttatttttattttttgtagagacaggtttttgccatgttgcccaggctggtcttgaactcctgggctcaagtgatccacctgccccggcttctcagagtgctgggattacatgcgtgagccactgtgcctagccctgactgaatttcaagctcttgccccagcctagttctcttctactctgtgaaccactcctcagtctaccacttccattttagttaggtttgccccagaagtacatttatattcactcattcctatatgtatttgtttatggatctatcctcaaataatttagtatttgattcagtaaggatccattggttacaagtgacataaaatccaacccaaattggtgtaaagtgagaagggaatgtattctcacatacctgaaaagttgaagatagttctgttagatatggcttggctgaagagttccaattatatcatcaagattcagattctccacttgaacctgcacagaggttgcagtgagcttgagattgcaccattgcactccagcctgggtgacagagcaagattctgtctcaaaaaaaaaaaaaaaagagagtcagattctcccccacatgttagcgctctcctctgctgtttgcttcattcattccacaaatgagcaaccagaagctccagaccatcctcactactagcaaaggtcaagcgcccattcttttgtcagccaatcactgtagccaaaagaatgagatgctcagattggcctggactgattcacaagcccatcccaggagttgtgtctatcagtaacatatgaatggcacagatgatttttacttaaaataggggtatggttatcagaagaagcacagatgtgccctgggtaatggaaacagcagacacaaacacatccctggtattttattgaggtctccaaacattcttcccctacatatgccttcaatgatatctatggctactcaatgtaacaatgtttttttaccacccaaaatgtactcacatctaggtcctacaaataactccaagtccaggatagtaaggtgatatgcatgcctctatatcataaagcaatttgataaagttcttcatggcctagtaacctaaggctgtatgataaaattaactagaaaatacttaatatataatgacagaaaaaaagaacaactgcaatgaaaatgcatatttggaaatatgaataatgacaaacacaaaatgtctctaattcatagcatatgtcatatcttgctagacaggaatagcaagggcttcctaacatgagaggggagaaagttctttgatcaaccaatctggctgccatatgttctatttctggaggacctctcattcattgttcctccatggctatgtctgtaatggacaatgggaggataatcctttagggactacacctcttcagcattctccttcctgatctagtgggaattgaaaaatcacttcctatggcaaagataattagcttttaccacccaagagttgtgaacctcttctgttgtatacaattgttgctgggaagtagctacctagccaggggctacatttcccagcctccttgttaactttggtaaagtcacatgactgtctccattggaatatgagtgaaagtgatgtgtaccacttctagccaatttggttaagtagtaggtatgcctttgccagtctctttttccctcttctggctgcactgaaaggtctctaagaacctggaggacattagagccataagatagaaggagtctgggtagttgaatgattttgtagaagaccacctgctacttaggggcactgatgttagactttacaaaagtgaaaaataaatatctattgtgttaagcttaagtaacctagcctttcttctccacacttaggatttctctcacagtacaattttctttaattcttttttttttttttttttttttttgagacaaagtcttgttcttgttgcccaggctggagtgcagtggtgctatctcagttcatgcaatgtccacctctcgggttcaagcaattctcccacctcagcctcctgagtagctgggatttcaggtgtgtgccaccacacctggctaatttttgcatttttagtagagacagggtttcaccatgttggccaggctggtcttgaactcctgacctcgggtgatccgcctgcctcggcctcccaaagtgctaggattagaggcatgagccactgtgcctcgcccagttttctttaattcttagtaaacttctagtctatttgcatctggccaattccatagggggagaattccaaagccagagggttttttttaagcttcagtctttgaatctagattttcatctgagcatttttgtcttttagtaataggccttggtattctaacttagaggcctctattttggtttctgcctgataacaatttgaaacaatagccactgggtttgcaaggggagggagtgatgatggtgtgtgagctggtggtggagggagtagagtggaataactattacctttctcagcaggcaggaattgcttgaaagaggcctgagtgtattaagacttctccctagtgccaatgttatccattcttgccttcattaacattaacatcctcttggggctttttcaaccctttatggctccagattattgatgtttctgtcatcttttattgcagcctataagcaaaaatgttcacttgtaacaaagtggtatcttttcctctctgccttagataaatcaatcttagtcctaagtttgagcctttcttaaaggacattactaaaaactaacaagtaatagttgatatattttagtatccgaccttttaacaacaggcccttttacattttatccttgataggcacatgttctgaatcccactatacaacaggtgccagtttaacctactgctttggtatcgaagtcccagcctgataccaatgaggcctcatctgaatcagctacttcaacatttctggatctttctgttactaatccccattcctggtatcaatttatgaattgttagagctattttagtgaaaaactagttatatatttagcttaaggcatagtttgatccaagggcttaagcaatgtcattagaattctatttcttttcatctcttgactctgtcttgtgtgctggcttcatttttaggctccatgtggtggctgctgacagctccagtttacataatccttactgttagcaatctcagtggaagagtgcatgcttccttcccacaggtgccagcaatagtcttcttacatttcactggctctgattgggatatgtggctagaggaatccagtagctcaggtctgattcatgtcattaatgtttttgaaaatgaagttcactccacccaaaagacattgactgaagtaacagaagaggaaaatcaggggatggttaccagaagaagggtgaatgttagtaagaggcaaacaaacggagtatctcattagatgacaatgtgtagtgtttcctaattgcttcacatgtgttggttttatctccttcactgggctgactgtaagtgtctcaagagcaagatcatgtattatatgtcttaacagtgccacctcagcaggcggtccttagatactggctgatttatggcctcttcttttattactaaagatggcacactctaagaaggtaacaagagcttaataaagggataatttatagagggatgggaatggttaagggaaccaacaaggaatggtaaagtacttaaggactggcaacaatgggagaccttaagcttgaaggaacaggggaggggagctattagtggaaccctgtaagagctgtagcttggaaagggatgcctgacaaaggctgttactataaataaagaaatacagtcactgccaaaatgtggcccagcaaaggaccggggaataaacacttgtcctcttttcctcccatcctccaaacttctgttggtacctcccattgaccaaaccagaaaccagagggcttgtgtggcacagtctgtagagttcagctgccagtaaaaagcaagacaaatagggtaaaaaatggatctgtaggtgcaaatggaaaattgccaggacacccctcttatattccttgagcaaccctaagtacaagcaattcctattctgtaagtattaaccatatagactggatttatctggaaaatataactttacccttttcaacagacttgttaaatatatagccaatgtggtttgattttaatagcattttaagactttaacattcatgaattcataaaaagtcttttgttagcccatgtagttgaaaaggtgtcgtcattgtattgatatggaactcctcaagaatattgtacctggcaatccatcagaaagtcctggcacagcactcgtcagagtgacaaatttgataaatatttgatgatttgaagaatgattaaatgaataaattaaagcatttcaagccagaagactgtaagtggaaaactagatgggttttccttgttagaggttgataataactatacaacatctaccaatcctgtcccgtaaagcctgaccatcagcttcctagctgttgatcaagatcttatctcttacagaaaatagaaccaaataaattttgtcaatcttcagaagtttcataattaattgtcatgctaataaattcactataaagtcaatttcagttaagggactattatatttcctatctaaaactcggtttcctcatggaattgtcactcagatgtaagaaaaataaatatacttgcttcgatatgtaaactaggactataagtgccagtccaaactttctctaaaagattttatagttaagcccaaaatctataccgctgttctttcacaatcctgtgtatataggacttaaagtcctatacttaaagtcctgtgtatgtaagacttaagtttacaaaatactttcttatgtggcaccattcatttattcaaacaaaaaatactactgagcacatgctatgtgccacacgtaatccctgccctcaaagaacttacaatagaatagtacttcttaaacttttatgagactgtgaatcacctgagaatcttgtgaaactacagattctaattcgctaagtctgggatgggccctgagactacatttctaaccagctccctggtgatgctgataccacttggagtagcaaaagtctaatggatttatttaatcttcaccacaaccacatcataggaaaagtatcagtgttttgtttcttatctggagcacttaactatatacaaacactgtgctatgtcttttgtagataaacaattcagttagatatagagatataggcttttaggaaactcactatacagatgcttctccacttatgacgggattatattccaataaacccattttaagttgaaaatattgtaaatcaaaaatgcatttaatacagctactgaatgtgatagcttagcctagcctaccttaaacatcctcagaacacttatactagcctacagttgggcaaagttgtctaacacaaagtctattttataataaagtgctaagtatcttgtgtaatttattgaatactgtactgaaagtgaaaaatagaatggttgtatgggtactcaacagtaaaatttctactgaacgtaaatcacttttgcaccatcataaagtcaaaaaaaatcctaagtggaaccattgtcagtcagggactgtctgtatagcagaaacagctagtgtaaaaaatagttataattgtattattctgtttatataagatgtccagaaagggaaaatgtatagagacagaaggcagattggtgtttgctgggctaggggtgagaatggtgattaactataaatgatcatgaaggatcttttgggggtgatgaaaatgcttttaaattggattataataatagctgcacacctcaataaatttactaaaagtaattgaaatgtacacttgagtgaattttattatatgtaaattatacttcaaaaaagttgtaaaataatcatgtataatgtgaaaaaatccaataataaaaacatgtcttaactccctttcacagccaaggaaatggagctcatagaggctaagtaatttgcccaaactcatgtacataactagttggtgacagggttagcatataaatctagtcctattaagccaaaagcagtcgttgtcagaaacctctccagaggaggcatagaaatgtatgccagggaatagatacccttccacctagagggcatttgcctctctctctgaaccctcttcactctgtgaggcaaagatcaagctgagtggtgacctaggtggcattccataaacatagtgcatctgacggggctgtgcaagccatctagcttctggcagaccctttggcttcaatggggtttttagtttcaagcaacaaaaatcaatcctgcatgatttagcggcaaaggaattgggtagcccacagaatcattatgtgagttgagaaccaagctcaaagtggtgcagccaagaccaatgcccaaaataatgctgcagaggcaacccagtgagaagattactattactaatgctgctgagcatgctagactctgctcctttcttgaccaacaccactgctttgggaactcaatttggccacaactgcactgttgcaagagaaagagaactgactgctatccttgcttctttgggttattagtttctgactcaaagccatgcaggtgcttctaattagaggagggtagctcaagcacctgaatccaagttgcaaggggggatggtgaagtgactatgtgatgacttctatcagtttctagaaagtgagaatcaggctttacttctaagactcacataccagtgaattctccaagcttagacagttcagatgctgggcagctgggaaaacaaaacaaaaacaaaaattccccccaaaacagatatccactgcgtcattgcagagtggtccatggagcagcagcatcaatatcaaatggaagctttttagaaatgcagaatctcagaccgggcgtggtggctcacgcttgtaatcccagcactttgggaggccgaggcaggcagatcacgaggtcaggagatcgataccatcctggctaacactgtgaaaccccgtctctactaaaaaatacaaaaaattagctgggcgtggtggcgggcgcctgtagtcccagctactcgggaggctgaggcaggagaatgacctgaacccgggaggcggagcttgcagtgagccaagatagcgccactgcactccagcctgggcaacagagtgagactccatttcaaaaaaaaaaaaattaaaaaaattaaaaagaaaaaagaaatgcagaatctcagatcctgttccagatctgcagaatttggatttgcttttgatatggtttggttgtgtccccacccaaatctcatcttgaattgtagctcccataatccccacatatcacatatcacacgtacccagtgggaggtaattgagtcatggggcaggtttttcctgtgctgttcttgtgatagtaaataagtctcatgagatctaatggttttataaagggcagttcccttgcacacgctctcttgcctgccaccgcgtaagacatgtctttacttctcctttgccttctgccatgattgtgaggcctcctcagccacgtggaactgtgagaccattaaacctctttttctttataaattacccagtctcaggtatgtctttattagtggtgtgagaatggactaatacagctttctaacaagcagtcaggtgatttgtgtaaatattacagtttgagaagtgttactctatattataagacatattgttttaaaaaaaattttcaaggatcactcatcattatgctctactcatccgtagggttactagatttaatgcaggacatggcactcagttaaatttgaattttagataagcaaggaataatttttaaaataagcatgttccatacaatatttgttatactaaaaaattattccttgtttatctgaaattcaaatttaactgggcatcctgtattttatccagtaaccatccttacaaccatccacacaaccctcaccttataattaagaaaaatgaaataaaagaatgggaaattaacataactgcctactgaaatgcatttatatcagttttctgttttggcatggtagactgtaagtgtcttgagagcagaacatggaaactgcacaaatccaaacacactctgcattctgcttaagcatttgatgcttgaggtcctctataatttgaagggtgaatgttaactgttctgtcaggtaggagttatttttttaatatagctatgaattttaactaatttcacttaatgagttttgaccaataacacctttatctcaccgaacctgaccatataaactgagtaaataaagaaagtatgtgatgactgggttatatcattgctgggttacttctggagactgctattataacttcattttcttcctaaagaaaagagttggtcaaaagcaaaacttgacaaatgggatctaattaaactaaagagctcctgtacaggaaaagaaactatcatcagagtgaacagacaacctgcagaatgggagaacatttttgcaatctatccacctgacaaaggtctaatatccaaaatttacaaggaacttaaatttacaagaaaaaaacccaaacaaccccattaaaaagtgggtaaaggacatgaatagacacttctcaaaagcagatatttatgtggccaagtaacatatgaagaaaagctgaacatcactaatcattagagaaatgcaaatcaaaactacagtgaaatactgtctcacgccagttataatgctgattattaaaaagtcaagaaacaacagatgctggtgaggctgtggagaaataggaacacttttacactgttggtaggaatgtaaattagttcaaccattgtggaagacaatgtggtgattcctcagagacctagaaccagaaatatcatttgacccagcaatcccattactgggtatatacccaaaggaatataaatcattctattataaacatacacgcatgtgtatgttcactgtagcactattcacaatagcaaagacatgggatcgacccaaatgctcatcaatgatagactagataaagaaaatgtgctatatatataccatggtatactatacagccacaaaaaggaatgggatcatgttctttgcaggaacatggatagagctggaagccattatcctcagcaaactaatgcaggaatagaaaaccaaacatagtatgttctcacttataagtgggaggtgaataatgagaacacatggacagagggaggggaacaacacgactggggccagtcgggggtaggggagcggggggagggagagcctcaggataaacagctaatgcatgtggggcttaatccctaggtgatgggttgatagatgcagaaaaccatcatggcacaagtttgcctatgtatcaaacatgcctatgcatgtcctgtacatgtatcccagaacctaaaataaaattaaacttaaaaaaaagaaaagagttgctgcctatgcccaagaattttagaaaaatagctttcaaacattctgggaaagaggcagattgtatatgtcaatcagaattagaagtatcacattcagaaatcaaagaaaacttttagtactttaaaatgtagccaggtgcagtggctcatgcctgtaatcctaacacttcgggaggctgaggtgggccaatcgctcaagctcaggagaccagcctggacaacatggtgaaaccctgtctctacaaataatacaaacaaattagccaggcgtggtgatgtgtgcctacagtcccagctacttggggggctggggcaggaccatcacttgagcccaggaggtggaggctgcagtgagccgagatcatgccactgcactccggcctagacaacagagtgagaatgtctccaaagtaaaataaaataaatgtatgccaattgcatgtatttgtaagacggcttaattcattttaacatttagcaagtccagttatttccaaccggccaataggcaattttgggtagttgagagacattgactttccttttataacctgttgtgtagttatcagtgagccacctccaatagagtttaccaataaaaattttccatctatcatactcccaccaaggcttatcttatcctgttggtgagcaatgaaatgtccagggactgtgagagggattacagttctaagaagcagaatattctctgggactaatgggtgttggaaacctaaacatgtatttgcccccctctcccagagtttttatatcacatttgcttccactttttaattcattgtttgcaagccccaccctagaggtagatatctgtgatgactgaatgatgtaccctggcctataggccagaccacaaacaagctagttaactagtcttacttttttttttttttttgagatagagtctcactctgttaaccaggctggagtgcagtggcatgatctcagctcactgcatcctccgcctcccaggttcaagcctcccaagtagcaggattacaggcacgcagcaccacacccatctaatttttgtgtttttagtagagatggggtttcaccatgttggccagggtggtctcgaactcctgacctcaagtgatccacccgcctcggcctccccaagtgctgggattacaggcgtgagccaccacgcccggctagcctttctttaaacattaaataataatagagaaaacatttatgagtacattttcagtcacctacgcacactatttctataaaacagctaagtatagctatgtgttacttaacgatagtataagttctgagaaatgcattattaggtgattttatcactgtgcaatcatcatagagtgcacttacacaaacctagatggtatagcctactacacacctagggtatgtgttatagcctattactcctaggctataaacctgtatagtatgttactatactgaatactatatgcagctggaatataatggtaattatttgtgtttctaaacatagaaaaggtaatgcattgtgcaaagacattagaacagttacatcactagatgatagaaaattgtcagctccattatcatcttatgggactaccatcatatatgcaacccaccattgaccaaaatgtcactatgtggtgcatcactgtatttatagtagagaaccattagaaattatataaagccccttcccccgaacagtggacttattaaataaataatagtataggcttacgatgcagccattaaaaataacatttttggctgggcatggtggctcacacctgtaatcccagccctttgggaggccgaagtgggaggataacttgagcctagcaagttgaagctgcagtgagccatgatggcacgactgcactccagcctgggggacagagtgagaccctgtctcaaaaacaaacaaacaaaataaacttttgctgggttccctgtcacatcagaaggtaagtataaaagacttctaagtcatgtcaaaagagactcaggaataaacctgaagatgcttccatcgatcaaagaggtgaggaagagcttgagcatgaattccatccgtaatggatagatgcatggtaaatatgttttagtcagctcagattgatactctaagacaaaaaaacctctgttggtacctttggaagatacaaggaaaccaacttattatttaaaaaactggtaaatacagagaatgaatcaagcatctagttcatttctcatatataaattgtacctcagggtaacccaatagttgatgataggaggtttctctttacagaatatttcagctaataattgatgtagaaatgatagagtgtcatcatattgtaacccctagtgaaataatgcagctagggaatgatcattaatgatgactaactttacaaaaagattaacaagcagacatatgtctcctacattatcacatatcaaatattcttgccaaaaatcaaactagaatttgatcaagcctatatacctaaataataacaaaatacagaagataaagaaacatattaaataacactaaaggagttacaattagaaaatttacactataggccagtcgtgatggcttacacctataatcccagcattttgggaggctgagattggaggattgcttgtgcccggaagttcaagatcagcctggaaaacataatcagacctgatctgtacaaataaaaaaaaaattacccaggcgtggtggcttgtgtctatagtcccagctacttgggaggctgaagtgggaggattgcttgagcccaggaggtcgaggctacattgagccctgattgcaccactgcactccagctagggtgacagaacaagaccctgtttcaaaaacagaaaaagaaagaaagaaaggaaggaaggaaggaataaagaaggagggagggaggaaggaaggaaggaaggaaggaaggaaggaattcacactatggaaagtcctataggacaaacaactcaattttgcctcaacaaatccaataaaagagaaggagggagaagcaaaagattaagaggcttaagacacatatcaaataatacaacatgtggactttatttggatctcaattttgaacaaattaactataataaacatgagacaattgggagaaatccgaacactgaatacttgacgatattaaaacatttaaatgaaaactgtgagatgttacaatgatattgtcattatattttttacaagtgtccttatcttttagatgtaaatgaagaaacatttgtgaatgaaataatttgatgtttgtttcaaattaatctggaggtagaaatgtttcaataaatgttgaagctgggtggagtttcaaaggggttcattatactgttctttctacttttttatgtgtttgaaaattttcctaaaataatgagtttataaacttgtattgagagcataatcttaagtttgtaatatatattatgtatgtatacacatgcatgtacataaacaaagattagaaaagagaggaaacacaccaaaaaatctttaggttgtctccttacgatgatattataaatgaaatttacattctttcttattcttatttctttcttcttttttatttagggaaaatagattttaagaggcacaagatccagttattttcaactctttaaccttgacaaataatgaagaccagaaaaaaattttctcaactactagaagttgtctttatgcagtggaactatatgaaattttatttcagttttttacatttctgtatttttccatttttaatataaagggacatcattttaggattcagaaatccaacaaacattaaatctaaagggacaattaatttatgaaggataaacaaaattatttatgtatacaagatttttaaaaaatacaggtgcaggcttggtgtggtggctcacacctgtaatcccagcactttgggaggccgaggcaggtggatcatctgaggtcaggaatttgagaccatcttggccaacatggcaaaaccccatctctactaaaaaaaatacaaaacatgagcatggaatgttcttcatttgtttgtgtcctcttttatttcattgagcagtggtatgcagttctccttgaagaggtccttcacatcccttgtaagttggattcctaggtattttattctctttgaagcagttgtgaatgggagttcactcatgatttggctctctgtctgttattggtgtataagaattcttgtgatttttgcacattgattttgtatcctgagactttgctgaagttgcttatcagcttaaggagattttgggctgagacgatggggttttctaaatatacaatcatgtcatctgcaaacagggacaatttgacttcctcttttcctaattgaataccctttatttctttttcctgcctgattgccctggccaaaacttccaacactatgttgaataggagtggtgagagagggcatccctatcttgtgccagttttcaaagggaatgcttccagtttttgcccattcagtatgatattgggtgtgggtttgtcatagatagctcttattattttgagatatgtctcatcaacacgtaatttattgagagtttttagcatgaagggctattaattttgtcaaaggcctatgctgcatctgttgagataatcatgcggtttttgtctttggtgctgtttatatgctggattacgtttattgatttgcatatgttgaactagccttgcgttccagggatgaagcccacttgattacagtggataagctttttgatgtgctgctggattcggtttgccagtattttattatggatttttgcatcgatgttcataggaagaatcaatatcatgaaaatggccacactgcccaaggtaatttatagattcaatgccatcctcatcaagctaccaatgactttcttcacagaattggaaaaaaccactttaaagttcatatggaaccgaaaaagagcccgcatagctgagacaatcctaagtcaaaagaacaaagctggaggcatcacgcttcctgacttcaaactatactacaaggctacagtaaccaaaacagcatggtactggtaccaaaacagagatatagaccaatggaacagaatagaggcctcagaaataataccacacatctacaaccatctgatctttgacaaacctgagaaaaacaagaaatggggaaaggattcactatttaataaatggtgctgggaaaactggctagccatgggtaggaagctgaaactggatcccttccttacaccttatacaaaaattaattcaagataaattaaagacttaaatgttagacctaaaaccataaaaaccctagaagaaaacctaggcaataccattcaggatataggcatgggcaagcacttcatgtctaaaacaccaaaagcaatggcaacaaaagccaaaattgacaaatgggatctaattaaactaaagagcttctgcacagcaaaagaaactaccatcagagtgaataggcaacctacagaatgggagaaaatttttgcaatctacccatctgacaaagggctaatatccagaatctacaaagaactcaaacaaatttacaagaaaaaaacaaacaaccccatcaaaaagtgggcgaaggatatgaacagacacttctcaaaagaagacattgacgcagccaacagacacatgaaaaaatgctcatcatgactggccatcagagaaatgcaaatcaaaaccacaaggagataccatctcacaccagttagaatggcaatcattaaaaagtcaggaaataacaggtgctggagaggatgtggagaaataggaacacttttacactgttggtgggactgtaaactagttcaaccattgtggaagacggcatggtgattcctcaaggatctagtactagaaataccatttgacccagccatcccaccactgggtatatacccaaaggattataaatcatgctgctataaagacatatgcacacgtatgtttattgtggcactattcacaatagcaaagacttggaaccaacccaaatgtccatcaatgatagattgcattaagaaaatgtggcacatatacaacatggaatactatgcagccataaaaaatgatgagttcatgtcctttgtagggacatggatgaagctggaatccatcattctcagcaaactatcacaaggacaaaaaaacaaacaccacatgttctcactcatagatgggaattgaacaatgagaacacttggacacaggaaggtgaacatcgctcaccgggacctgtcgtggggctgggggagtggggagggatagcattaggagatatacctaatgtaaatgatgagttaatgggtgcagcacaccaacatagcacatgtatacatatgtaacaaacctgcacgttgtgcacatgtaccctagaacttaaagtataataaaaaaaaaaaagaaagttctgctttaataaagacatcaaaaaaaaaaaaaaacattagctgggcgtggtggcacatgcctgtaatcctggctatttaggaggctgaggcaggagacttgcttgaactcaggaggcagagattgcagtgagtcgagatcgtgtcattgcactctaatttgggcaaaagagtgagactctgtctcaagagaaacaaacaaacaaacaagaaaaaacaaaaaaaatacaggtgtaagaaacattatttacattttacatgcctgtttggcagattaacactaaggcaaggatggcaaaacaaatcagagaacttttgattcaacaaatgaatgcaatgaagctacatttctaagaaaactgtattatttggctaaaagggaaattaagcactggactaagagtatagagaagggctggcaaaggaaaccaggaaggggaaaaaccaaagggtaaatttcagagtgtttcagagaatcactggttggttaaatcagagaaactgaattttactatcaaatgtaagaaagagtaagttcagaaagagattatgcttttatggtttcatagcctacttttttctccgtaacatcgatataagccttttccaattgtaggaaaaactttctaaatttcattaaaaaaaacacggttaaaaaaatgccatagatttgaaaattctcttgatctaccataatatgttattaattcctcctcactggatatctatttttaaatcttataaacataatgcttttctttacaaataaaacttttcccctattttcctgaaagtagaaattttttgtaagtagaatcactaggtcgagagtatgagcatttagaaggctcttgagatatactgaatagttgctttccatagtggttttggctaattattaatttactaattcctaatctacattcaatccagcagtgtttatgggtgcctatagctgcatattcaccggcattgatcatcatgctttttaaaatatccatgctaatttggcagttgtaacatgggatctcattttacttgcatatccttgatgggtactcacattaactattttaaagctgtctttaatgaatattctgttatgtactttgtcttaaaatgtaaatcttttgaactgtctactgtgtctagatctttgtttctatttgattgacagaataaacaatgaacccacttagacatattgactaaaagagtcaggttttaagaacattgcactggcatctttgaaatgcagagaacaagttcccacttgagcatatgtgttcctccccacccccactgttttacctattacttcatgctaatcatcctaatgtttcagatagttcttttaagtcccctacgtgtgtacctagctgcaaatcagttcaatttacagatggagcaaaaaaacaacatggatgttattgatgggccagccacattcttgtgctttgtccttctgggaccaataccttttgaggtggtcaggaacagaagactgatctgtgtgaagagacccttgcttctctgagagaagttaacggatcctttggggataagcctatgattttgatttctcattagcatcgtgagcttcattcaagtgtgactgacagtcacacaagtcaatacaggagcactttgggagagccaaggtagagttttttcttatagactaacgcttctgttcttagagggttcattggaaaaacaaatcagagcacttttgattcaacaaatgaatgtaatgaagctacatttctaagaaaactgcattatttggctaaaagggaaataaaatactaaatcccttgttcaaataaaaatgttactgaagtaaatgaaagtatattctagatgattattaatgctttcattttcactttctttaattctattttaagtcatatctaaagactaaatgcaactcagatttagaaagcaaagaaaatttatatatttggcagttttaatcccaccaagcatactttatgaaaacttgaataatgtcaagatggaacatatcagatcattagaaatagagtggaagagggtagccaaagacccaggaaataatgagcaaatctcaaccactattttcctcagctttcgttcccaattccagaggaagttgatatccctccatgtaaaagatgtttaaaatattcaatggcattctttcattgtgctactgaacacagtttgaaggtttaaggtgaacatttaagcttaacgtttaaagattagaaacaattaaaaaaaaaaaaactccaataggcttataatgcaaatgaataggaaaattatactaagacatctcaaatttaaagaagaatgtcccaatcacaaaaacttaatgtgtaattgcataaaaatgccagtggagtgaaattagaaattcaacagatgatccccaaataaaatatttctgcatatataagaacaattgttccctaactcttcttaaataaaagtgtcaataattaagtgcaatttaaatcatctaatccaaatcaatcaattcatttttatgaaatcacccaggggaatcaagacaaggtaactttcactgaaaatacaatttctcatttaattaataaacaattactgagagattattggcattagaaggaagacacatttattaataagaaaaaataaatacaatataaacctttacccttgaagaactcctggttgaaggaaactgatcatatgcaactaagaatttgagaatactgaccatgattttttgatgaatgttcaaatagacaacagattgactattataatagattgaatttgcctaagatgccagtgacttgtaagaaaacatttacaagatctgacatgtggtgagagctgaacttggtgtcacatagtgtcctttttctggacttttcaccagtaataacttttgcttttagcaactatttaaaaatggttaatttaaccagcctgggcaatatagtgagaactcgctacacaaaatacaaaaattagctgggcatggtggcgcatgcctgtggttccatctacttgggaggctgaggcaggaggattgcttgagcccaggagttagaagctgcagtgagccatgattgcaccactgtactccagcctgggcaacagagcaagatcctgtctcaaagaaaaaaaaaaaggttaatttaaatgcatttttattccttttagcgttgctgtattttgttaagtacatctctccaatagtctttatctattcaaggtatctactctggtagcccgacttaggttcatcttaattttcctgagctgttaaggacctcacagggccactactctaaagatattgtttctcaaactttagtgggcatcagaatcacagggagggcttgttaaaaaataggttgcagcagggcgcgggggctcacacctgtaatcccagcactttgggaagcctagacgggcggatcacaaggtcaagagattgagaccatcctggccaacatggtgaaaccctgtctctactaaaaatacaaagattagccaggtatggtggcatgcgcctgtagtcccagctactcgggaggctgaggcaggagaatctcttgaacccaggaggggaggttgcagtgagctgagattgggccactgcactctagcgtgagtgacagagcgagactccgtctagtctcaaaaaacaaacaaacaaaaataggttgctagcccaaccctcagaatttctggaatggagttctactcactgagtaggtcttgaatggagccccaaaatttggatttctaattagttgccaggtgatagtaatactactcatccaagaatcacaatatgagaaccactgttctaagtgatatctatttgcttgttttcagaagtaagatagttgagatcacaagaagagttgaggaaaccaagaaagaattttcttattcccatgaaaatctcaggcctagttctgtgtattcatgtattcagcgccatcttttcccttctgcagggttctggtattgggtgtcttttttttttttctttttctttttctttttttttttgagacggagtttcgctcttgtctcccagactggagtgcaatggcgcaatctcggctcactgaaacctctgcctcctgggtccaagtgattctcctgcctcggcctcctgagtggctgggattacaggcacccaccatcagcattttgctgcccgattcttaaatattacacacagccaacgaatatcagaagtttgagggaagtctctcttgtgggagagagaaattgaaataacaaaaagtgaattggtgaaaacagagactaaagaaggaaaataaaactatatacagttagacatatttactatttctagagttacatgtgagatacatacatatatatgtagtcaggagaaagttgcaaccatgaaacaaaagcagacagaataattttttttaaaaagaagaaatagtgttcaggatattaaaaaaagagccttaggattgaaaataggaggctgggcatggtggcccatgcctgtaatcctaacattttgggaggccgaggtggatggatttcctgagctcaggagtttgggaccagcctgggcaaaaccagtgaaatcctgtatctacttaaaaaaataaaaataaaaataaagaaaaagcaaaagaaaagaaaatagaaaagtagaaatgaaaaaaaaaagattagaaaagaaaattaaggaaatttaagcagaaagacagagaagaccagttcaagaagttcagaattcaaatagtaagagctcagaaaaaaaaaaagtaaatgaaataatctaagaaaaattctctgaattgaagtataaattaccaaattgaatgaattcatcaagtggacaccacaatggataaaaatagatctacaccaaagtctgtgatcaggaaatctgaatacacagcagacaaagagaagacctttaagcttccagacaggacacaaaagaagacaaatagaaaggactgaaagtaaaaaatggaatccattgttttacaacaacattggaagcaagcgggcaatggaacgagactttcaaagattctttttttttttttttgagacggagtctcgctctgtcacccaggttggagtgcagtggctatcataagtgcagtcacagcacactacagcctccaattcctgggctcaagcaatcctcccacctcagccttcagcatagctgggacaagaaatgtgcaccaccacgcccaccttccaatatgcacatttctaatagctagctctcacgttactcactagaatgagagaagcattccaaacactaaatactttttggaatgcatccctgccacgtatttgaaaaggcaggtgcagacccggtgaggtggctcacactggtaatcccagcactttgggcggctgaggtgggcggatcacctgaggtcaggagttcaagaccagcctggccaacaaccgcatctctactaaaaatacaaaaaaattagccaggcttggtggtaggcgcctgtaatcccagctgcttaggaggctgaggcaagagaattgcttgaacctgggagtcagaggttgcagtgagccgagactgcaccactgcactccagcctgggtgacagagtgggattctgtgtcaaaaaaaaaaaagaaaaggaaagaaaagccaggtgcctaggaactaagccaacaaacagaacttattctaaatctgaaaaaagactagatttcttattctgctctacccatttaacctgtccttgtttggaatttaaaagtttgaaaactgatgttgagtaccaacagggactgaagacaacccattagaatgtaagctccatggagacaggatttttttttctagtttttcattagtatagtccaagcatagaagacagttctggcacaaagtatgtacttaatatatatttattcaattgatgaaaaactgaaagaataaattaatggcagaggcagtcaggagtctacaaaatagcagctgaatttataaggactcaagcttttgaaaaattaaattaaatcatcattcataactttctactgaccacctttacaaccaaacctgcaaaagaatggtagtggatatttgtcatagtccaagatgatgaatgaccatcatctttttaaacaacttttttttttttttgagacaaagtctcactctgtcacccagggcagactgcagtagtgcaaacacagctcactgcagattcagcctcctgggctccaacaatcctctcgcctcagcctcccagatacctgcaaccacaggtgcatgctaccatatccagctaaattttaaaaattttttgtagagatggggtcttgccatgttgcccaggctggtttcaaactcgtgggctcaagcaatcctccccttggcctcccaaagtactgggattacaggtgtgggccactatgttaaacaaccatactacattaaaggactttttttgtggtattaaaggacatgctcaagcgattctcctgcctcagtctcctgagtagctgggactacaggcatctgccatcatgcccagctaattttaaaattttttgtagagacagggtttccctgtttctcaggctggtcttgaactcctgggcccaagccattcacccacctcggcctcccaaagtgctggaatcacaggcataagccactgcatccaacaattcttttaacaacagctatcctttccctattctcatcatatgactggcaagtcaccaaatacttaagtttttagtctgtacaagttttactttactggcaaaagggaggattttttcaggtgctttgatgtggtaagtattctttgctttttgatttttttcttagagcatctattttggaaataattaatccttaatctgtgggagtagcctacacaaatctctaaatatgtaagctgacttccatcatgccattacaagcacatgagtccggcactccttccttaaaaaggtacccaatatggccaggcgcagtggctcacaccggtaatcccagcattttgggaagccgaggtgggcagatcacctgaggtcaggagttcgtgaccaacctggacaacatggcaaaaccccgtctctattaaaaatacaaaaaattagacgggcgtggtggcgggcgcctataatcccagctattcaggaggctgggacatgataatcgcttgaacttggtgggtggaggttgcagtgagccgagattgcgccgttgcacttcagcctgcaacagagcgtgacactgtctaaaacaaaaaacaaaaaacaaacaaaacatttgggggaccaggtgcagtggctcacgcctgtaattccagcacttagggaggctgaggcaggcagatcacctgagcccaggagtttgagaccagcctgggcaacatggtgaaactctgtctctacaaaaaaatacaaaaattagctgggtatggtggtgtgcgcctgtgatgctagctactcaggaggctgaggttggaggattccttgagcccagaaggtcgaggctgcagtgagccgtgactgcactactgtactctagcctgagcgacagagcaaaatcctgtctgaaaaaaaaattgttttgaaaatttcattactgatgtcttagtgtggttttgggaaggaacaaaatttggagcatgtgttcaactgccatctctacctagaagtgaataacaattcatttctcaacacatgttttttgagcaatttactacttgctaggcactgtgccaagatacacacagaaatatggaaaaaggttattaattcattttttctgattaactctactaagttaaaaaaatggaaatatctctccaagtttgatgctctagattgtttagcagtttttttcctttcctggcctctgaatttgtctcgattttggtgtaaatgtgtgtttttataaaatatgaaaggagattctaaaggggaaaaagatactgagtgtaaaagatattgagtgacaattggggggggcatgtcctcatatctgaatatagcattcatataagccatctaagtgtcttaaatagtggataaaaatgatattggcaaggagtagagaactatttttatctatcaacattcagagggaaaagacgaaatctctaccaggaaataccacaacagtgggaggttcttgctggctggtggaaaagaatgcggagagtagatggttggtcattagtagaatttggctcatgagagagtaaaaagtcttggcttttagttcatcaatgatggtagtgccatgaactgaggataatacttattaaactcactgttacataaattatccctgttagtcacaaggggacagttattctccttttctcttttctgagacagtttcattcccattgcccaggctggagcgcaatggtgcaatcttggctcactgcagcctccgcctcccgggctcaagcaatcctcctgcctcagcctcccaagtaactgagactacaggcgcatgcgaccatgcccagctattttttgtattttttgtagagacagggtttctccatattgcccaggctggtctgaaactcctgggctcaagcaatccgccagcctcagcctcccaaagtgctgggattatgggcataagccactgcacctggccagttattctcctatagagcagaaagctaccatacggtctactagccgtcaacctcggatcttagtggataacgttaggaggccagtcacttcatccggagagtaatttactacccctgctaaacacctgacttgattctcttctctctctccttctcctcttagcttcctagaatacttgtcttctaaaaagggtccaaggttaagtcaatctgccaaggaagcaaaaagcccattgctttagctacttttccttttgactataaaggtttctctgggcaactctggtgtcccataaaatatgcatgtgtgttcaaggatgaagtgtgtgtgttgtgtgtgtggggaggctgaaaccatgttgacagaattcctgtgtctgtccagtagtggattacagtgaatggacagtgaactaagctctattagattgctgggcatcgtggctcatgcctataatcccagcactttgggaggcttgaggtgagaggagcacttgagcacaggagtttgagaccagcctgggctatatagtgataccttgtctctatgaagaaaaatttaaaaattagccaggcgtggtggcatgcacctgtagtctcaggtatttcagaggctgaggtgggaggatcacctaatcccaggaggcaaacgtgcagtgagctgagattgtgccacagcactttaatctgagcaatagagtgagactctgtctcaaaaaaaaaaatctattagattataactttcttgagggcagtatgggttttagaccttctgtcctgaaacatttaacaccatgcccggcatgtgagaaatgcacattaaatacttttcaatattaacttatcgatagggattaacttatactacacaaatagtactattaattaacactgaatttgtattacttagttgtttctctctgagcttttcaataaaggcttctggccctatctagatgtgtcagcaaaggcccagaaatgagttataagtgatacaaaactccactttttatattctttttgtcttctatataagtcagagctattataggagattcactggtgggaatcattttctcttattaaaaatgacacaagcaaaggctatattatgaaaaataacttcatgttataatgtcaaatgaatgatagctttaattccagctcctcctttttgggtctactatgctcttggcactacgttaggtgcatggtactgacagatgcatgtcagtccgaaccctcaaggggttcacaatctaataaggaaaataaattataaagtaaaactatacgggccataatagatatgaaaaacttcaccaatcagtccctaagtaatgagggagcccctatgactgaaggtttgggcagacagatattcttcctctgcactagttgtgtgagcaggatgagaagagaatcttgaaaacagcatgaatccaacatgtgggatcacataccttctccttctgcaagatttctttccagttttactgtggagtcatagaatcttatcacagtgctatggtttcaatgtgtctcccaaagttcatgtgttgacaacttaacccccaatgcaaaagtgttgagaagtgagacctttaagagaaacttctaagagggtagagccctcatgaatggattactctctattgtgtgtgctcacttgccacgggataacacggcaagaaggccctctaaagatgccagtgccatgctcttggacttaccgggctccagaaccatgagccaaataaacttctttataaatcactcagtctatggtattctgttagcagtaggagaaaatgaactaaaacacatgggaatggggccttaaaaatgatctaatcagacttcctacctgacgtttatgtctttgctactaaaaaaatggtcattggggtggtactgtgtagaccacactagattacagacaacagaaaattcgaatcctattggtctaatcagtgaagatagacctgaattcagaagttgcttgattcagagcctcaaaaatgtcaccaaagccaggcacggtggctcacgcctgtaatcccagccctttgggagcctgaggagggcagatcacttgaggtcaggaattccagaccagcctggccaacatggtgaaaccacgactctactaaaaaaataaaaaattagttgggcatggtggcgcgcacctgtaatccctgctatttgggaggctgaggcaggagaatcgcttgaacctgggaggcggaggttgcagtgagccgagatcctgccaccacactccagcctggtgacagagccagactacatctcaaaaaaaaaaaaaaaaaaagtcaccaaagatcagatctctatgcatgtttgttttcttgatgtcttctttattttaacccggctagacttgtatttggaagatggctacccaccatccaggggacccgtttttttgaggacatgcagaaagaatgggttacctctgaagcgctctcagaaaatgaaagaaaaacttttcccaacaaagaccaggaaattgctcctctcattggcccaaatatgttacgctcattgccagccaataactgtggcagggaatgggattctgctgatttaggttggaattatgctacgttgcttagattgggaccacatgcccctgtaagtaggcagagcagggatgtgactcagaactgggcttgtttaccaagataaggaagagtggatactggggagtctaggccaccataagtttcaggtacagccaatgcaaagccttggaaatccacctgacagctccggttgtaccgtccgccctccgtatctggggtttccaaattccgggattcaatcaactgaaaacaaaaaatgtagttaggcttaccaggcctgaaaatacatgaaaatatagagcctaaaatatagcctgaaaatgtactgaaaatatagagatttctttggatgattatttcctaaatacaccttaacaactattcacatagcatttgcattgtattaggttttataagtaatctagatatgatttaaagtatatggggaaacacaccatttttatgtaagagacttgaacatcttagaaaatccagagtctgggaaccaatcccacggatatagagacaactgtactaactacagtaatggcatatggtagctgaatctacctctctttccatcccagtccggaatccaaaggctccttcttgccatgttgtcctcgggcgttggctgcttcctcccatttgttactttggaagtgtcttctttcctcagtgtttcttctgcgtgggccttaccggtctttactgcactcacttacctaagaggcaaaacaatggctgccattcaagaaaatctcacttcagcccagaatcgaagaactggggcttattttgtcttctttctactctggggcttctctgaggccaagttcagaacttgtgcacaagacagtggctgtgtgacagagccacccagggctgtctccgttagatgaagagactggcttgatccattcccaagaactagtcccacgtgcagttcggttgctccgaatgggatttgggtgcgaggggctgactggagatgtggggtctgggtgagtggggtatttgagaacctgaagctcacaaggctttgtctggtttgaggtacgttttgccctttctcccgcattcggctctgcatcgaatctgaccggccgcgcctactctcggaacggccgaggaggatgggtctcccgtctccacacgcgcggtgtctgcgccgactgcagccctcctggacgggagcctctgggcccagcttagggtggcgtccagcgtgacctactcgggaatggcagccttcagtgtcctgcggcctcgggttccgggaagctcggggacctgggcagcggatccagatgcttccacagctgtgtctccgtcgctccgcttcgggggccgagaaccagcaagaccaacgcgaggaggcgccacggtacctgccaccccgctcccaggaggcccggacgaggcttcgtcggcgagcggtcggggcctgcttctcgaggtgcctgcgagcgcctcatgcccctccccaccggccccaactccgtcccgcctcacccgaccgcgggctttgtccacccgccgcggtgcggctcctcccagtccccgacagctcctccccgccccctctgccggccccacttcctaggcggcggagcgggtcggggagggaagggttaacccgcggctcttcccggcgcggagggatccggaggcgagccgagcgcggtggtgaggccgcctcagcgaaaaaaatgtccgcctgaagagacccacaagttctattcggggggaccgacagcccgccccgggaggaaggggcggccaggcccgaaagccgcctccccctcccagacccgagagctcgtgcggggcaaagtgaaccgagccgctgggcggtgcaaggggaagcccaagcccgttctcccggccaaagtgaactttaatcggggtggttggatgcggagacggggcggcaggtaattgcgggctagcgagcgggagtggggcggcgcggcggggctgggggctgcggggcgccgccgcgtccctgccggagtgggggcgcccccgtcccccgcctcaactccgcgcccctttgtacagcgcgaaacccggggtcccctccaagttggggagcggagtgggggcggaggctcgagtcgcgggcgctcaggcccgctggcggcgcgctcggcctgtgcgccccgttcggtgcccgactcgggccggcgcccaggctccggggcgcgcgggagatcgggcggcttcggccgcggagccaggctcattgttcggcaggtccggggcagggcagcaaaagtgggaggaggccgagcctggggaggaggacgccggccgagagcgagactagttgtcggggtttctgttttctgtttaaaaacgccccttggatgagctgggggtgctttccgacctcctgggcccgccggggacgtccgggcggcggcggccgcagacgcgggcctgcgagcggcgcgttccctgcaacttgtcagttctattgttgccgagcgagtgagtcacttcgcatctccgctcgccgccgctccgctcgctggacgccgaattgcccctcaccccgctcctcgagaccccagccgcggccgggcccggcgcgcggagcacccggcggcggcgcggagcagggggcgccgaggaggtggcagagactggctcggaaacttgggggagaggcggcgagttgcgggagccgccgcgtcgatctcgggccgcggcgaggaacgcgtggattccgggacccggcgcgggcactgagccctcccgccccttgctcgcgccgcggtgggagcgagtcggggtcctggaagtcatcccggcgcccccagcgctcttgcgtaatcttccccagtacctctctctgttccctcacacactttgggcctcggtggtctctcgctgagcccgtttcctctgccctaggacctgctagaagtggccgaagatgaatccccagcaacaacgcatggccgctatagggaccgacaaggagctgagcgacctactggacttcagtgcggtatgagagct
